United States Patent Application Publication US 2006/0134663 A1 - sequence listing, part 69

SEQ ID NO: 181664 - DNA, 1115 bp, Homo Sapiens
ttggccctgcttctcccagagagaactggaacgtgaatgaacgccttcgtgactgcagtgtgcatgcatgcaagtgtgggagggtgtgtgaggagtggaggaatatcgcttaggttgtgtgtgcgcccacgaatgtatgtacagttcacaaacgtgatgtctgtgtaatgacagcggctgccatttagttgaagcatgtgccaagctctcagcaataacatcttaacttgatggagtacttctaggtgctgtaccaaccctcaatacgcactatcccctctagacccgaactggccctaggagatgagtatccttattacctcatttgacaggtgaggaaacgggggctccaagtggttaagtaatgtgcccaaggccacagagctaggaaatagatgctggatttgaactaagaatgtgtcattccagaaccagggctcattgccttgacaacatacagcgcaaatcctgtactcaggatgtcaccctcttcagaatgttgctgctgtcactcaagctggctgctctgggccatgatatcccaaggacaggtgaatttgggcctcaaaggtatccctttgcatggtccccaggagagcctcattggtgacacctgcagggccctgacgaccaggccagaactagcattcagccctcttgggcaggcccatggggtggaaatggtgccacctgcagaagtcatcgcccctgtgctgggctggcctctgtgccctccatgtctcagatatgccctgacctgttgggctcacaaggccttgtccacataccaggaaggagggcactcccttgccaggcacctgtttgcttttcacagctgggtctctgtccacccctctagggaggcaggactgagggaggctgggcgccccgtccctcctgcacttgctttccttcagtagggccctggcctcagcacaggtaacttcccccctcatttcagctcccagaggtctcttggttagtgcacttgaacccagccacccccaacccagaagctccaaaaagtgccaatgcctgggacccaccctgcagatactgttgtagttggtctgaggcacagcctgacttggggtttttttaagttctgcatgggg

SEQ ID NO: 181665 - DNA, 933 bp, Homo Sapiens
ttgggagggtgtttaccgtcgtgcctaattacgcgggttgggaatctgagatacagggaagggcagcggctggccctgggtcggtcagataaattaagacaaaagcaggaccaggcatcgattattttctcctgctcatccctttcacggaggaattctaagccccgacacactgtatgacctaaagccagtctctgcctgtcgctgggcctcagttcgcctgtcctaagtttaattcagattatctggcactcctggtcggctccctcagccgctcaaagctgattgtacccttataatgttagttcatccattcaatcttccatctacttatttatccacttattcatgcctcctagaatgtcttactgaaccctgcttgcatatgctacaatccctccaccccgacatttggctgtgattcatgagaggtcgttagtgtcctaaatttctgacactgggtgggtgtggtatgggccatcataaagggtcaaaaagcaggttttagtgtgtggaggaggtagggatagtttcagtagaaccctgctacctctaattttgtataatttcataatgccagtctgcattctggattcctatccctacacttgactcccattctcatccctccttgaacagcctgcaaacagctttgttgatccattatttacttaattatcagaataactttgacagtggtataattgttattatccccattttacagatgaagacactgaggctcagagaggttaagtgactcagccaaggtcaaacagctagtaagtggtggagccaggactcaaagccaggtctgtctgattcctaaggggaggggctgctttcctgctgtcttccaccctatccctaatcaaattacaaccaaattaaaaacaaaaacaaagcaaacacattcacttgaccctttccctc

SEQ ID NO: 181666 - DNA, 1607 bp, Homo Sapiens
ttggcttaaatgccctgtggtcacagtatttggccctgtacttctgagggctacgtggaaaatgcttgatgatcattactgacttgtcaatagtaattatgccaataaacagaaaagtcttccagttctggtctgttgaggccctgccgttaagccatggttttcccaaaggctctgcagtgggttctcatgggatgtctttcattggttctttctctcccttttcctcagagggtcgcatttcctgttttgtgcaggaaattcccactgttttgggttccccagctacagtcggaaagacatcagagtgttcaaggcggagtccaggcctgagatctcagcaggccagacaggcagcagatgcttgttgcttttcttgtgttatatttttcgttcccttacttagcatttgtgggaccaaagccaacaaacaacaggttgttaaaagaatgagagtaatttgacttccgacagtgattggggctcggggttgttgggtgttttgttttctgatttgaaactagctgtatggtaaccactaactctcgccttattcttttcttgcagatgagctcacagtgcctgcactttaccccagtagccctgaagtgtgggccccgtaccctctgtacccagcggagttagcgcctgctctacctcctcctgctttcacctatcccgcttcactgcatgcccaggtaattgatacccatcggccaggacttcactcacttcaccaccagtcctttcaaacttggttcccgagagcacaccatacaactaacacctatccagctaacagatccaccctcaagagattaatgatcccctctaaatcaagctgacactccttcaggactgacgaggatcgtctgacagcaatgatatcacccactgcctgatgtttgccccaaatgacacctctctcttccttaatgatctcacctcatatcgcacatgagagaccggggcaggtttatccacctggctcccagctagctagagggcatcaccagagtgtatacgtgtgtgccttgtgtggaagggctgcagaggaaggtgtgtgctaggagaaggggatatgtgcgtctgtgcgtgtttctgtgtgttgagagttttccactctcgtgtacggtgagaagaatctctgaccaaagggaaagcttccaggggggaaggctgtactttcttaaatatgttacaggaaagattaagggttccttctctccattttcaggaaaccctgtagaaaaggagatacaagatagtgtctaagatggaattacaggtcaaggtagagatctctattctgaccagctttctttcttagttaaaaatagcctgatttttataaacaaacttcctgtttctccacaaagattactgtctacatactaacacttcctctccccttggagaaaatatttctcttagcttcgcttttagtgcaagtggtagtaatcagtgtaaagattcacctctggagatcaccactcattctttggcctgcaaagattgatgaccagtaacaaatagaaagtacgtacgtaggtttcatttgtctttctgcatgtgtaattcagcctttaaattttaaattttaaaaa

SEQ ID NO: 181667 - DNA, 1261 bp, Homo Sapiens
  misc_feature (1006)..(1038): n is a, c, g, or t
  misc_feature (1067)..(1075): n is a, c, g, or t
actttgtacaaaaaagttgggatattgattcaaggagcattctattagaaaaagttgataaattatcctcccttacaaatatcatcttgcatttggagcaggtatttttttcttattagttaaagactgggtacagttatagtagatgctcaataaatgcttagtcagtgattgatctaacatcaaactaacagctttcagaaaggagactgttgacatcttttcaccaaggagtatatttgtagagtaatatatgtgtggaattttgaaattatatcatttgacatgatttatgaggcttatttaagctggagttagtaacgtaatagaagtattatttatacagaacatagttgaaagataggagatgtgaaagattaagtagtattttcttgtgcaaggcatattaataaatgtaattaaatgtcttaataagcagctggctgaactctagagagaactgctgtagtcttctgcaatcagtctctgtattggtatatccagtactatcgggtttaggttctttttatttttccttaaatcttacttgtttctagcgtcttaagagtggtaatggtaaaatgtgaagttacaataaacttctgcttgttttctcagaacatctttggcatgaggaagaactttttgtgaatgatacagtagtctcagcatctgttaatttgtggttttcaaagcatttttgacagagtttacctaatgtaaaaagattaaacagttttataaaacacaaataaacattcctacctgaactgtgaggaacagagtgtatagtacaaatgtaattaggcattgcctcctggcgaggttcttgatgcatgacttcgatgctggctgctgactgaggtgaccactgtcagtattgtactttggcatatgttgtttttaggaaaataatggaatgcattcttagattaacttactgtttttgagttggaaaaaataaaagatgaggtattataagtatgccaaatatttatacactacnnnnnnnnnnnnnnnnnnnnnnnnnnnnnnnnnggccagttatgattttaatagcgtctaannnnnnnnngactcgaattttgtggacactagtcaattgcataatttaacatggaggagctttcatttaaaagaagttctcagctactatattctgccattaaaattaaccatgcctgttaattttacattgcttgaagatataagtaagctgccgtcaatattgttttaagattttcttatagtttatgtttaa

SEQ ID NO: 181668 - DNA, 1702 bp, Homo Sapiens
ttggtccaagaatattagctatatataatttgtgctttctggatgattctattgtccagaaagctaaccctgacgttacttttattagtctgttgttattcctcagggtgtagaagatttagtaaattcaggacaaattttatattcagtggcaaaaagaaaaggcaaaaatatgctaaatatattattagctcttaaattttagtatagatcgtattttttataaactattaccagtacagtagctagtagatattctgtgactgcctcattgtttatcttgctgctttggtccctatggctctagtatgaacattctcgtgtcttctgtggaaatgatttctgtgttatagttccatctttggtagaggtggggatgattgtattttgttttagttgacatcattctcaacttttagaaatactgttgaggaaaatgattaccgttggttttcaaattgacaactattttgcttccaaagacttcagtttccctttgttttatgtgtagacctcatatatgttcaacacattgcatactgccttgcacattgtaggaattcaacaagtcaagagttgataaaagctagaaagataaaactagcttagctatcatatcatcattgtccatattcttagctttgggaaaaatataccattttgcataaaatacataatcagtttcaaatgcataaggcaaagatatacagttgcacaacattgcaagtgaaatttacaaaggatttttatttttgtgtatgctaaaagtgctcctacttaaagcagttttctttattagaccaacaccttccagcaaagttagaaaccaaacacaagtgctcatttgcccaaattaaccagatagttatgtaaactgttcatattaagtctttagtggtttacaaacaataacattctggcttttcttccataccttttaggaatcagccttaattttaagtatagcagtcactttcctcaaggtactatgcagcatactttagattgcttatttatcattataaggtgataggtaataaatttgaggtttacttgtcatataatttcatatggcagatattgattcaaggagcattctattagaaaaagttgataaattatcctcccttacaaatatcatcttgcatttggagcaggtatttttttcttattagttaaagactgggtacagttatagtagatgctcaataaatgcttagtcagtgattgatctaacatcaaactaacagctttcagaaaggagactgttgacatcttttcaccaaggagtatatttgtagagtaatatatgtgtggaattttgaaattatatcatttgacatgatttatgaggcttatttaagctggagttagtaacgtaatagaagtattatttatacagaacatagttgaaagataggagatgtgaaagattaagtagtattttcttgtgcaaggcatattaataaatgtaattaaatgtcttaataagcagctggctgaactctagagagaactgctgtagtcttctgcaatcagtctctgtattggtatatccagtactatcgggtttaggttctttttatttttccttaaatcttacttgtttctagcgtcttaagagtggtaatggtaaaatgtgaagttacaataaacttctgcttgttttctcagaacatctttggcatgaggaagaactttt

SEQ ID NO: 181669 - DNA, 1832 bp, Homo Sapiens
  misc_feature (293)..(325): n is a, c, g, or t
  misc_feature (354)..(362): n is a, c, g, or t
ttggatgtaaaaagattaaacagttttataaaacacaaataaacattcctacctgaactgtgaggaacagagtgtatagtacaaatgtaattaggcattgcctcctggcgaggttcttgatgcatgacttcgatgctggctgctgactgaggtgaccactgtcagtattgtactttggcatatgttgtttttaggaaaataatggaatgcattcttagattaacttactgtttttgagttggaaaaaataaaagatgaggtattataagtatgccaaatatttatacactacnnnnnnnnnnnnnnnnnnnnnnnnnnnnnnnnnggccagttatgattttaatagcgtctaannnnnnnnngactcgaattttgtggacactagtcaattgcataatttaacatggaggagctttcatttaaaagaagttctcagctactatattctgccattaaaattaaccatgcctgttaattttacattgcttgaagatataagtaagctgccgtcaatattgttttaagattttcttatagtttatgtttaaatggaaaagttacatatataatctatggtgcagggtcaggcattggccattaaagataagtttggctaactattttactgaagagactaatggtcttccctctgttgtactgctatgtttcttgatctgtttttccccaatgtaacagtctacattgaagtcctttagctctctccatatactaattgacatttgttaaggattcaatattttgtgaattctttttacccttaaaatgcatatctttcagagagataagaatgaattttgcaataatttatatgcagagtgtgcttatgggtttctgggagttcaagttagtaccccagagtgcttaaaagtatgatgctaaattctaaggctaatgtaatgactgtagattatctatgtccacattgttcaacagaaatataatgtgaaccacaacataatttttaattttctagtagccatattaaaaaagaaacaagcaaaattaattttaataacagtttatgtaacccagtatattaaaaatatcatttcaacatgtaatcaatataaaagattattaatgaaacaccttatcttctttttcttccatactaagtcttagatttgagtgtattttgcactcacagcacatctcaattctgactggccacattttaagtgctcagtagtcacatatggctaagggctactatactggacagtacagattcatagagtataaaatatgactttaactttggagatggtgaggtaggcctgtaattatggtactttaaaaattcagaatatttagaaaagcatctaatagaattatccacttgttttccttcatcttcattttaatatgttctagaagtaggatcagcctgttccaatttgccaagcattattaaggaggaataattccataccatgtaaaataccatgatatgctgattatactacattaacaaatttttaagttgcgttcactaaattctgtcctgtttcttcaaaataatatagcttaaattgcatgttaattgtatatcttacctattttgtttttatattattcttacaatataatcatgtatattaacaaacagccctgggattctaatcttcctctgcaactgtcttccaggacttactggcacttattacactgtgataagtggcagaaaagtagaatgaaatattcttttttccattagatttgttcttatgtgaccatgtaccaagccagctataaagtattgtatttctgtagaatatggaaaatagtatttgtcttacctttgctaaatg

SEQ ID NO: 181670 - DNA, 889 bp, Homo Sapiens
  misc_feature (607)..(620): n is a, c, g, or t
ttggctggaggtcagctggcttctggtgtctctcatcacaccactgcggacgctgtctgtagagcagccttggtgtgggtgactctgaagctggagtgatgggaccccagctatccttgttttttaccgccttgtctggcactgtgaccacgcttcagggctgcttctgggggtcttggtccctggatgtgccatttccttgcccttctgaccctcacacttcttccaaagtcttgagcagagttgggggccaatggtagcattgctgtcatctctgggaggagagtgagtatacaagtcagtgacagttcagccaggctcccttgggtttgggaagaggcactgcccttctgtgctgtggatcctgcttgtctgctctggagtccccccacccttgccaggagcttcacaaaccagagacgggctgtcagcaagagctcagacaggatgtggtgcaagtgcaggtgcacgagtttaaccctcagctgcaggagctagtctcaggtgttctggggatgcctcaggctaagaattttgccgactttctgggcttggttggctaatgccaaatgcccctgcttaaatatcacaaggtgctgattctccnnnnnnnnnnnnnncataccaatgtgctcaaactttgagctaggtcttgtgagtttgcctagcactcagacctgtttaagtaacgttctttacattgaaacaagtcaaccgaagctttgtggtgcaggagctgagggtgccccagactcagtgggagccctggttgggccccaaactctccccagcaaggtcctcgggtttcctcatttgtgaataaatgagtgggccacgacgttaataagccaagagaactgtgaaggtggtagtcccttgcctaattggt

SEQ ID NO: 181671 - DNA, 1074 bp, Homo Sapiens
  misc_feature (406)..(552): n is a, c, g, or t
cattagatcagagtataaactaagagaccacatattagaatccaattgaatgaactatgtcttaactaaaaaatactgaatcttcacattagtgtggcatttatagtaataataacaataagagcaagcacttacatagtactttctttatgctaggcaccattataattgctctccatatattaactcatttaatcctgaaaacaacctgtgataatagtcaccatttttaatctccatttgacaaatgaggtaacaaaaatattaaggtaacttatccaatgtcacgcagctaataaatgttgagtcaggatttgaatggagcagtcgactttcagagtctctgctcatcacacagctctgtactttgtaagttgtgtatcaccatttttatttagactagaannnnnnnnnnnnnnnnnnnnnnnnnnnnnnnnnnnnnnnnnnnnnnnnnnnnnnnnnnnnnnnnnnnnnnnnnnnnnnnnnnnnnnnnnnnnnnnnnnnnnnnnnnnnnnnnnnnnnnnnnnnnnnnnnnnnnnnnnnnnnnnnnnntgaatcactgcatgtgttagtgtattatatgtgtaacaacagcttttttatcttaatagaaaaagaatagaaaatacacaaattttggtcctgttctaaattggataaagccatttagataatgggggtggggatccatttgtttagtcagagaacataagcaagagtaaaacaagtgagattatgaaactggaatgactaaagtgtgaattactacattaaatttaacaactaggagttttgttgttaatttgggggaataaatattttccaaattgtgatgttattcaccaaaaaatatatatcgtcttcacatatgtgctgaaagataactgtgagaagcaataccatcatgtttgtatgatttgtgatttcagcttcagaagctgcttaccatggacccaataaagcgaattacctcaggacaggctatgcaggacccctatttcttagaagacccacttcctacatcagacgtttttgccgggttgtcaaatcccttacccagaccgagaattttta

SEQ ID NO: 181672 - DNA, 1624 bp, Homo Sapiens
  misc_feature (1036)..(1104): n is a, c, g, or t
  misc_feature (1134)..(1156): n is a, c, g, or t
  misc_feature (1159)..(1199): n is a, c, g, or t
  misc_feature (1219)..(1312): n is a, c, g, or t
ccagggcagctacctcctggggaggtatggtagacttcagaatagacttcctaaaatggaaaggttcattgatccttttaatctgctttattaaatcttttggaaaatgaagtactttttaataaaaaaatacaaaatttctcagaaatcagatactatttttggcatttaacaatatttttatgtctcaagcagaactttataactattatctccatttttatttattaaaagagtatactaaagagcagatgaagagctactttccaacaatgattatgtaggttcagagggcatagacgtcttggttatttcctaaactgcttgttaaaattattcttgtctgcttataaagtattttatgattcttgagcaaaaattcccagaaagtgtaatgtgttacattaatgatatatgcacattatggatgaatcaaaatattgtgcttctttagaaaataaaacaatttttcgttgttttcataatgctacataaaaataatactgccagtggccaatatccttcttgtgtgtctttactgggctcctctttccttcctttctctttctcatgaacatcctaccatcgagagggcccttgctgtagctggtgaagacaaaatcttctttttaaaaagctaataaagattttcaaattgggatcttttacagatcagattttacctctaaacaacaagaaaaacagtttaaatcaacaagaacattagagccctaatcagaaccacaagatagggattgactcctgaaactcgcagatgtctctagtaatggaattggtctgtctaatgtgtttccattctatttccttggtgcagaagaaaatgctgctttagtgttcttgtaggtttaaaaaataataaacagagattaagaggaattactggatttgtttgctgtgtctaagcaatatatctaattagacagtacaactaaaggaatatggggagctaggatacaatgtgaattgatttgtagtactaggttaaggcatgatgacatctggaaaagtgctaaannnnnnnnnnnnnnnnnnnnnnnnnnnnnnnnnnnnnnnnnnnnnnnnnnnnnnnnnnnnnnnnnnnnnagtattatttctgaagagtggtcagctaannnnnnnnnnnnnnnnnnnnnnncannnnnnnnnnnnnnnnnnnnnnnnnnnnnnnnnnnnnnnnngcaacaaagcgagagcccgnnnnnnnnnnnnnnnnnnnnnnnnnnnnnnnnnnnnnnnnnnnnnnnnnnnnnnnnnnnnnnnnnnnnnnnnnnnnnnnnnnnnnnnnnnnnnngttgattcagtggcttcaactataggaatatttccaacaaaaacacacaagtttgttgttgtcattttcagttttaatcttggagagtaacttcagaatttgtaaaatttacttatatggaaactaataagccagaaaaacgatgtaatgtagtagaagccatgcatatatatttgaatcctgtagctacaaaatttaatgtatttgaaagaaaaagttagtgtcacacaaagtaaagaaaaacaaactttgcctgaaaacactaaaggaacttcatcctgcgtatttctttgccaacttttttgtacaaag

SEQ ID NO: 181673 - DNA, 1914 bp, Homo Sapiens
  misc_feature (1608)..(1628): n is a, c, g, or t
aaatctgcaactaaaggaacttgccccgatccttagaaatacaagacccagctgtggtcactgtttcttgtggcagctcggtggcccacaagcgtccccactgattggagagtgtgtccagggcagtgctggggctgccctggccgctgcctgacgtgaccgactaacctggttctcggctgaaaccgatttttctgcagcctgagctgactctggagcaggaggatttggccgaagggaagcacgggaaagctgccaagcgaagtcacaagagaaagcagaagccagaagaggaggcgggtgctccggtgcccgaggacgccaccttcagcgaatactcagagaaagagacggagttcacaggcagtgtaggcgacgagaccaattccgcagtacagagcattcagcaggtagtggtgaccctgggtgacccaaatgtgaccacaccatcgagctcagtcggcttgaccaacatcaccgtgacccccatcaccactgcggccgcgactcagtttaccaatctccagccggtggccgtggggcaccttaccacccctgaacgccagttacagctggacaactcaatcctgaccgtgacctttgataccgtcagcggctctgccatgttgcacaaccgccaaaatgacgtccagatccacccccagccggaagcctcgaacccacagtctgtggcccatttcatcaacctgacgaccctggtcaactccatcacgcccctggggagccagcttagtgaccagcacccgctcacgtggcgggcagtgccccagactgacgtcttgccacccccgcagccgcaggcacccccacagcaggcggcccagccccaggtgcaggcggagcagcagcagcagcagatgtacagctactgagctgcgttccgggagactcggggcaagaactgcagagggatgtttgggatttgtttagatgtgtttgctggataccaaacaaacaaaaagtcatacattgcaatgtaaggttgacttagctttgcagagtatctccagatcccccgccagcaaccattacggtctgtcagcttaactctagaagggacctctggcaggccagagttttaaactggatggggctccacaccatgccttaccaaggcagtaagtcctgggccggggccgcatctgcctccccttacagaaccagtgttcgcccgacacagggttcgggaaagtgaagctgagagagaagcaggattttaagaggcaggagataagttattaggaacacaaatggttcattttcttttttcttttagagctcggttcctatgagaacacagacagtattcacaggtggcagcaggcagcagggaacattttctcctcacttctggatttttttgcaagcgagcacatagaagttaaagtaacgtgtattctctttgaactaggagtggagtcggttcttatacaactatgggctgaaaccatgaggcgtgctgagccgcacctgatcctgcaaccttcgaggtcatcacggtcatcatgtgcaaggggtcacgtgaggtcactgactccagctcaaaaggcatcttagtaatatccatgaatcgatttccaatagagnnnnnnnnnnnnnnnnnnnnnaactttatttcaaacatacattatgtgttcaagactgttatggccaatattgtgttttagttttatgttaacatgataaaagtcatgtgcactgtaggaccatctgtccctgtccacccttcacagctgcccagatgcaaaagggtcgcgcggctgtgtgtgaggagtgagcctccctgctgcccccaaggggctcctccgggttgtctcaggattctctgcaatccaaatgtatccattctggctgaagcccaccagaatcccgagtggaagaaccgggggaaaa

SEQ ID NO: 181674 - DNA, 805 bp, Homo Sapiens
  misc_feature (289)..(303): n is a, c, g, or t
  misc_feature (568)..(616): n is a, c, g, or t
ttggttccatttgtttgtgtcctctacattttctttcatcaaagttttgttgtatttttgaagtagatgtatttcaccttatagatcaagtgtattccctaaatattttatttttgtagctattgtagatgaaattgccttctcgatttctttttcacttaattcattattagtgtatggaaatgttatggatttttatttgttggtttttaatcaaaaactgtattaaacttagagttttttgtggagtttttaagtttttctagatataagatcatgacatctaccnnnnnnnnnnnnnnngacaatttgactttgtttttatgaatgaattttatttctttccctgacttcccgcaacagtaatcaagacaaagtggtgttgttaaatgaatgaccagtaaatcagtgaaacaaaataaagatctcagaaatagaccataaatatcatcaactgatcttgggtaaagaaacaaaagcaacataatggagcaaagatagtcttttcaacaaacggaactggaacacttggacatccatatgcataaaaataaatctagatataggnnnnnnnnnnnnnnnnnnnnnnnnnnnnnnnnnnnnnnnnnnnnnnnnntgtaaagagcaagcttaataaaactcctagaagataacgggagaaaatctaggtgacctacactatggctatgaatttttagattcaacaccaaaagcatgatccttgaaagaaataatcgataggctggactttatatacaaacttctgctctgctgaagagcctgtcaaaaaaataagccaaagatt

SEQ ID NO: 181675 - DNA, 1440 bp, Homo Sapiens
gaacggacatcatttctcacagttctggaggctggaagtccaagataaaggtgtgggctgattagtttctgctgggaacactgcatcctcacgtggtggaggggatggaaggtcaagaggcctcagctagttctccgctgcctttttatgaggcattaagccatttgcaagagtagggggccccacctcttaataccaccgcaatgacaattacaatgtcatgtgaattctggaggggacacggtcacactgcagcatcagcacccggtgaatgtggttctcttcccatgtcagaattttgtgagctccacacgggcagggttgcatctgttttattctctgattgattctaagccccatgtccctggcacaggatggctgcttggcagtagggagtggatgaaccagtagtacccagggctgccaggcagggccctgcaggggacagacccaagggctgatatggggacacctgctgaggggggaatttaccacggtaagggcagggctgggaggctgggcagccagtttcaccctcgcacaggctgcctggcaagaccagcggctggaggtgatgtcctcagtagagaacggtggccactggaaacgtgtggccagaaggggaaacgctcgggcctctggtgggggccagcctggggtggggtcggccagggtcagctgcctttccttcatgctggggaggagatgttgtgtgcatgtgagaaagcatttgatagcatgccaaaagtttcctccattatgtgcgtgtcaagtgtttgaccaggtcagaactcttgttctatgcgaatgtgctcacgcagacagaagcggaggggctccgtcgctctgccctcacgccgctgaaccgcgagggtctcccgctcctcaggcttgcggctcggccgcgaagtgtgtcaggtgtgcatcctgggtgctcctttgtgctctgtcctacggtgacacaggcggcgtggggttagacaggtaccggtcagactacggtgacacaggcggcgtgcggttagacaggtaccggtcagattacggtggcacaggcggcgtggggttagacaggtaccggtcagattacggtggcacaggcggcgtggggttagacaggtaccggtcagattacggtggcacaggcggcgtggggttagacaggtaccggtcagattacggtggcacaggcggcgtggggttagacaggtaccggtcagattacggtggcacaggcggcgtggggttagacaggtaccggtcagattacggtggcacaggcggcgtggggttagacaggtaccggtcagattacggtggcacaggcggcgtggggttagacaggttaccggtcagattacggtgacacacgcggcgtggggttagacaggtaccggtcagattacagtggcacaggctgcgtggggttagacaggtacc

SEQ ID NO: 181676 - DNA, 1513 bp, Homo Sapiens
  misc_feature (45)..(72): n is a, c, g, or t
ttggcctggtataaaccattattttttgtgcatgctcctgcttgnnnnnnnnnnnnnnnnnnnnnnnnnnnnttctttctatatatatatgtatgtgtgtgtgtatgcattttttaaaaactcctttaaaaaaggacctaaaggtaatttttgcataatctttcacattgttttaacctcctccccgcttacctcccacaagcagctagcacattaaataatattggaatgtatcaactgcataacaaatcactgaactcatcagttggtcataaaagaaacacaaagaatgacaaggcgtgtcttcttgaactatcacacccaaactaatctcaacttgttcttatactaatagatccttagttagaatgcattctgtgtctcattatttaaaatacgagtatatggcataacttttttaatgttggaattaaatggttctttatgatctggagaataagcttaaaacacaccgcacgtttttgtgattataatttttaaatgtgaattgcttgcagatgtcagcaagaatatttcggtgaacggtgtggggaaaagtccatgaaaactcacagcatgattgacagtagtttatcaaaaattgcattagcagccatagctgcctttatgtctgctgtgatcctcacagctgttgctgttattacagtccagtaagtatgacataacttacaaattcttaataaaataatgggaagttaattttttcagtatttctctcatactctactctggtattttagatgaattattatattgtcacttgatctttggtttatatttttatattttattgacaaatatcacagaaagtggtcaatgtttatgacttgtggccaccattgaaatttaacatgtaaagcccttttatagaagatctagaaattttttgaacttaagtaattgaaggttttatttcatgttatttttctactcatggttactttagaatctcagaaaatatttatatctactgtgaaatcctatgcttcatcaagcctcaggagctaattaagacctgtttataggaggttcgtagtatcagacatactgctttgatactaaaaacgacaaagaactacaaatcatcagcagtaaagaatagatatgttttctgctcatattagaatgcaaaattctgagttaggaatattataacatggtactaatttacttagagcttatgcttattttgttactatcgaatatgagaactcaattattaaaaataaatttccatcataagacatggcatagcaagcaaggacaattctattactgtttcactccagcgtatcttccctgtgctcataataacagatcacacacttcacttcatggccagtaaatgttacactagactgtcccaggtagtacgcactgatgggtgcatcaaaatggcattgtctgtcaaacagaagtcactgaataaggaagttgggggaggacatgaatggctctgtgatgactcatgtgctactagagcttgggaaaa

SEQ ID NO: 181677 - DNA, 1757 bp, Homo Sapiens
ttggcacacctgggtgccagcgccccagaggtcccgggacagcccgaggcgccgcgcccgccgccccgagctccccaagccttcgagagcggcgcacactcccggtctccactcgctcttccaacacccgctcgttttggcggcagctcgtgtcccagagaccgagttgccccagagaccgagacgccgccgctgcgaaggaccaatgagagccccgctgctaccgccggcgccggtggtgctgtcgctcttgatactcggctcaggccattatgctgctggattggacctcaatgacacctactctgggaagcgtgaaccattttctggggaccacagtgctgatggatttgaggttacctcaagaagtgagatgtcttcagggagtgagatttcccctgtgagtgaaatgccttctagtagtgaaccgtcctcgggagccgactatgactactcagaagagtatgataacgaaccacaaatacctggctatattgtcgatgattcagtcagaggtgagtaggggataaagcaaaaatatggcctgtgagatgtgggtttatatgagcaaagctgcttcagaagtaaagctgctccccagattttctagtggctttattgtatatctgttggatagcccctaggtaaactgtgacaaaaagaaccataatgtgggcacatcctatatggccagagtgatcataaatggtgtatgtctcatttttaaacctaatcttcacaatgactttaagtaggaattgttatcctcattttacagatgtgataactgaagccgaaaaagttttgctctaattctacaggtgacaagcagatgagctagaattagagctccagtctgtttgattctatgcagaagagacactaagctctttcccactatgctacatgacccccattctgagagacaaatttagacattaaccattcctatctactttgtatcttagcttttgtatccccttccccaacaccacccttccccagataactgcattttaacacaaataaggggacaaggaagtaatgggacaggaggcattagactttagcgtttaagtactaggtgatgagaagctgatggaataataataataatgccatctggaaatattaaagaagggtgaatatacttagattttgtattgctaaaatcactctttaaccccaaatcccatttgttagttatataacccatggtttctttcactttcctgttatctcatattttaaaaaggccctttgcttggagtgaaagtaccaaagtaagagagaaatattgcatactttggagtctgaaggaagaagaagttaacagtaaataagatctaaatatcctaagagcatccactacagaggcagggcaagatggtttcagagctgttgaaggccttttctgtcctgacttgagtttccctggcttctccccctcttgtctggttctcagaactggtgaagggacatcaagtggtaccagagggacagtgacttgggtgagtgggaagtgagaaaacctttagcgaacactccacttaattcccttccttctcaaagtgtgcttttctgtgagtgggtaaggggttcatttgtgcttatttttgaaggcatgagattagacccatcaaagtgtctagaaactgttctcttaaacatgtttcaagttgttaacacttcagaagccaagtaaatgattagtagtacaaatgatgactagtgctcaaattgcaatgcattgtgaa

SEQ ID NO: 181678 - DNA, 340 bp, Homo Sapiens
ttgggtaacttttaaaacttaaagatgctgaaaaacaaccacaacaaaaccaccttttcaaaaagactgtggtgggtttatccttctgtcctaacgccttgcactctaacacctcagaccaaattagaccagcagcccccaggattatcttcctggagctgtgtgctctactcctcaaattacttagcatccacatcaaattactcagcttttacagaactggtagaaagcagaataggaaaacgagttaaagtaaggctgatatttaagatgagactggcttataaatctacattatttaatatatgtaaaaaaattattatatgtaaaaatgttccaa

SEQ ID NO: 181679 - DNA, 1278 bp, Homo Sapiens
tagtataaaaccatgtttggaaacatactgatatatttgctaattgctgctattgtcataatagtactgtagccctagttgtaaagaggaaatgatttttaggatctctttcattgtttgctctctatagttttgaatgcttccatttcaggaaggaacatctgccatggaaaatctaaatgaaatgcagtgtatgtggtttcagacagaatgcatttcagcttatcagcgtctggggagatacggggatgccttgaaaaaatgtcatgaagtagaaagggtaagttgttagaatttcgacttcagttttcactgtaaggtgataaaaagcaggtagatttctacacaggatcatctgcctcttctaacttctctgggagcttcattgtgaaaaaaattcttgatctttaacctttacattcagaagttgtaaacaatggattgctttactgatcctcaagtgattatgcttttgacatgtctatatatttttgtctgaaggaaaaagattgttagtaaacaattattgctattaacataaattcaaaatttatgttccctaattaggccattattttgatattcatcaccaccctaagaggacacacagctgatggcaacctctttcccctttaaaacatcaggatctggtccgcagtcagcctctctccagtttgtcttcccaggatatttgctctcacattcagtattctgtataacaatctatggccagtttgcaggcttattttattgcttgcttttaggattatttgtgtgatgtgccttagtgaggggacttttcttttcctttgtgtgaatttttgttttcctgttctttgtcatctctgaagcactctccttccacatggaccacaggaggaaaagagccgcaaatgcacccctgaggcagtcctcagcagccctcagttgtgggggcaatcggcaccactgttcccatcctgacgcagtatagaaccacaggcatcgtagtcagcatttttttgagataactgatgaccaattcgacttccatacatactgcatgagaaagatgacccttcgtgcctatgttgaccttttgagattagaagatatactcagaagacatgccttttatttcaaggctgctagatcagcgattgaaatatacttgaaattgtatgataatcccttaaccaatgaaagcaaacaacaagaaataaactcagaaaacttgtcagccaaagaattgaagaaaatgcttagcaagcagagagagctcagaaaaagggctaaact

SEQ ID NO: 181680 - DNA, 932 bp, Homo Sapiens
  misc_feature (520)..(589): n is a, c, g, or t
ttggaaataaggagatgctgacagtaggtttgtgctttttacctaatacagggtaaaaacttttatttctacatttttcttcccccattatctctgccaccatcccttagacttcaggagcataatgacccaggtagctagggtggaaactgagcatgtggaccctacatcttttggggagggtggtgaaaaactgtgtcatgtcaggttagatctgaatctctaggagaatagcttttttgatctgtttgctcctttgagtctcccttttactttatcctttgaaaaccaattgcatacttcacttccattgcttccagatatggcatatttttcttaggctactgttgaaatttagcataatatttctcccttacctttctgtccttttaaaaaaataggactatagtaagtcctccgtgtcggtggtatgtttttggaaactgactttaaagaaaacatacaggaagtcctcaaatagtgtcatttcattataatgatgcaaacaaaacaactaccnnnnnnnnnnnnnnnnnnnnnnnnnnnnnnnnnnnnnnnnnnnnnnnnnnnnnnnnnnnnnnnnnnnnnngtatagacattttgaaatatttgagggagttgcagtttggaaaaattgtatagagtcttcatgtctcttcttatttctttaaaaaaatttagaatggaattttaatctgataaaatgataatcagatccattttggcaaaacccagtgaatctggcatttcatgatggacctaagggtcagagcacgagaatggcagtgaggcagggcttgtgtcttgaggagaggcactagtgatggtagacaaaacagtgggcagtgtaagggtgaggaaagacaagctaagaagggaataatggggattggtgtgcacagtgggtaaagctggcattatattcaaagaaa

SEQ ID NO: 181681 - DNA, 2194 bp, Homo Sapiens
  misc_feature (178)..(187): n is a, c, g, or t
  misc_feature (1399)..(1417): n is a, c, g, or t
  misc_feature (1449)..(1681): n is a, c, g, or t
  misc_feature (2099)..(2111): n is a, c, g, or t
gatttggaatgtgaagctagtctgaaagaccatgagcttagcaggtggcttgacagggctaacactcagttaaatcaccttcaggattttttcctagaccctggttataatcctagcgttgtgctaactagttttgtgatctagagcaaattatttgcctttgacactttttatgggnnnnnnnnnncaattaaatattgcacagatatatttcttatctcccatttctatttgagagtagcaatgtggatacataccatgtggatcctttacattgatggtttataatacctaagaagtttctttgtaaaagggcatcaaattaatgaatgtaaattatgagaaccacctgttaaaaacaataaagtattaatttaaaaacaaaaaatacccctgaacttttaatattaatttaggctagaagagaaactcccctgccttttattaggcctctgattacttaagaacatcatctaacattcgttaagtacctgtgaaccacagccacgttctacttaataacaaaaaaaaccacctcatttccgaggagaacctccccccaggcttttcctcatccttccttgtaagatttcatatggcagcaacgaaggacaaaggggaccctgagaaacacctttcatatttaaggttaacacaaagcatggtttggtttctgcactctgatggaagacaaacgttgtatattatctagctatattacaggtttcctcaacttcttgtgattgatgttaccagtatttgattcttactcctgtacaaaaatcttagagcacttaagggagggcaggaaggcaggcagcccacagaaggaagtttctggactcatgcaattctccctgtacagcactcagtttcagtataacctcaaaatcctccaggaactctggtcagttctacacagcaccatcatacccccttttctgggatgatctgcaaaatgtctttggaggcaattctgaaagaacagtttcaaaattggtctaagtaatattaatactagcatcactacagtaagtacatgatttcccaagggtatcattttaaaggataatcatttgatctatgaattatgataaatttgttttaaaaagcattaaagtttatttttaaattacacaaaaagcactgtttaaacaatggttataactagtgaacattaagaaatcttgcaggcaggtggatgggattgaaatactctttcttgattttatagtttaagggccaaattgagcactgtttatgtctgcatcagctaccattaaaaactttgaggctgctggacactcagtaaggaatcagaagttttttaaaaagatgcaaatgaatggaatgtgtcatttcaaagcctgtttggtaaaggagaatggatgacccaccnnnnnnnnnnnnnnnnnnngagagagggtcttgttctgtcaccaaggctgnnnnnnnnnnnnnnnnnnnnnnnnnnnnnnnnnnnnnnnnnnnnnnnnnnnnnnnnnnnnnnnnnnnnnnnnnnnnnnnnnnnnnnnnnnnnnnnnnnnnnnnnnnnnnnnnnnnnnnnnnnnnnnnnnnnnnnnnnnnnnnnnnnnnnnnnnnnnnnnnnnnnnnnnnnnnnnnnnnnnnnnnnnnnnnnnnnnnnnnnnnnnnnnnnnnnnnnnnnnnnnnnnnnnnnnnnagaggctgtatagtctgagagacataaaagtttttgtagctcaacagacctagttaacattcctggcttcacccctttgtagttgagtaaacctctgcaaattattttctctgaagcccagtttccttacttgtaaaatgcatggtgaagtgcctggcaaacagaaggtattcaagaaataccagttcctttgtgagggtgtttttttcaagttaagggttgcaacccattggtagatatcaatttagtgggttgcaactggcatattttaaaaactgaaacaataaaaagcatcagaatggtaagtattgttcattaaacatattataaggtttgatataaatgcgttttttactgtgggttacagccaaaaggtttgaaagtctatgctctacagagaaattctcagattatgttnnnnnnnnnnnnngtccttaggattgctgcctttatccaaatgagggcccacaaattttaagacattaatcaaagtgttccgactttctaacccaa

SEQ ID NO: 181682 - DNA, 2632 bp, Homo Sapiens
  misc_feature (116)..(128): n is a, c, g, or t
  misc_feature (1952)..(2151): n is a, c, g, or t
ttggcttagtttgggtaaagtcagtactattgccagtaatatacatggtaattgaaagcccttaaagtggttcagattatttgccaaatattagactctataaaaatttctgaggnnnnnnnnnnnnnacctttgagtgtacatgtgattgctataatgtaaataccagtcccttaaagactgtttctataagcagaatgatgcagcacaaagtggaaaggttttcctcttattccagcagtattcttgccttcaaagagtagtccatcttgccttgatttttaaggttgttttcttggatggaaagcttaactggatagtaatttccatatgttctttataaccactctgtatattataagcaaagttttttcatattgtatctttttctgttgagcactttatgcattttagtctattgcatttgagaatgtagtttagaaattcactgtttaaagccatgtgaaaactgatagaggataatgaaaatgagtgtacattattttgaatttaacttaactgttttgtggtgggtgtgaacaaaacattagaaatatattatctttttgtgataatactctctgacctcacttaaagtgatctgccatgaggtatccatgatcaagtttatgtttattctaatacctaaggaattcagccaactttgtttctatcatcagataatctcagaaaatagtgtgttttatctatattactgcctcttttcaatatttaagagaataattgtcttctggtttctactgagcctagtaataatcactaaagacctaaaaaaggaattccttctgttaagagtatttggatagcccattcacgataatggtggtgtgaaaatcaatcatcccagcttttctgacatatctaaattttgaataattaatttccacttccaaaaaattcaaatgttttctcaaagcagtcactacttatttgcattattcctgcatattcagtgaatgtgaggtcatatttggtattgtattagaagtagtgttggtcactggtcttgcctctttgaacattatttttatttgtaaaatgagggagttggtttgttatgatgggaaatgagtcagttttcagggtcctgagaaaattgcttcattcatggctgtgtttgagataactaaagtaaattttttttcaggtatttggtgtcatgttttggagttaatatttagtgcttatataattttaagttattacataatttttattggtatatatttgataggtactaggtattggattctcaccaaaccagtagaatggtattctctcttaatatgtgattgcctgtaatggccaggtagatataccttaaagtaatatgaaaggttttatatgtatattaaaatgtttgtacttttaaatctgtaaaggttatctggaatttttactgtgttaacttcagaattatatgggcattatgactttttcattgtacaaaaaattattcataaatgttagaatacagatgttccttgacttacaatagggttatgttccagtagacccattgtaaattgaaaataccgtaagttgaaaatacatttaatacgcctaacctactgaacatcccagcttagcctagcctatcttaaatgtgttctgaacacttaacgttggcctttagctgggcaaaatcatctaatacaaaacctattttataatgaagtgtttaatatctcaaataagagtattgtaccacatatcgttatcccaggataatatcagagtacaaaatttgaagtacagtttttaactgaatgtgtattgcttttgccccattataaagttgaaaaaccataagtcaaaccattgttaagtcggactgtttgtgttacatatatttgggattttttagtggccctttttaaaaagctgtttcttatttctgatcattgtgagtggggatagatgtgggaagnnnnnnnnnnnnnnnnnnnnnnnnnnnnnnnnnnnnnnnnnnnnnnnnnnnnnnnnnnnnnnnnnnnnnnnnnnnnnnnnnnnnnnnnnnnnnnnnnnnnnnnnnnnnnnnnnnnnnnnnnnnnnnnnnnnnnnnnnnnnnnnnnnnnnnnnnnnnnnnnnnnnnnnnnnnnnnnnnnnnnnnnnnnnnnnnnnnnnnnntactatgagctgatactgggatttcaggtaccgcagtttgtgctgaatgatatgtttggggtaaatcagtttttttcttatagaatttcggcgtttttgctgcaactgccactaattttgcatttaaaagaacaaaagaggaatgtatttttcaaaggagtgaatgaggttaaaatcaagattttgaatggtataaatatgcaactaattcagttgtaggatattattaaattttttattgctaaatatgtttctttcatacgttgcagtgcttacagttccaacagctttccaagaaaacatttccatatttgtgttatttgtaaagtatacataaataatgtaaaataatttgggattatttcaactttacattgtatgtctgactttcatcgatgttgtacctgggctcagtcaatagttgtcacaggtattaagcccattttggaatttgccacttttttctgggtaacctgtttta

SEQ ID NO: 181683 - DNA, 1316 bp, Homo Sapiens
  misc_feature (80)..(88): n is a, c, g, or t
  misc_feature (100)..(128): n is a, c, g, or t
ttggcacagcactttgaagaagaaactacggctgtcgggtgatttttccgtgatcttaatatttatatctccaagttgtnnnnnnnnnttgtctgggggnnnnnnnnnnnnnnnnnnnnnnnnnnnnnaaaactctatccttgtatatcacaataatggaaagaaagtttatagtatcctttcacaaaggagtagttttaaattccatttaaaatgtgtatttattggattttttaaaagcgacaatagtaatggtaaaggatgggcaggaaaggccagtagtgctcccccgcccagtctcgctgggtctggcgagccaagcccctcgggcgctggcgaggtcctcagccatctgcccctcgagagccaagcgcggacggtagccacccagttcatccctcccgacatacaccccttccctttggggaagggagcctcaggacagcttctgtcctctctgataggatgggagagtctgcagaaaaccatctggggtcccttttccagtccccggcttggagtcgaagggcagatgcaccccaggccagccccacgagatgctggcatagctttccccagaaaccaggttggaagtagatggcttcaagcttgctagtctccacactgaatcctctgtccgttatttatggagtcacacgatgtcatggttcactaggcagcacctcacgctggagctggagtgcgaggttcttaggggccgtgcccaccatgttgccaagccaatgcatgctgagctgaaggaatttgtcttagtggcagttttttaaaaaatgcccccaaagtctatgctgatactgaaaaagggctactgtatctttaaaaacaggaagttgaacccaagctgtgaaaagccagtggtgctctgtgcatggtgctgtgcggagcctggtgctgtagtgttgtgctgggactttcttgactcttgggcaggtcacatcctacaggagctcagcagaccagtgtaacaacagttaatgcatctatcctgatccctgaatttccacattggacaatggtgcatgcctcacacctgagcctgcttcctccatgctgtcattgggttcgggggcctacacttaacaattttaaagtgcaagagtcaaacattttcaacaggttgctataattttcctccctaattggtgccatttctccatttgatcattttctttttttcctttctcccctcttcatccactttaaatatagctgttctgaaattctggtgcattcattcgttctttgaaatgagaatgtggtgcttaattttgtgacgttgtcgagagaggtgggcc

SEQ ID NO: 181684 - DNA, 342 bp, Homo Sapiens
ttggcactcttcctataccaatctgagaccattttacaatttagaaaagacaaataactggttgggttacttgatagtataataaccaagaaaaataattttagaaggaattaagtttgaaaccacatgttaacaaattctaccaaagtgggatttgcctgtgattaaagatgctgtaaacatttgggccagtagttataatttgaaaaatgtttatagccaatatataattttttatttaaatatacagtttcatcagtctattagtattttattaagtctaagatgccatcagtggttagcaaacaccactgttttatgcactgctaagaaagaataaag

SEQ ID NO: 181685 - DNA, 1519 bp, Homo Sapiens
  misc_feature (1047)..(1055): n is a, c, g, or t
ttggccgtttgtccctacctttatttagcgtttcagaacccaagttgatggttactaaaaggctgatcagggctttaggttctttcatgccagcaaattacagcgtctggctttctccagccacttttcacagatattttgttggcaatgtttctcttttcttgagccagtagacttgggcagttagcccttgccttagcctcaccttcgtggtatcatcaaacgctgacatctgaatgtggtattgtcctgttgatgtctccaggaaggcctagctcattctcccaagtggaaggctatgcattaggaacttattctccaccatattccttagtcttccctggatttaactctatctccagcccctctttccaagtttccctgtcttgcaaatccccaggtaggtataccaacagttgcctcaaattcattacattccaagctatactcatcccccactacaaccagatcctcctcatgttttcctgtctcagggaatggcaccatcatttatactgtccctgactgcagagtaggttagattctttattacaccctcgcctggcaagttaagattataattaaataaataatattttctgtatttgtttgccctgttgcttctcttggtagactggttccttgacagttgggaccatgtctgtcttgttcatcactgtccccagtacctggcacatgggtcctcaatatttgttggattaattaagaaatccatccagtcacccaagatagaaacctcagcatcaaggtagattgtagattccccccactcaccttccacatagtatcagtcagcaagacctgtcttttctatctctgaagtatttttcatctctgtcctgttgttaccatacccagtgttcaggaccgatcatttcatatttgaactgcagcagtaacatgatggctttctccacttcttttctttttctccttccaattcatcctatacacagccacaggggtctttgaaaatttataattctgaccacgcctttaactatgtcacttccctacttagaaacnnnnnnnnnggccccctattgcccaaataacaaaattgaaaccccctgcattgtcacaatctatccctgatttatttgtcctgcctcatatcctgccattatctcctgtataaccttacatttcaattaccacggttttccaggtcccagatctttaagtccctccatatccactcttatcttttctcctctagtgcttaacacagtgctgtcacggagaagagaaagagagaaggatgggcaaaggtagctttaggatctggcttggaaagggtcactgggtttccaagcaaatagaagaaaactttttaaagcatcatctttcttccaacactaagctctacttttagcatcaaaattagactcaagcctcaagatttagggaattggtggcagcagactgctctggtgttgggagttatatctctaaacatacatgaatatccttttctacaatgtagctctttcctgtc

SEQ ID NO: 181686 - DNA, 253 bp, Homo Sapiens
ttgggtccagtattctccagcacatgtacctttgtgtttctctgcccatgtacatacccctgaaagttcaacaaaaaaagctataaaatagcagagagaacccaaaatatttcttatactgccaagttccctttaaaccttgggcacttgctctactacatggttgtattaatgctcataactaagctttcgatgaattagaccaatgtgttctatgttctaaatgatatttagatatctgaatccttcccaa

SEQ ID NO: 181687 - DNA, 1983 bp, Homo Sapiens
  misc_feature (675)..(971): n is a, c, g, or t
ttggctccacatcacgcgctgtaccatactgtgtagtcagaacagacagtgtgattgaaaagctttggaaaaagttaacacaaaggattatttagcacataggctgtagatacgtatgtgtgtatttgttcaacaattggagatggttgaatacccttgaacaaagtgtgtatcttctcaaatcagtggttgcactagtcaataattagaaggtgttgttatttttaaaactataagcaaaattatgaaggcctttaaaaaatctatcataataatgaaaaagaggttgtctcccaacagtgctgtccctcaaagaaaagactggttatgtggaaacagcacgtttggagagattattctagtgaataacagtgtatatttgtggtaggcaaatttctaagaatgacccctactgacacccccaccaatgaccttgtataatatcctcccactttgagcatgggtggaacctgtttgatccatgattatatcatgttatgtagcaaaaggaagactgtctgggggtggctaatcaaatcttgtgactcctttaaaagcagagagttttctcgggctggtggcagaagtcaagagacaaagcagaaggacctcaggcaccattgctgttttaaggtagagggggctgcatgagaaggaatgcacatggctttgagnnnnnnnnnnnnnnnnnnnnnnnnnnnnnnnnnnnnnnnnnnnnnnnnnnnnnnnnnnnnnnnnnnnnnnnnnnnnnnnnnnnnnnnnnnnnnnnnnnnnnnnnnnnnnnnnnnnnnnnnnnnnnnnnnnnnnnnnnnnnnnnnnnnnnnnnnnnnnnnnnnnnnnnnnnnnnnnnnnnnnnnnnnnnnnnnnnnnnnnnnnnnnnnnnnnnnnnnnnnnnnnnnnnnnnnnnnnnnnnnnnnnnnnnnnnnnnnnnnnnnnnnnnnnnnnnnnnnnnnnnnnnnnnnnnnnnnnnngtattttaaaagaggtaaagaggaaatcttcatacttgattccctgtagtatgctggatatttcttggtaaatgcatgaataaagtctttagtagcaagtcatgtacctggaccttgttggggatgttctcgccagagatctcaattagtcttcattggacgtttgttggcaaagttgcagcatcttactgagtagcgtttggtaaaggaactgctagaatgagactataggaataggactgaaacagtgtgtaagggatcttttttatttctagaagaggtgttactttatactgatttagactgctctgagcctgtcagaagtaaattcaagaatgattaacagtggtattttagatacattaagagcaaaaataacctttgccttgtagagatcagataatctgtgtatcgagggatttaattttttttaaccaaaacttagtttctctttttatcatctagcacagatcaaatcctgtatgggccagccaaatgtttgtagtttgagaatgttttgcaaatacctctctgcttccaagccattaatagctaatgaagttttattttggtttgtccattaatttttctgcttatttttactgtattgccatgtccttgatacgagacaagtagaactaaaagagagaaaatgagaggttaagactgtcagaagatgagaaatgtgagtcataaccataccttagtgttttaagggaactttatccagtccaatccctttatagaaaaggaacttttccaagttatgttgcagtatttatagtgtgtaaaattttgtttgactttggtagttgtgcattttaaattatgaatcttatatgctacgataactagtatgcttactttctttaatgcatgtgatcatacaatgctaaaaaggtattttttaaagacccaaccaaactgaggattttgttatacatatctgtatcaacacctatatataaactcttcttcttacctgaaacactccttcacccggtttgggcac

SEQ ID NO: 181688 - DNA, 1943 bp, Homo Sapiens
  misc_feature (65)..(84): n is a, c, g, or t
ttggcatagatttcaccctccccccttctcagaagagtgagtatgctcttaaatgtcaaacacannnnnnnnnnnnnnnnnnnnaaatgatcagtgtctatttgatgtgatgcagatcttataaatttgggaattataatattgacatttctgtgatttttatatatgtaatgtcttaattgagatttctgttaaggcagaaataattaggctagggctcttagttttcattcctattgcccaagtattgtcaaactatggtattattttaatgttactttaaaaatccataatctgctagttttgcatgtacttatatgaaaacagtgcagtaagttgaaaactcagtatctatggaattgataaatgttgatctggtgtagtatattttatcgcattttcttatattaaaaaatgtctgcatgattacattttatttcctttgtaatttacatttcagaatagtgtattgctatatgggtgccaagattgaatatgaagaacccgagtgtttgtagtattatagttttaagcaaatctgtgtggtgatacagccataagaatggggcttatataaactctgtacatgtaagattttgtacagagaatttttaactttataaattgtatatgaacatgtaaatcttttaaaatgtacataaaatactgtatttttttaccttgtgtgtgatagtctagtcattgcatgtaaatataatttattatgtattctgtagtataaatcatacattgatgacttacatttttactggtaagtcaacatccgttggatgttttctgaagtggctctttttgaagtgataatagattgtaattcaaaataaaattattaatgaattctccttgtttgggatcacatcttaatttttaatctgttaaaagttcttgatgtattttaatgagaagactttaggtgaggctacagtgattccagagtgagccttctaactggctagcagaagttctctacgtttggcatctgtgccttggagatactgaaagagaatctgtcatttgacaattgacctctttgtgggatggactcattaagtatgctctcagagactggtatattaccagaatgcctattaattttcagtgagaggcaacaggtattaagtagaacagaatgctcaggttggcagattagaacgatctttcaggagacaaagcaagttttaatcagttgtttggttaataagtatggggtgttcgctgtgatagggccccgccagcttctggctcttgtggacctcaaaagtatcaggtggttttgcaagtggtggtcctttcccctgccccaccccaataggttccccatctgtctagtttgatttttgtagacctttgttttctctagttagaaaatcaggtacactgaatatggttttcatgtaacacctcttctctggagataggggtatgttttcctacccttctagtggagaatcctacttgaggatgacctttcctctcttactaaataatattagtaaatagtgggcaatatattctgctttcagattttgatttgttgagatgtaaaagttgtttggggcttaccaaatctcaagactctctttagctcctgcaggattgtattgcttttcttactggatatttttcctgggtaagcatctttgtggcttcatctcttccccctgtggttttcagtgtatttagtcgagacctctctgctgagcttgcaacctgtttattcacatggcctgccatgccacttggaggtttctgattactcccaaacctgctggttctttgtctttctcagcgaataattccatctattcatgttggaaacttagtgatatgctcatctccttttgcctgtttatggaggtcaccagcctctatcatttgtatgatttcgtttacactgtttatatctctctgtcccccctttt

SEQ ID NO: 181689 - DNA, 1516 bp, Homo Sapiens
  misc_feature (1000)..(1018): n is a, c, g, or t
  misc_feature (1281)..(1333): n is a, c, g, or t
ttgggcaccaaactgtggacagggggcctggacaacacagtgcgctcctgggacctgcgggagggccgacagctacagcagcatgacttcacttcccagatcttctcgctgggctactgccccactggggagtggctggctgtgggcatggagagcagcaacgtggaggtgctgcaccacaccaagcctgacaagtaccagctgcacctgcacgagagctgcgtgctctccctcaagttcgcctactgcggcaagtggttcgtgagcactgggaaagataaccttctcaacgcctggaggacgccttatgtagctagcatattccagtctaaagaatcctcgtctgtcttgagtcgtgacatttcagcggatgacaaatacattgtaacaggctctggtgacaagaaggccacagtttatgaggtcatctactaaacaagatctccagcagggctgtcaaactctgggagaaaccgactcggctctgacagggagacccccaggcgaggggccccgaggatggcggaggatgggccgcaggcagccgagcgttcagggctgcgctccggccggctgagagggcacgtgccccgtcacagtctggactcctgggcctggattgatgtgtctcacagactcgggaaggggtctgctcctccttcctccccctgaacaatgctggcagttgctacaaatagatttattggaggcttatggctccggttcccccacagacccgctcatgagtctctgtttgttcttcccttttcttttgccctgtccctcaccttgggtcgggggtgctggagtggaccacaatgttgtgctgggggatgggggggtctctctttgccgattgtgcagtgcacaagatttgtgaaaaatgtaaataacagactcctattgcggactgatcagtgggagaggaggccccttcccaccggaaactctgagtgtgtatttcgcctgctgtatttgtaatccactcgtggtggtggcnnnnnnnnnnnnnnnnnnnaaataaacagatgctctcacctgggaagaggagacagggaggggaaccaattgaagaaagaggaaaaaagtcttaaagtgtggaaaaggcaaccaggttggccgtaaggtgcctgctggaatgcgtgtgcctccacacgggtctgggcatccggacttataaccagccggccagactgagggatggaaggcactgagatgggggcccgtccaggcggacacccgcagaaatggagctttctgtggtctcttgcactctggctnnnnnnnnnnnnnnnnnnnnnnnnnnnnnnnnnnnnnnnnnnnnnnnnnnnnnagcctggtctttctctttggtgcacacttagttattgttgtgagcaatggaagttcaaaggaactccctctccagctcttctgaatcttgggacacagcctaaaaaggacaatagttagaagacagcatagcaactcagcttcagggagctaccagaggaaaaatagcaactgatgtgggtgc

SEQ ID NO: 181690 - DNA, 887 bp, Homo Sapiens
ttggctaacgacacatttctcagaatgtatcccccttgataggtgatatatgatcgtatttcagttagtgtctctaaaaggtaaagcctcctttaaaatgtacagatgaatgccattattattaggaatcatttcttaattttatcccaaaagacagaggggttcaaatgtttccagtttcctaaaggttttgacacttggttcatctgcgttagatcacttgccctgtggacctccccacagtctggacttggctgattacttccccccattcttgctatttccccacttttcacattgcgtcttcccttcctaagtgtatcaggcggaataatgagtgagcctgtcttgctccttgtagatcttctccctggggtactgccccaccggggagtggctggcagtgggcatggagagcagcaatgtggaggtgctgcacgtgaacaagcctgacaagtaccagctgcacctgcatgagagctgcgtgctgtccctgaaatttgcttactgtggtgagttcagccgaaaggaaactggaggccgttgatggcccaaatggaaaatgcttcttaaaaaaatatggtagagatcataatctggaaaaaatgttctccgagcagctggatgcaataattctattgttttaatatgcccttcagagcacagcaatgtctgtttcagtctgttttgctaatttgagaaaagtcagcaggcaatgtgattgcctaatacacggtttggacacaagtttgttttggaggggttgggagacgacaatgagtttctactctgaagaggggtgggcgggaatttattgaagaatggagcaggggcagtggaagtcattatgagctggccatgatgaggaatccagggttagagaagtc

SEQ ID NO: 181691 - DNA, 870 bp, Homo Sapiens
ggggaccatcccaaaaggagcaggatatgggccgggcactgccaggggtgtctcaagccagctgctgaaaggaaacacaagccgcacatcattcaactgacccactccatcaaactgaccagcaagtctggctcatcatttgttagtgtcactcatggggagagagaaagaggtaaggcttctaggggagggggaaaatcacctccaatttatacactggatccctccttccccagagcgaatgcatctccaggaaagaaaagactccaggggaagcacaacccacacattttctcatttgtgtaaatggcagcaccaggaagccaggggaattaagagtattccctacccaatttacagagggcaaaccaaggcacaggcaccaagtgtttacctgacttaatctcaaaagaagattttctcgataaaatccaagatttctctttcagtccgaactttccattccctggtaccaattccaaatgaaaatccaatcctggatttacgtaaaccaaagcacgggtttaggaggaatattctgttgcctattttcctttgggcccaggttgttgcttttttcctttcccactggggaatatcaggttgcaaattatgagttttttaagggctggagtcgcagagaaaccctcctaatttctactgcaggagagaccactgattcctgaagcctcccctagcagaaaaccagcaaactatagtctgcaaggagcacggttgggccagccaaaccgctgtttcagccagtattagcaaagtcagacgcacaatgctagttaggtggggaggcttgtgttcaaaataattatcagaaactttactgaagccaacttttttgtacaaagttggcaa

SEQ ID NO: 181692 - DNA, 1419 bp, Homo Sapiens
  misc_feature (1272)..(1295): n is a, c, g, or t
ttggatctgcttgtcgtgcaacagttgaggcagtaaccaggggagattcacttcctgtcttgtccttccccagggatcacccccctgctgccctctagcagccaaactcagatgagttccattgttaccctaggtgtgcccatctctttggtagggaaggagaaaggtaagaatagccatcagtgaggaaggattcttggagcgaggagccactgtggtttttcctgctatttaagatgttgagaccggataactttagaaagatacctgcacaaacccataaatagtgcttttataaagtttagttcaccggaacctgagttcagtatttgacattagctttttgtccaaagagttgaagcctgctggaggtctttgctcaaataataaataccacatatttccaagtgtgttcaggtataggcactaggtactgtctgtgtacttcatgttaggcacattacatgcattggctaatcaaatcctcatcaattacatatgtaataatctaaacttgcctccttgtattataaatggaaataatcctgtttatttaaacgggttttcatgtacctgtagggattaggaaactcaaatggcctttttaatacctttccctagtttgagctccctgttctctttaacagataaaacaacatatttgcttcagcctggaatctgtttttggtgctttggtgcagagacaggaaatgggcactcagagtcacactggtagttgcacactgtatctacagagggcgtgtctcatctgtactctgctgggttacaggatttcagtaggtatttgtgtccacctgagaattctgtttattacctttcatttgacagtgtctttcctttctgcagttgattttgctagagaggcaattcataaggtgaggtcctgttcatagtatgacttgctttctcaatatctccttcaatttttagtaactcttggtctatttggtgtctttaaaaaaaataacctagtaataaagacttcttttaatgtggaaatgtggtctggtagtaagttatttctttccacatgtaactgacccaatctggtttccaaatgagaagtgtgcaggccccagaggttgagaagccatatttcaactgtgaaaaaaatctgcttcctgcatctgttgaaatatagttgttcatacttgccatcccttatctttcttgtaacaatttgcacagttcttgccagaataaatgccattatctgtatgtttcagggagttccccaatttgatcattttnnnnnnnnnnnnnnnnnnnnnnnnagagagagagatactgcagtaaaacatttctaaagatgaaagctcttgtatggcatagatatgaattcttcctctggtaatattaggttattccccagaagcacagtgtcattctttaataaaa

SEQ ID NO: 181693 - DNA, 864 bp, Homo Sapiens
  misc_feature (598)..(617): n is a, c, g, or t
  misc_feature (646)..(708): n is a, c, g, or t
ttggtctagagatagccctgtctttcagaaattctctgacatctgcttgcgcaatgttataaccactttcccacactactcccctccagaaatctcattgatatgtggcgaggacacgccttagctatcaccccaatggatgcttctttcattgacccaaatccagaatgtaatggggaactgaatacaagttggatgtctccacccttggaaagcacatcttttgttcttactgaagtagtttaacaccaccagatgatcaagggatcagggtatctttctggtatctttttaatcactgaaggactttgacagcagtaatggtggcattgttgactcttaaatttctgaacgtttcacttaatggcaagtgaagagatatagaatcccccaaagagtgtcaagatgctaacttccaaccctatttttatgtactgaagaggcctcagtgtctcactgaactctaacctttttgtcagtgttcctcaacactggatgcgtattattacataacctgaggagttaaaaaatacaataaccagatgtccaattaaataaaattagaatctggaggaggtagaactcaagcatttacagnnnnnnnnnnnnnnnnnnnnaggacagagtctcgctctgtccccaagtnnnnnnnnnnnnnnnnnnnnnnnnnnnnnnnnnnnnnnnnnnnnnnnnnnnnnnnnnnnnnnnaacaacatatttgttcacttttgaaccctgtgggtgtctttaactttgttagggcccttggttagcaaaatttatgaaagttaaggaaatttggctattgagtatattagtacaactacaaatcctctgagtctcaaggaagctaaaccttgacag

SEQ ID NO: 181694 - DNA, 1782 bp, Homo Sapiens
  misc_feature (407)..(417): n is a, c, g, or t
  misc_feature (628)..(655): n is a, c, g, or t
  misc_feature (1354)..(1370): n is a, c, g, or t
  misc_feature (1420)..(1438): n is a, c, g, or t
ttggcatggactgaattatgtgactttaaaggatgtaactgcccaacatttgcagattctgggtggtctatgtgaccatttgtctcgtatccaaaaaccccggggctattggaacccttccaacactttttcctttgtcatagacaagtttatatataacttaccaagatgttggctgtcctggtgtattgccagacagctctcttttggttcccattccaaatgtgctgctgtccttctttgcatttcacaatatcaaagaaaccaccacccttcttcctaacagcattttatgccttttattccacattaaatgggaattgtgcctacttaggagtgcccctccaattaattacatgtgtccaagaataatccaagctagagacacaaggtgggaaaacatttcnnnnnnnnnnngtcctcttaaggccagtaatttatctgaaaaggtattttatcacaccttgacaccttatatatgagcctattaggagctgcaggtggtttcatagggtaaaatccaagaaaagagaaggatgtgtggggtttctattagaagataattttgttctcattttaccttttcttttatgatccttctctgctagaacaggttaattctccaaannnnnnnnnnnnnnnnnnnnnnnnnnnnagggaactcttttgcaaaagcaatggtcggatgtaaataacatttaaagtatagtgcacataacttccccggactgttccaatctgataatttgtaaatgctttagagtttttttaattaacacttgtgttgctaaattctatttatgtaagtctgctaaagttttttagcccacttaaaacttaagacaaccatttaaaataatggatgggttactatgagcaatttcgctttcagaacccccttgttttagtatatgaaaaagcctaatgcgcattaatgaggttgaagagactatgagaaatatgtatagtgtatattttaaaacagctttgcttgtattgtgaagatttaaaaacaaacttgagatttttaacgtaactattaacacagttttaacataagttatcccactgggtttaagagcatcttgaatgtataatcctttttgtaacccaggttggtttctacttttaccagtcacccaaacatatttatgtttttagttttatgtactcatttccctttgttttcctcaaacagcatgatttttttgcacatgtagaaattttttaaaagaaagaaattagtacatcattttctctggattttcttcacttccctcttcctttctactaactccttccttaaaggccatatcactccatttgcattatttgtgcaaatgccagggttggnnnnnnnnnnnnnnnnngctatttacctaaaaaaagaaaatgcttcagtcaattgcttttttatttnnnnnnnnnnnnnnnnnnngctgtaaccttatcatttctgagtagaccattgagcgatgaatgcacacctgtagtagcccaggaccagctgtggtggctaaagggaatatgttaattaagcaagaggttcttttctaaaagtggtatctgttatccacaatgtattttagttattcccacaagtcacgggtccagataaaatgagggttatcagctaactgatatgctatcattgagttcatcaatgaatttgtacatttctagttccctttggtgaagggaaaaatgatgattttgcagacctaaatttgggcttgggtttcttgcctccttttttggcagcccttcatcttctcatcctcc

SEQ ID NO: 181695 - DNA, 1171 bp, Homo Sapiens
  misc_feature (69)..(96): n is a, c, g, or t
  misc_feature (795)..(811): n is a, c, g, or t
  misc_feature (861)..(879): n is a, c, g, or t
aactttgtacaaaaaagttggcttttcttttatgatccttctctgctagaacaggttaattctccaaannnnnnnnnnnnnnnnnnnnnnnnnnnnagggaactcttttgcaaaagcaatggtcggatgtaaataacatttaaagtatagtgcacataacttccccggactgttccaatctgataatttgtaaatgctttagagtttttttaattaacacttgtgttgctaaattctatttatgtaagtctgctaaagttttttagcccacttaaaacttaagacaaccatttaaaataatggatgggttactatgagcaatttcgctttcagaacccccttgttttagtatatgaaaaagcctaatgcgcattaatgaggttgaagagactatgagaaatatgtatagtgtatattttaaaacagctttgcttgtattgtgaagatttaaaaacaaacttgagatttttaacgtaactattaacacagttttaacataagttatcccactgggtttaagagcatcttgaatgtataatcctttttgtaacccaggttggtttctacttttaccagtcacccaaacatatttatgtttttagttttatgtactcatttccctttgttttcctcaaacagcatgatttttttgcacatgtagaaattttttaaaagaaagaaattagtacatcattttctctggattttcttcacttccctcttcctttctactaactccttccttaaaggccatatcactccatttgcattatttgtgcaaatgccagggttggnnnnnnnnnnnnnnnnngctatttacctaaaaaaagaaaatgcttcagtcaattgcttttttatttnnnnnnnnnnnnnnnnnnngctgtaaccttatcatttctgagtggaccattgagcgatgaatgcacacctgtagtagcccaggaccagctgtggtgggctaaagggaatatgttaattaagcaagaggttcttttctaaaagtggtatctgttatccacaatgtattttagttattcccacaagtcacgggtccagataaaatgagggttatcagctaactgatatgctatcattgaggttcatcaatgaatttgtacattttctagttctctttggttgaagggaaaaatgatgattttgcaaggaccta

SEQ ID NO: 181696 - DNA, 1157 bp, Homo Sapiens
  misc_feature (190)..(213): n is a, c, g, or t
  misc_feature (1055)..(1067): n is a, c, g, or t
ttggcaaaacctgttttctacttgagtctaacatatggtcccaatttattaatacttctgttaaatttgatgtcaggtcaacatttttcagaaatgtatttattctcagaaacagaaccagagagaagttaaacaaaaggttatgtaactgttcctttaatgttgtaattgaaaacttggtttagcgtcnnnnnnnnnnnnnnnnnnnnnnnncttaaaatgccaactaaaataattagaaagtagcttatttattgcatgcttatacattgatattggaattggaattggttgttaatttctgttactggctttgctagaattcatatgtgcataaataacactaatatttatcatcttgggggctgttctgtgatctattacatgatttttgctctctttttatttttctagtatcaaatgtgttctggctgagtgaatttggatagatataatatgcaagctaattggactttttcatttttctcattaaaaaaaggaagaagtagtccactttttgctagcatactattctgagacttacattaatttgggaaaagtcaagggtcaacaaatttttgtgtctgtgaggggccagatagtaattatttaggctttgcaggctgtgtgatttctgttgcagttattcagctttgccaatgtagtgtgaaaacaatcatagataatatgtaaaaccttactaataaaaacaagctgggttatgttggcacacaggcagtagtttgttcacctctgctgtaagttaatttgggttaacctttgtaggagaaattacagattatttttgtctttgttcatagtttttttgtttagggactgtagtggattatggccaagcagcagtagctagttaagtcttaatcatgaaggtagtagaaacctaaaataaaattattatgcccttttcactcatttcataatatgtttgtattgccgtgttgaaaagccaaataaaatacaatccagttaagcagtgagcacccattgctttcccaaaaataaagctccttgctttggttttgtttttgtgttcnnnnnnnnnnnnnattatggaaaggaagacaatacaaagagtttattgtggatcccaaggaatgtgattgtattattatcataatgaaaagacatcctctgaa

SEQ ID NO: 181697 - DNA, 1235 bp, Homo Sapiens
  misc_feature (45)..(59): n is a, c, g, or t
ttggagagctagcaaaacagacaaagaagtatcagaaagatatgnnnnnnnnnnnnnnngcaaactacgatactgtaatagaaataagaaaataattccaggaagaggaagcaggacattgtttatgtatgtacaaaacagtaagacattggttaaataaattataaagcattcatttgatagaatacagccattaaaattatgttgcaaaactatataattgccataaagagatgttcaatgcatcttttttcccccagtgcatcttagaaacactcaggttaaaaaatagtatatatgctaggattacaggcatgagccaacacgcctggccagttgccatcttttttatgtgctttccttccttctctcttctctagatgtagcatgtctataatctctggaggtaagccccgcctcgttacacacaagaggatcatgactaatgcggtgtatatagatagatagagatatctaccagcatgttaataaagggcctgatagggaatcgaagaacgtcacccccaggtaattgcccacagtcttctgtagccactgctggagagggcgtggtgtgggaatgggggagatgggcacacccgtgtgcaccatgtgttaggtggcaggaaagaaggagatttctgaattttatttttttcttgtctaggaaatttttaaagcttcttctgcttagagccttgccagggtctaattcccacacaggtgggagtgggtgcattaggtttcacctttttacgcccaagcagccatctcactgccaaagtcgtgcttactgatgcactcctttgactgtgtttctctgccttttcctcgtgccttgcatctcctctctgtgcttgcctttgtctctctgtgtctctgtctatgcctttgtggctagcatcttggtgcttggatattccccacttctctgtgcttcttggttcctgcagagcctgccttgtgcctttcattaccacgttaacaaactcgagtcgtgcctaacgacgtcgcctcatacgttatgctaatgatcaagagacatgttaatgatattttagaagcctaattagtggaatatataactatatgcaatttggtaatggactgtgacaacaagttgtgaaaagggggcttgacaaatccagttgcatgtggtctcagaccaacaggagctgagaatggatgagtggaaatcatacaggtagatagaagaaggaagtgtgtattggggg

SEQ ID NO: 181698 - DNA, 1256 bp, Homo Sapiens
ttggacaagagggagattctgtctcaaaacgaaacagaagcatataaaccagacccatactgtatgaacttgggtcataccattacacactgacaacagctggctaagtgtaaactgacaaaaattaaatttggaatcagacatttatttttcttctataaaattacttgagggcctgggaaactgaatattgttagaggtgatgtattctctgctgtcataattttacaaatgggcattttcattcatttttaaagtgctacaagtgacaaagtcactgcccagttcatatgttgttcattagttgttaaatgccttaagttactaccaagagagtgaaacattgggcagaatttcaattactgccatcacatacagccttcacattgattccgaagccagaagagacatgttgtatctcgtttatgttttagccaaatccttctcagacacaacattatcacttaaagactgtgagataaattactaccttggccaatgaacacattacgtcctctgtatggtttttatcaagtaactgccccagtgctcccatgacgctgggcaggtccacttgttaggccagtgagggccatagttcgttggtaattaagtgttaacattgttacactcctttttatggttactggtgacctgatttccagaacaatttgttcactccagattatgatgatggcttttcaatgaagcatacagccaccgcccgtttccagagaaaccaccgcctcatcagtgaaattcttagtgagagtgtggtgccagacgttcggtcagttgtcacaacagctagaatgcaggtcctcaaacggcaggtccagtccttaatggttcatcaggtaaagtcataaaacattcatttcaataagatgtgcctataccacaaatcccaggtgatatgattcctacaccatgcctaaatctacctgttaaatatatcaatctaacctgttcctgatttggagaagaggtttaaggaagtggacctttcccagatgtttaataagtttgtcattaaaaactataatatagaaccttgtaatggaaagtatattcgttaagaaatacgtgtgaacttaagaattttgaggcatcctatcaatctttactgctatgctaaatattttttcccaaggaattgctcaggcctgaaacagtattctttaacatttacctattgatcataatcatttctttgtgctgcattttgtattttttaaatcttagctagactcatg

SEQ ID NO: 181699 - DNA, 1528 bp, Homo Sapiens
  misc_feature (1406)..(1416): n is a, c, g, or t
aaagtaggtgtttgcttactgtatgcaatatgaaaggcagtgctgtgggacccacttatccaaaatttctttccctccagtctgtctgcttcagtatgtattagccctccattgaaagtcaccactttggtttaatgcctagtcctaaagcctggaattcagatattcctgggtaaattaatatgaacctaacattagctattagcaccatggtgtgaatgaattgatcaggttgctgcctgggagagcaagggaatcaagcagaagacaaaacatattgatgggataaggggtgaataaagtaaatcagagcactgaatacaaacgtagatgggcaggcctggggaaaaagggtgtcctcagctaagcagcataacactgaatactggtccttttttggaatgatgtaaatgggctgcctaacaaatgggccctaccctcaaccattcatctaagaaggtcaaacatctcctgaaaatatttcccttcctctttaagaaaaatatagtcaaagtgaaatcaatatgttaattaaatcaaatcaatcatcttccaaagtgaccttaggaagtgtaattcatgctaatctagaaaatactaagcacaaatactatagataagactctcacattaaaagtacccacagttatttcacaattccacaaaattattacttgcaatcctattgcaacactaaattatagtcaaacaaaagacactttaaagcaaagagacaagacacagttatagatgccctatttaaaatacagtttaacacttattgaaaacttatttaacacatcaaaacatataccttacaatgattagttaggagacacatagatacacttgctagcagcacaaagtcagttttctaatagggtattatcttaataacaacatatgtgtaaaatcaacacttgtccaaagaaaactttagaaaactttccatcagtctagatattagaattcattttgatgtcaccagttttcccctaatgtattagtatcataactgtatgcctaaaacaacccctttcctctaaatatgataaagcctttgattgggttctacattccttctgtgagacgtagaaggtatcttcattatatagcacacagattttaagtagaactttcttaaagttagagctttttgctaaaacatgtttcaaaatattctaatacttacaacctaaggtttaattacgactaatatcctgggtctgtttcccacacaatagtaccaaacaggtagtaggcaagtcattggccattggttgccaaaggctgaccaaattaatcttctatgcatttttcaagaggtgaaataattgccttccccagctgctaagagctaggctttgtaggctttagaatggtatgtctggggcaaagctagaccnnnnnnnnnnntgtggattctagggtccatgtgactgactgtaatatgtatgcaatgatggggcagagagacttactctggcttgtgtaagtaacttggcagtctaagctaagtaagtgccaa

SEQ ID NO: 181700 - DNA, 1156 bp, Homo Sapiens
  misc_feature (266)..(310): n is a, c, g, or t
  misc_feature (322)..(331): n is a, c, g, or t
ttggctgggatttgttgagactttaaagacaagtagaaaatatttcctctgacttacagcatggacttaagagaaaaatttgaatttagttacctgaacttgtagtataattgactgacacaaagataaaagtagtggtgttttaaggctttgaatatattttctcaagacagaaatcttgacagaggaattccttttaagcccttgactcaagggttcttaacctggggtccaaggatagaattcttcttttccctgtaaaatannnnnnnnnnnnnnnnnnnnnnnnnnnnnnnnnnnnnnnnnnnnnatatatatatannnnnnnnnnccagtgcaattccaaaagccaaggtgagaaagaaatgtatacgctgggaatcactaattttcccattcctggagagcctggttttccacttaacgcaatttatgccaaacctgcaaacaaacaggaagatggtaagaacaggtctctatcctcactctgtgacacaagaagattttctccatttgacttcctaccacccctctttttcttgccttgattcatgtacagattgagagtgaaatcataggaagtacattatcttattagtcactctcacaaacgattcttggcaacaaggatgacatgcagaaaatcttttgaacaaaaacaaatatagttataaaactatctggactgtcatttctattttgtatcctgttcaaatgtataaaaatgtattaccacagtgagcatccagagctgcaaccagtacatttgggatgtatttgcaaatacagttttttttaaattgttctgttttagaagtgatgagagcctatttacaacagctaaggcaagagactggactgagactttgtgagaaagttttcgaccctcagaatgataaacccagcaagtggtggacttgctttgtgaagagacagttcatgaacaagagtctttcaggacctggacagtgaagggagcccgggcagccaccgtctccagagccctgggcagcattttccagcaagatgtacacaatcttttgcctttatttcgtaaagttttatacagaagagagagagcatgtctttacttgaaaaactcttgatcaagaatttgggtggagaaaagaaagtgggttatcaagggtgatttgaa

SEQ ID NO: 181701 - DNA, 1051 bp, Homo Sapiens
ttggccttctattagcctagcattcaaaccagcatttatattccagccatggtcagcaattcatactcagtgaacagtgttagctgaatttccagaaacccaattattctccacagtgttgttcaggacttgaagcagataacaatatcctttctatccttggctatctacctgttcacatcaaataatccatcacatactgaaccggcccatccagcatgttgataatggacagctcctggaatttgattttcacaatcactcagtaattccttcttctcagtacgctgctgggttttacatttatcttgcttttcatatcttgttgaaaattattctcggtccccagagacctagatcgacgcatattctgagtctccaaaagagatttgagaccaggagacagctccagatgctgtcagcccagtgctgggggcaggcttccatctgtgaagtggagaggcgctttgggcttcttcgttggcatcaggtgcccatacctagggcagctgtggaagtgtcagcgtcctccctgagaggaactcctgctccggtggctcctcagtccttccgtcagtatgctgtaaagcacccacatggtaatgggtgtggactgttaccatgactgctccactagaaagtgccatcaccaaagaatgagattctggaacaggatatcactgttagaatggaaatatagcccatagatattcagctacaaagtcataaagcctaaatgtcattgattccgtaacttaacactgtcagtttaactttcagactgattaagcctgaagtgtaaaattaaatcctataaaatagggcgggttataatgagtgctcattggcattcagcagttgccgagctgggagtatcgagtgggagtctctctcttgcctgcctagggaacctctactcagaccagcccttgcccgccagcttggcgttgactttcagcctaattgctgataggactggacgtctttgctttcacttgcccaaagtgaaagagacaggctgacagtttccaaatgataaataacagaaaaa

SEQ ID NO: 181702 - DNA, 1089 bp, Homo Sapiens
gaaacagtctggctctgtcaagaaaatatatataaaataaaataaagtcacgttcactatgtaatactgctcttacaaccgatatccaaataaaaataactactttaaaacctgagaaagtttgttttgaatgctcaagtgtatagctattactcctatgagaaaaattaagttacctactgaaataatacaattacagaaagaaaattaatcaagtttcaaatacaccaatatgtagtaatgtgtattttacacacatccaagaagtaaatcaaacttctggaaaaacactaataataagtagtaagcagtaaaaggggtacttaaactagattattttatctaaacaaacatacaattagggttttttttaatccagaattgtagacacaattgtccttgatttaaaaaacatttcccaagacataaaaatgttaacaaaatatttttaatctctagactctagatagtttattccagtctctacaacatggatactataaaacaatgggggttgttgaaatctaaaaactctcacttatgattattatgcccagaaatacagaaacatcatacttattttaaaaaaagttctttaaacatagttctaaaattaatttagcaaaatcaacaagaacaaaaatgagtcaacagccttaaaatacaagatactgacaaattaaacaatgaaaatatctttaaagtatcaggacatttttattttatgatggcatatcatgctatttcaaaaaggaggtatgtagaataaaagtaggtattcattttaaaagattatcctaaataactaggatataatggcagttaataccacagtgttccatttttttcctttttatttgtattaggttgttcacaatgtactttctaaaaacatttaatactgaaaagaatcacatgctcaagacttaccgaaaatcatccaaacttaggctacctctgcaataacaggtatgtgaaataatataaggagaggaaagaaagaaagcccagatattatataaacttcattttagaacacaaaacaaaatttaaaagcttcagaagttacacaggtgtataacattcatt

SEQ ID NO: 181703 - DNA, 1248 bp, Homo Sapiens
  misc_feature (303)..(399): n is a, c, g, or t
  misc_feature (644)..(823): n is a, c, g, or t
  misc_feature (932)..(963): n is a, c, g, or t
tatactggcttcttagagtttttatgtaagacgtgaaatagggttgagaaaaatcatactactacctatttctcttaatacataaacaaatgatatcagaagctgcaaaatcagaatgactttgagttacctggaagaacaaagtggccttattctttctacttctgttaaaggtaattacacggaaagagaaagacgaatgtggaaagtggggggcctgcgacatggacagtttttatttaacacacacacaccacagtctaagcactctacacatgttaaatcacttaaacgttataatannnnnnnnnnnnnnnnnnnnnnnnnnnnnnnnnnnnnnnnnnnnnnnnnnnnnnnnnnnnnnnnnnnnnnnnnnnnnnnnnnnnnnnnnnnnnnnnnaataggaggcagatctggggttggaaccccagcaatctgattcacactagagtctgagatgcctctccactgttaaataggattaggaccaaataacatcagacaacagtaaactccattctttaccatgacttatgatactatgttaagggtttccatgtactttacagaaaagactaggaagaataactttgtgtgagtcttttaatcaagacaaattttttaaagcaaggattgtgcgaggnnnnnnnnnnnnnnnnnnnnnnnnnnnnnnnnnnnnnnnnnnnnnnnnnnnnnnnnnnnnnnnnnnnnnnnnnnnnnnnnnnnnnnnnnnnnnnnnnnnnnnnnnnnnnnnnnnnnnnnnnnnnnnnnnnnnnnnnnnnnnnnnnnnnnnnnnnnnnnnnnnnnnnnnnnnnnnnnnnnngcaatgtggcaacaatcttagtgaagaaagaactcatgactcaaatggggaaataaaaagaaaaatcttattcactaatggaggcatcaagatttatatacctcaggcnnnnnnnnnnnnnnnnnnnnnnnnnnnnnnnntagatttatatacctatagaaatccacaaacctaaaggcagaaacacaagagtacataatggcactgtgggggtgtattataaaaacagtaagccacaaatatataatgttctatttctaaagcaataaaaaggcaacatgtaatgatgtgaaatctaattatcaatacatttactactgaaagtttcttggtaaaaattatagtattcaacaatgtatcaatcagttttaagagaaaagtgctaatgaaagacataaaagaaacaaaacttcaaagaaatccaa

SEQ ID NO: 181704 - DNA, 967 bp, Homo Sapiens
aaattgatgagcaatgcttttttcattatgccaactttgtacaaaaaagttggcataatactacatctgttcctacccctaataagagtgatatgagggtaagaaaggaaaggcagtcttctgcttttaattacctttagttctgtatgccctgcttcacgctgcatacttcagagatgttaattttaaaagggaaacaagttatgtgtggtgtctgtcttgtttactagcctgaactgaagatggggactgtcttggttgttaatcatcagcatgttatgatttttcatagtgtctagtttttactgtgagggatggttaagggaattggacatggttaacctgaaaaaaattacttggagaactcaatgagtgtcagataaataaaaggctgtgagtggaaccatcagtggaaccatcagaatattctgttttttaagaccttttgttttgcaaaagcagctttttcttaccctaacaaagtagtgccagatttgtgcatttgccaaaaccagttttaaaaccagacaaaatatatgttgccattattttcaggcatagagcaacaagcaacactggattgtgatccctgagagaagaaaaacacaagatgttaaatcccacagatggtcattgtgggattctacctgggggtatctcccagcattaccgtgggagttgagccccaggagagtcagagagtggcaactctgatgcaacagaggttagggttactaaaacagctggaatttataagatagagttcaagattgggaagagaggcagaaatctgcatgagacttgtcaagggtactgggatgtgcatgtccaggataaagatctgcaaagtgttagcaaacgattacttcctctaggacttaagagttgaacagtgacaccagaagttatacagtacttagaatccttggaattgcagcctgagtggagcaatctcattgaacacttt

SEQ ID NO: 181705 - DNA, 1041 bp, Homo Sapiens
ttggattagaaattaatcaaaatgattaacctctacagtccttcagcctatggaatgctttaaaaaatgttaatggaaagccccaggagaccattttaggtaagacttttgtttgaattttaaaatgcatagaacgttaaaaaaaaccagcaatttattttctaaaatattggctctacttttgggaataatagcattggtaatacgcacaggtttacctcattctatgcaagaggggttaataacataaggttttataatagctactggaagtaaaatttgttactttatagtgtaagaatgtatggaatcgcatgtcaccatttcttaatactgactctttaggggcataaatgcagatcacatcaacgcaagttgattctcatgtgtcaaatatatgtgaattcagctgttaaattactggatatttatcttaacattgctgagagggacctactgtaaatgtgacatcctcacacttcccatatctttaactttgaaaaatcttcttgtaaacttaaagcctagaagtattccaaagcaagggttacagcagtctttattctcaggctcactgaattaaacccaggactaattccacagcacaggcacaagaagcctgttgtgtagtgtactctgccagtaccttggatttaggagctccatggggaactgactaaaccaggagagagaggatttggagctagtcagtcctggtaatctatgaaatgctcatttatacccaggtttcataagcttccaattctatagcaaacccaggctctgagtgttttagaatttcctaattcatgaagtgtttcttgtcttgatcccgtgaccaacagttgaaggttggtaaggacttttctacagtctgaacacaacctaaagccctctttcattgttcacacactaactcctactgccgacgaaccgaaaaataattaatgcagaggagatttatgtcttagccataactccagttgtacaactcaatcgccccattctcttttacggttcaaaatgtactgctgaccttgg

SEQ ID NO: 181706 - DNA, 1344 bp, Homo Sapiens
aaatgaaatgcttcacacagcctacaaatctgatcatttaaaataatcgtaatttttaatatcataatattgtgaaaactgaattttcctatattagattttcttagaaagcttttacattaagaaagtaaactttgatcagtttagttcaaacagttgagcactgtataccatgtgcctggcagtgtggctgccaggaggggcccacatcctggctgaggagctggggtcaggtacctggcaacccccacaggccaaggtgtgtgctaagttaagagtgaattataggcccatctgcattcaaagaagggagaaatcagcaaaggtcacaatcactggagaagtttcatagaagaaaagggactggtttctgtgtcgagaggatgctagggcaggcagggtgatgagcaggaggggcatcatccagggcctttggtgggtcctcctcctcctcccctggccgggcagagtctgatcctgctcaaccaggcccaccccgcttccacctccactccagccatccctgggcttctgagtggaggacagtcaggaactgagtgcaaaggatttcagactctcagtggatggcagggcccgggggactgacaggagagcggcagctgttacaatgatctagagccaggatgcctctgtagccaggacctatttacgatcgggacagatggggacaaaggacggaggcactttacaggaagaaggtgaaccaggcagtgcgtgtggaaagaaaaggcacactggctagttctggacactagcaaattacatgctgcaggaagcaggccaggaaagggaagagggccaaggtcttgagatgagtgatgctgaaattcagtgtatagatctgtgaggaaatgaatttattcatacgctgcaccttaaacacacacccgcaaatgtaacatccatttggatgagccctaagtctcagattccaaagtcaacagcctttgagacatctccacagaacaccgctggtacctgcacgtcagcatcctctctgccccaggccccggccccgtatgacggcctgctacactctcactgcctcagccaggcctcaggtcaccctaactcccaccccttactccccactcagccaggaagtacttccaggggtgcccccggagccccacggccacccctcaggctggccacagccctcagcagtcaccttgacttgctgtgattagaaaagcaacacttattaactctagacatcgctaagatacaaaaataagtaaaaagcaagaccacaatcttatgatttcaggtcctaaatataatcaccagtattttaagtatgtagtctttcatataagtatg

SEQ ID NO: 181707 - DNA, 1234 bp, Homo Sapiens
ttggctaattctcacttgttaactgcttttcatgcagggttgcaattaacccctggcagatacctcaccgtgttctccttatagccactctgtccccaaagaagtttttaatgctttgacctataaccattttaaaattcttcagacttgacacttgcctaatttctcagatcattaaatcacacttctggttttttccagtgatttttactaaatttgatgttaggtacctataattaccttcccttcttcttatttttacaagacagaatgccagcagaaaaaaacaaattcctgttcacttggtaattttaaacacaaccaggtcaaaagtttcaaatctagtgttaagtccgtaactgaaggcaccattccaaaactacttgagtataggtgagaacttgacagataattatggttgcttgacctgggtcttggggcatctaccaaatcttaatggtagtctcactgtctgtggccatgtgagctataatctactgccctggtcaaacttaaccaaaattctgttttctttcagaagattccctaacattggaataaatggtaagaatatagattgtttgtgccgggcttatacaatgggtctctaaactatattgagtggtcaaaatgccacattcagaatacttagagagggagaaagataaagtgccttggaagccgtgaaacattctagggagcaagagcacaccactgtacatgctcctggtttgtgtgctgcagactgtgttaaatgcagaggaggcaaggtggagagaaggaaagacaagagaagtggaagatagagtccactcccctatccccgtcaatgagaagaagctccttaccaggtctgtgtgggtcacggggcaagatcaaagaatccaagcaaggttcataaaatgccaccacccctgattcatgacctgacctactgaaaggtttaacttccagaggcaggttgtggtttctgatccaatcaagtggattctttttcttggagaaagtctcactgtactgaaagaatcttgtcagatatccaagctaaaggaaaattttaaatttaatccaatcagatgaagaagctgataaaaaaggtataaccattagtgggagagcagcatttaaaattctctctatggcttttctgggctttttacctctgtctcaaccaaaaccaaacaaaaccccagaacaacaacaaatgagttgaatgttgctcagatttggagta

SEQ ID NO: 181708 - DNA, 945 bp, Homo Sapiens
  misc_feature (776)..(810): n is a, c, g, or t
gccaagtgttttactttagatatcttttcaaaaggactttttcttcaccttctccaacctaaagcattcattttatagaaggcagtagagtaagttcctagtgtatttctaactttaaaactagtatttatattttacccaaataattagtaaactggtagttgaaaaggaaaggattaagtaatgtagtttctttctccacattctgctgctgcttgaatctcattccaaaacagtttagcatcatatattattaccactctctgaatatcactgttgttgatatgcttaacataccttgatcttcaaaaaggaaaaaaagcgagaaagagaatgagttttggggagttgtctcttttgtctttacatgacacaaagcatgaaacatgttttctttttcagcagtcctttgccatgtgttatgactgaatgttgctccccaaataccatcacaccgggggttagagcttcaacctccagtatgatggtattgaggttagagcttcaacctccagtgtgatggtatcggggttagagcttcaatctccagtgtgatggtactgcggttagagcttcaatctccagtgtgatggtatcggggttagagcttcaatctccagtgtgatggtatcggggttagagcttcaatctccagtgtgatggtactgcggttagagcttcaatctccagtgtgatggtatcggggttagagcttcaatctccagtgtgatggtatcggggttagagcttcaatctccagtgtgatggtactgcannnnnnnnnnnnnnnnnnnnnnnnnnnnnnnnnnngttagatcttcaatctccagtgtgatggtatcagggttagagcttcagcctccagtgtgatggtatcagggttagagcttcagcctcccagtgtgatggtatcggggttagatcttcaatccccagtggtgggtg

SEQ ID NO: 181709 - DNA, 1828 bp, Homo Sapiens
  misc_feature (148)..(162): n is a, c, g, or t
  misc_feature (1528)..(1539): n is a, c, g, or t
ttggtgtcattacactcaaaaaaaatttacaatagggaatcctgttgccacatagtgtggaaaaatcatgtcatatttaaatataccatactctgaaatgtgaggtttttacccagtaggctgacagttttgttgcaacttgctctannnnnnnnnnnnnnnggtccctatagcttctttctagaaaaagaggcaaacgtgccttgaaaagccagagtggctcataataaaaggaatgcgctagatacttcaagaaaaaagctaagtttaaatgaaccatgtgacctctgataagtcacttgaacttgtgccttaatcaggttcactgtaggtttacatatgtatgtatgttttacacaactcttgtaattgtcatttgaggggttttgtttttgagagttctgcataagaacagaactttattaaggattagagggaagatacaaatattactgcgtttaattgatgtctaatttcatgtggcttaacagcaattaataacctgatttaaggtctttattcagaatgttaatttgcattctctgccgtgtctaatgttcttaataatgaagctaaaattaacccattttatttagtgaattatctatttaattttactttggctagtctggtagctttaagatagctttgccttagcaaggatcaaagtcctacccaaatataaaaaatatctagaagtatctaagagttctttttttctatttaccttgattaggagataaaagttttatctgttagttgcttttccttttggaattattgtggattttaaaacttaaaacttgcctgcaagtatttatataaacattcaggtatataagccttaatttctaagataatttaacttttgttatgggagggaggtaagagtgtaaattttatatacatgaaggtaagatctgagtgtaaactttacatacatgaagtatgaatggaaggtagaaaaaaagtcccttttcgcatgtaatctctttatcaaagaattttcttttgacactttaccactgaagtatttttgtaagtcctaaattcgcagcatattgtttcatatttatatgccatcttgcaaatagttcttgctattttattcactgctgttacactttagaaaaattccagcttgtttacttgcatttatcagtgatgccaaccaagctttgactgttaacttgaaagcttgcttctgaaatgttggtgcattttcaggtgacctcttatctctctgaaagttcatacctattagcaggctctgtaaatattgacatacttagcttttaatacattctataagtaaatttatagatttcagaataacttaaaaaatttaatggtaagaaggggtgatgtgtcgaaaactcatactaaagtattaggtcactttaaaaaaagtgataatgtatgatttaatgaaatcttaagattcagttactatttaaattcaccatttctgttttggtcttataaagagaccttggtttaattatccagaggaagtcctcttcaccannnnnnnnnnnncttagttctgcttctggaaagtgttttataaagttttctcagtgagggttcttaagagttttctttggcctcttttctctcaacagtaaattgatgattttatatcagctttttcaataaaagatgcattatcattactggctataaatcatcctggggagatttataaccaggttaaaaataatatcttttacttctctcaccttttacttgtggttcagatgctcagactgtgcctgtttgcgtcgtgtctgttgctctgccgctttccatgcagcattttaatttt

SEQ ID NO: 181710 - DNA, 1321 bp, Homo Sapiens
ttggaaatattattgccagtgaagagagctattcttgtttattatcagttctatatttttagctgaagcaacttagccctaaaaaaccccaaaatcaacttcttcctccaaattaaactctcccccaaatttaatggtttctgttttcttaaatgtttttctacttgacactgttatgtcagtctcatgtaactgaataattgttcataatttctgaagagcatttagtctttgccatctggcttcagtgccaaatgattttcaattcttgtttttggagactaatgactttttccttaatttattatcaaatttgccacattttagagctcacttttagaagttctgctatggttaatgaaaacaagctagaatgacacagtagaaattggttaatacgtcacattttacatcactattttgtagaagatttttagtaagtttctctatttttattccttgccactctggattttacaaatattctgacctagttgatccatcacatggtctcatatcacaactgttgcatcgctatattcacatagatgtttttctgtttaatttagaagacagtatttctgaaaaagtatgaaacgaccccaaatccaaaagttatggtgcacaatgaaaatgtatgcttttaataatgctggcttctgcagtaggtgtagaccatgtttcaaataaccacagactaatcagaaactccacctgtgaaaggaacttgaaattgtgctattcctccaagcttataacaccagcaaattgggtcaataggttattcctttaaaataggactatgagcctacagaggctcactctgaagaactcagccgtggagttagttctgtactatatccatcacaacagacatgcttcatcccatagacttcttgacatagcttgaaatgagcgaacccatccttgatttatatacatatatgttctcagtattttgggagcctttccacttttttaaaccttgttcattatgaacactgaaaataggaatttgtgaagagttaaaaagttatagcttgtttacgtagtaagtttttgaagtctacattcaatccagacacttagttgagtgttaaactgtgatttttaaaaaatatcatttgagaatattctttcagaggtattttcatttttactttttgattaattgtgttttatatattagggtagtacatttcctaccctacctgaagacttgagattatagtctttggggggatgggcaaagtactcttcttttttttgcatcttttaaattgtgatttttaaaacacatataaattttactatcttaacc

SEQ ID NO: 181711 - DNA, 1647 bp, Homo Sapiens
  misc_feature (126)..(199): n is a, c, g, or t
ttggcttctgggtgggtgtcctgcagttcccttcctcttgagtctttttaactgggggtccggtgtgtttgtgatcaatgacatgtatgcgtgtgcatgtgtacctttgcaggtacacatgtgtgnnnnnnnnnnnnnnnnnnnnnnnnnnnnnnnnnnnnnnnnnnnnnnnnnnnnnnnnnnnnnnnnnnnnnnnnnngtaggtttgtgcacacatcctgcatacctttgtgcctgggagtggcatgtgtgtggtgggtgtcgctgtgcatgatggagttgcagccgtggtgcatttgtgagattacctcggtggcctaaattggggattaggagggcatcctcaggtccttcccactgtctgctcgtctgcccacaggcggctgtgccctaaacaggaggaggccattcacgcctcgcctgagttgtgtccaaggtgtgcgtgtggccaggggtccatccgcttccctctagcccagcccctgaacacagctgcagtgcacggccccactcctcagctctgctccccatcccaactcgaagacgctgccctggccctgtgtgtgcagctcatgtggactgggagggcagggcaggtgcaggtcttggggcaagagctggagctgtcttttccttcctgcacagccgcagagcaggtggatggggctgcttccctgcaagggcccagggccaggccccctggggatttattcgtggcttagaagggtggggccagaagcaggcgtagtggggattagggactcagcacccccagctctcagtccagcagacagacccaccccaggctgactacagaggctgcacctcagcaaacaggtaggccctgttcttggggaggattcccaccaggcaaaggccagctcccgggccctcacctgccacgtgtccaagctaggatcctgtttgcctttcccttgggggctgggagggaggcctccaaccccctctggcattaccagcatcacagataggagtcccaagtcctatgagaagttcctggaataggtgtagattcagtagatctttacaagaccatatctgcagggcaaggtaccagaggacagaggcggggacagggacacttccattccagacctagcagcccagcactcagcaccatgcatgggagcaaatggctggactcctgggtggggtgggggtctcagagcaggctcccagagggcttggaggtgactccaccaggtggggacggcagctcccaggtagggtgtcatcagagtagacagcattgcttgctagggacccctggggaggctgacagggtcagtgggtttcagttggggggctcccctgctgagaacccagtaaagccggccttccattcgtctcccgtgtgcccagagcctggtctgagggccgccctgtgcatgccggcccttccaacgtggcagagctcagggggaagaacacccaggctctcaggagactctcaggccaatgtctccatccctgggtcagccctttcctgccatgaattcaggaaggcagaggcagctcagcagatggggactagaggccgcactgctatccacagcctctcttctcacccccaggcatgtcgggccccaggcctgtggtgctgagcgggccttcgggagctgggaa

SEQ ID NO: 181712 - DNA, 700 bp, Homo Sapiens
ttgggtctccgtgagggcccccagaccccccatcgcccagggtcccatgagatgtccccaaccttctagccccgggggtgtcatgtgcatcctcttacagctgttgcctcttctctgggtctgactgcagcccacaagaagagggcatttaatgttctgctgtgtgtgtagaggatagtgtagcccctaaccagagtcctgatgggtgctggtgtccagacccaagttctggggctccagagagagcaggagtggtgcctgaggactgaggcccagggggcggcccttccctaccctgcacaggcccggctgggctggaaagctgtcccacagccgcagtgaggacagccgcaggccagtgggctgctctgggggtcgtgtgggacctggggtggggctgcatgggctcactgtgccctgaccccaggccccacccacaggcaaggagcccggcctgtttgatgtggtcatcattaacgacagcctggaccaggcctacgcagagctgaaggaggcgctctctgaggaaatcaataaagctcaaaggaccggcgcctgaggcttgctgtctgttctcggcaccccgggcccatacaggaccagggcagtagcagtgagccaccccccttggcaggcgatactgcagctctgtgcccttggccagcatgtggagaggaggaatgctgccccctgtggttgg

SEQ ID NO: 181713 - DNA, 1264 bp, Homo Sapiens
  misc_feature (154)..(204): n is a, c, g, or t
  misc_feature (1014)..(1029): n is a, c, g, or t
ttggagtatttttctggtcatgtagatgggtgcacatgacactaaacagcattgtttagtgttatccctcttaactggtgggttgtatttggggtggaggctatagccgaggagaagacattcacctctgtactcgagaaactttgtgtaggannnnnnnnnnnnnnnnnnnnnnnnnnnnnnnnnnnnnnnnnnnnnnnnnnnctgttagcacaatgctataattgagctaatctttgtagtttggtgcaggaccaccaagtttgtgtgacccattacctactttttccatgctcagccattaccctgtcctggggcatctgagggcagtaaggaacaggtgtccaaaggaggaatgttggtgcctatgagtatgttttccagttgtattgaatttcttacttggtggatttttgacttgtcttagtttctttccttgtggtctatgctattttacttgcgatttgttggatattctccctgtcattaaagagttgtaaaatggaagttagtttctctatgcaaatgctttaatggatgaagctgataggtttagcattgatttttgctggtgtccttcaacaagcatgaaggtgataaatgtgtttccatggctttagactcatttttgaagtcttggattgtgtgaacattcttagaaacaataaaatgttttaattaaaagccctcgactaccagctgaattcagtgtctactaggaaaatgggtagatttgttacattgtccctttgctctctatgactttgttccagttgtcaaggaacttaaatgggtattcaggaaaaagaattcttgtttccctttcctcaccttgccagttaaataactcctggtgacacttcaggtggtagaattgaaacacaaacctgacttctgaccacatgggtcaaaggcaaaaggcaaatggcttcaaagcccttagtgtgcttatccagttcaggcagtgaggagataacctctgctttcctccctgaggagtttggagtatttaannnnnnnnnnnnnnnntgtcactttgaaaatatgttgctttttctcctgattgtattgaggctgatatggaagggttatttctttctggccaatactttttggtatttctaaatattgcaatcttgatttttactattaaatttgttaattgtcagttctggcttttttgcataaagagttggtccattaacttgccatttgaagcttctaactagatattccctactgaaaagttttggatttgttttta

SEQ ID NO: 181714 - DNA, 1313 bp, Homo Sapiens
  misc_feature (151)..(174): n is a, c, g, or t
ctttgtacaaaaaagttgggttgattttgaaggcagtgttcccttctctccattgactatgagagagttgggggacacacatgcagaagaagcccgtggggagaaggtggattcctggtgtgctggctggtttttcagggctgttagaggnnnnnnnnnnnnnnnnnnnnnnnnatggcaagacttttggctttgagaaaactcacttagagggctttccaaaaacttaggatggtctaaaaaattaggatattcttttagaattaggaagaaaaattaggatattctaaaagaatatggattaaaaatttaggatattcttttatatatcctaatatctagatgagaggccttccttcataagatctggttgtttgggctgtggttggcataagtgatatttattttggcctctgtcacatccagtttcttgagcttttaaggtaagcttcttttggctttttttcagatgttcaccaagcttaagtttaaaataataggtattctaaaagagtatcctaattttcttatctgtattcttttagaataccctaatgtttcagacagtgatattctcttgttatttctaaggctaaattggcagagtatatcatctaaagccaaacactgaagaaggtgagaacccgctcccacccagccagcatttcctggaacagacaagctgctgcttccttgctggctcacttagtgcattcctgggatggtctggcacccaggctttttattctttttgatcattgttcttactgaggtgccttcctagaacaagagccacttacaaaatagcttataattattatgtaccacacaactactattgtttgatgtatgactgctgagagcttgaatacatgcagagagtgactgaagacttagtagaggaataaattctgagcctgtctaaggtggggctaaggaacagatgagtaataagaggctcttggatttttttaaccaatgcaactgaccctttcaatcagttttctttgaattacatctacaagttttgttccactcagctaccagtcaactaggcatgctccacagtatcacaggaagaaggtcagaaatctggaactgaagctaaaagaagtgaggatgtagaagccacattcctctccaaggtagtgtgtgaaagaaccgccccctcttgacaggaggatgaccgtcgccattcttgcgtgggactgactcacccagctgagaggaggaccaatagaaagaaaattcacatttgagtccacctctctcccctttttctggccttcattcataggatctggttgtttggg

SEQ ID NO: 181715 - DNA, 853 bp, Homo Sapiens
tttgtacaaaaaagttgggtctaaggtggggctaaggaacagatgagtaataagaggctcttggatttttttaaccaatgcaactgaccctttcaatcagttttctttgaattacatctacaagttttgttccactcagctaccagtcaactaggcatgctccacagtatcacaggaagaaggtcagaaatctggaactgaagctaaaagaagtgaggatgtagaagccacattcctctccaaggtagtgtgtgaaagaaccgccccctcttgacaggaggatgaccgtcgccattcttgcgtgggactgactcacccagctgagaggaggaccaatagaaagaaaattcacatttgagtccacctctctccccctttttctggccttcattcataagatctggttgtttgggctgtaggtggcataattcatgtttattttggcctctgtcacatccagtttctttagcttttaaggtaagcttcttttggctttttttcatatgttcaccaagctaaaatttaaaataataagaccaggtttctctctgtacaagtggattataaacattttcaccaaatcataacaatactccagctttccggtccgacttcctaggagcctggagttagcaaaggttgtctctggatttcattctctgagaatatcacagagcctgggagaagatgaatttacatgaaattgcaacatacacaccttttttattttctggtgttaagctagttgtctttccctaccttacaaatcatgttagttttatgatttgttccgcatgttttatgtttattgtagaatgtttatataacatacgctttccatatcagggaaaat

SEQ ID NO: 181716 - DNA, 1287 bp, Homo Sapiens
  misc_feature (578)..(586): n is a, c, g, or t
  misc_feature (1135)..(1143): n is a, c, g, or t
tgatgagcagttctctccgttacccaatcctgccaaccagcactaccatggctgaattgatctaccgttttctgagtaaactgtaactggctacagtttcggtaacatggaaaagaactcagctactacagcccaactgcaatacttcaggaaccccctccatccctgggctcctcactcctagtgcatctgattgaggaatctgataacttgctgcagtctggtctgttagcctcatttgcaaagaaaggtgccagggactctattacactcactaaaccagagggcacacgctggcttaggacacccagagcctacttggaaagggccctgtttcatgctctagctcttggatggctattgcctggctgatcagtaaagcaagtatgaaggaagtacataggaaaaggaaagggagggaagaggcttttggacagtaacatttccaaaaaaatatagtgttttatgcaacagagaatcaagtttcactgtgtatactacaaatggtcaaacattttcaagagcatgacaaaataaaaacacacaaatttacgtctgatgttcaccttgcccactannnnnnnnncctatcttaaaacagtgcaaacaggtaacttatgcttttaaaacaccacgaccccttccccaccccccaaagtccctttcctcctagtatctgggggaaaatctgcaattctgcaaatgttactgcgctagaggttgcaagcagcggagaactggctgaacttggcaaaaggcaaggactggtcaaagcttcccctttctcctccttaaacatctaagtgctttccagtctgtcccttggttggccttgttctcctgccagagggaagggggttcatcatgcccttcttgcatatccttggggttgcttccatccctgtttgatgtctccctcatgtctggaagctatataactagttacaggatggtagtgattaacccacttatctgctagatctctagtaaagcataattctaagctaagagcagtttagcccctgaggagtcacacatttgaggaaaagctgctatcgatgacttctattgtctagatttccactagctcccctcagactaaaagttgtgccccagtccacttctttctcaaagnnnnnnnnntgttggctcaattcagactgtggctgttgaaggatgatggtgatagtaggttttgttaaacctgagagcctgacaaatggtgaatcacaatggctgatctgagttaatggaaattgaactaggtgacatgaggaattctgccaa

SEQ ID NO: 181717 - DNA, 1104 bp, Homo Sapiens
ttggcaattagataatataaatataattagataattaaaaaatagaaaatctattgttttgcatgtactatattaaaatcttagggattttaaataaaattaattgatttcttgaaagtagatattatctcgtcgtgtctttcaggattggtgagaagaaattaaagagaaaaaatttaaacatttaaatcagaccccactgtgaatccatacttttagaaattttacctttttccattcacatatcttaatgttttctccacctacaactagataccctttttaaatgttggaaacaaaagaagtaaccttggcaaatagttgagaactgagttttatatgaatatacttttctcttgcaagaccaaatacagtttttcttctaaaactctgttattccattttctttcaatgaaatgctcacagaaccagaaggcttgggaagaggctcagagcacctaagagttgctgagtccgtattccttttttcccctgtggctttttatatacgctgctcgcctgagatttctggatttgatttcagggaggtgaaatgttagacccctgagtctcagtgccagtttcccaggacgagtcaaaaactgcagctgcttggaggtgagaatcttccaaggctccagaggccagctcgctgtcctgttcatttgctgacatgctgccgggagcagcttcagagaaacccgttctattcttcgggtgattcagccagtctcaaaataaataggtagctgagtgcagggagaaagaactggaaaccactgaaatttgagtcttgagggctggtctgttctcgggagctgctctgttgaactctaaaaggaatcttgagccctgggcgagggagtggcctgacctggtggaaagactgcgggcctgcccgtggagtctatgtctggccctgcctagctcagtcaatctcagcagctcatgtctcctcttagaccctcagattcctcatctacagaaggagaaagaagaggagattgaatgatttttaaggtctttatcagcttccaaaagtttgatttgatggttgtaggagcaattgttctttcaaagcaccatcttctaacccctgggatg

SEQ ID NO: 181718 - DNA, 815 bp, Homo Sapiens
cacgtatcagactctgggaaaacatcagacccacttctagctattactgaaataaatgattagaaagttacgttggtgagccgaagttaaacctaaagctatcccctggatctttctagcaataaacccatgttgaacctaccatgaaaactttcattcactgtgcttttggttacgttgcctcctgattagtcattaattttaatgaggttttttccttgtgttgagtatgaatagaccttacagtttgaggatctctagaattccctgaattattggaaagacattcatgactcccagtgtgactagttaagagccccagggagcctgtgaagactagaatctacaagtaacctgcactaagaacgaaattcagtaaaggagactcaagcttagctcctggccatcttaaagggctaatgtatgtctttcacaggtttgttcaacatttcagtaattcacagtatagccaagagcatgagtataagtctcttgaaaaagccagttatttggagctttttaaattataaactttgaaaaagtcacccacgttctcacactatatagatgactttgtatctattttactattttctcatttaaccatactagcaaataaggaaaaaggctattaaatgactcccctgatgctggaagctgacaaagcttttatgcaatttagcctgtaactaaaaattcacctgtatcaattcattctgactcctgcaatatgaatagctcattataaagaagggccttctgattccccctgcctcccaaattaaataaaaaggaacagtcatttgttttcatgg

SEQ ID NO: 181719 - DNA, 1756 bp, Homo Sapiens
ttggggcatcttcactgctgtacatccttttgaaatcccagagatcttcagtctccctgtggattaaggagatgtgcagtatttaaagtggcttcaggaaggcatggaagaggactgagtggggaaagctttttgtgcatgctgctggctacctccagcggctgcctccagcctccatcagctgcactctggggaagaggaggctgccttctacctcccagcatctctggatttcatgttcctgtcagcacagaggagctaaatggcctgtagaggctgaaggtctgaggctcctaaagctggaagaaaaggctgggccagtcaggccaagcaagaacacagtgtaacttgtctctgagtgcttcatggttaagggggctaagcaggcacaagggcatgaggatggttatatgtacagactgaggggaagaagcagtgaagatgagacttgccatcttcttgagtcagtaggcctgcctcaggtgcctaggatgtaattgctctgctgcttctcatggggaggagtggccctcatgaccttgtttacctggaagagtgtgggatgaatgcctcctcctatggggactcgcaagtgctttagcaaaaggataaattgctaattgtggcatttcgtggatcagcaggattatttctccttgctaaagaggattttgttggctgaattctgaggaggtgggactaggaatgggctccatgagcctgtgtatgactcagggaatattaggactttggcacagcctcatgggttgggagtaagtcttggctcttccctagcctgaatgacagacatcagatcattctggtgctttgtccatgaagatgtagattctgagcccacccaactaatcttttcacttgagcacagaaacagccccgggaatcggacagacccgtgtctttcaggtttgcttcacagagccccaggggttgacaataggtgccttggagactgcctgcatggggatttttaaaaagctttctttgttaaaggtttgtaaaccactcctctgagcctgttttcattttatagattattcagggaactgaactgcacagagatccagaaagtgggtagtgcaggatgtagtgctgataactactgtactacttggatctttgtgctcccaaataccaaatggaagaggatctctgagagtcctttgcaaagatcttgtagggactttaggctggggccttcggaaaattccagaggattccaatggagattttgagggactgactcagaagaacaaagagaatgataatggtgatgtccctgctttttacaacagatcatgttctgatatatatgcaaatctgtgtaaagtaaaccctacctaaaatgtactggggacccaagatggactgcctgtattgcttccaggataaagtccaatttctagctctggtttttataaccttgcttcagctcaccttttccgtcatcatcccctccatctcctctcccacgctgggaaatggatggctgcactatactgtgtgatgttattgctatgttcatgccatcccctctgcctggaatgcccttctgcatgaatgcctgtgaaatgttgttgctcctttgtatggcctggcttccgtggttggcaagaatctcttctttcgtggtattcctgtcatctttgtgcatcacagtcagctttgtattcctagcttgtaagctacttgaggataggggcatgtctgaatctaatttaatctcttgcacctgttt

SEQ ID NO: 181720 - DNA, 946 bp, Homo Sapiens
ttggatttcccttctctggctaccatacctccttctcctatatgataccattcactactttgttcaattatccagtctagacctgcatcttgaggccacacccagccttctcactccccacacccctctttcctctctcactgctccttcctggtctcttctcatctggccccacctctaaggagtcctcctgccttctgggttgccctggaaaacagactatcccccctcctagtgaagggagtgggtaggggtttcagccccaccctcaggaagatgcgtcttccctgtcctctgctctgtggtacttcctctctggctgatttagcaaacagcacctagacctggggccaggcctttggcagtgggacagatccagggataggctacaccaccctgccctgaccctgggattggcatcagcttccaaccagttcctgccaaagcttgtaagtaagtttcctgggagcggccgtggttgtggtggtggtgggacagtgtgcagccatgaaagaaggtgcaaaggaatctccaaagaaagcctgaccagcgtaaaaagttgggaggctttgtccttgtcacttgtccactaaactcctcccctccctgttattcctggttgaccctgggcatctctggggacagtaggcaggtgattgggaaagttaatgggattgaggggctgagggcctggcagggggcaaaaagactggcctttcaaggggtgcagcattggtaggaactctgtttggttctgggctttaaggtctcctaaggggaggagactgaaaaggtctggaaatgctgctgctgctgtggtcactgtatattttgcaattgggtctgtggacaggaaggggccgcatgacccagttaggaaactagtctttgtactcaacagatccctttaagttgtcagtctgcagcgatgggggcagtatatttc

SEQ ID NO: 181721 - DNA, 1583 bp, Homo Sapiens
acataaaacgtggtgtcattagaatttgacatcagacctacagttagcctatttttaacaatttagccatattgcttcttgcatatccagacttaagatgtgtgtgtgattaagttgagaaacagattctcagacaggtatataagtctttctgataactgtttctagctgcccagaggcctttttttggttggttaatattatactgatttggttacattctggtaaaacccgatacctcagtacttcaggtatgaagtatgagttacttcagttgtatttgttttatctcctagaggtctgaagggtttgaactaaatacagtgtttacagtagccctcttaacctataggacataagttttcatgggattggctcaaaatgaatgaaaccctgtggatgtgtaattttctggagagtacccagagtttttctaggattttcacagaggtctgttactcatcaaaggccaagaccacgaattacctcatccttattgttcttttggtcagcgagctagccctaaatgttttacttattattttataggaatcatttcatgtgtttatctccagccatttaagctgtacttcaaaagcacaatgaaaataatgtgtacttagtgatgaaatatacacaagatgaacaaagactacaaggggctttcttgtggtaatgaaattagagaaatgaaccagttcatctccaatgtcctttccagcttccaaatgttattaattgttatccctactgtttggaaaagtagacattttcccacagtaaaattttgcagaattgagttttgaagtatcattaataatccaagaaccagatagaaaagttaagggttactgcaagtgctaccaattactactcaaacgttcataatttcaagcagttcctttatcaaattcaaatgttaatttctgatatgatttagaaaaacgatttctgatatttttacaagtgattgtatttgtactaaaagctcttttttgttatatatgtttaaagaaaaaatttttaaattcttcaatagggaagtttggttggcttagtggattatccagatgatgaagaggaagatgaagaagaagaatcgtcccccaggaaaacacctcgtcttggctcataaaatatttattaggggaccctcaacatgtggtcttacaatgctgcaactgttcagtgagctgaaaatctgaatcagaaagctttctcaattgaacttataaaatatacaaggagtagcaaaagacagtatatcagctaagagagtttagttctaataaaaatcaggcttcccaggaacttgattgcttgctagtaattaagggggtttgccttttaagctgtcaaaacaaacattagtaaccagaacctgggagatagcttctcagcaaggaaaagtcacaggtttggggacggtttacgggaggggaaaaggttgatataataatgcaagttgctcctcggggtgtcgatctagaacaattttacagaacttcagtttgtaaactcaataacattacttggtataatggtgctgggccatgttgttggtttaatcatttgcctctttt

SEQ ID NO: 181722 - DNA, 1655 bp, Homo Sapiens
  misc_feature (1350)..(1360): n is a, c, g, or t
ttggcttctggtctcaagcgctggaggatttggaaacctgcggacagtcaggaattctgagagaactggaggcaacaatcatgtcggggagcacgatgagtttgaatcatgaggctccaacacctcgcagtcagctggggcgacaggccagcttccaggagcgcagcagctcgcggccgcactacagccaaacaactcggagcaacaccctgccttcagatgtgggtaggaagtcagtaaccctgagaaaaatgaaacaagaaataaaggagatcatgtctccaactcctgtggagctgcacaaggtgaccttgtacaaggactctgacatggaggactttgggttcagtgtagcagatggcttactggagaaaggagtgtatgtcaaaaatattcgcccagctgggccaggagatcttggtggcttaaagccctatgacaggctcttacaggtgaatcatgtccgaaccagagactttgactgctgccttgttgtgcccctcatagcagaatccgggaataagctggacctggttattagtagaaacccactggcttcacagaagtctatagaccaacagagtctaccaggagattggagtgaacagaacagtgcttttttccagcagcctagccacggtggtaatttggagacacgagaacccactaatacattatagcaacgctttttataaagcaggacaaaagacaatatctacatggtgctaaaaatcctttaagatttctgtgacctttgaagcacagataatcaatcaacgtggcattaactgcaagcacaggggtcttttaaatctctctcatggctcatgttcacttcccttttcaagttgaagaggtttcttttttggtgaccactatggtatatggtgggcaatgccctgccagtcccaacggtagagaaaaataggccgtcccccacaactctacaattaacatcagaggaaattttttacaagttcatcttactatcactttttaaaaagagaaacatctgtttgaaaatattctctgtgatgatttccttaattcactttgaaatcagtttcttactatgaagtcattaatgtaagaacttggccaacaaagcttttcttctcataggctggctctactaggggaactagtgtttggtaaactgctgggactaccacaatgggaggggtacaggtataaaattaagttatcttaaaatgtttcagcaatgatgcacgtaggagaccataataggtggtggtaaatgttttgcccacgtataggaatgattttaactaagatgtatgctattccctatgcaacaaattatcaaacaggatatgtcttgtgacctgnnnnnnnnnnnaaggacacatttttaatagctgaaaatctctgataatgaattagagtgtgtagtaaacatgagaattagttatattatcttatttttaaaattcaagactaagaacttcagagaatgaagagtctattaaaatgaggttcatcttaatgataggcaaccaaactcatactgcttgacatgtttgaaactggtaatattgagggtgtacagcacatgtacttaaaaatgacactggactatcttttgctctgagccatgccacttaccgaaattgtaaatacatttttcacaaatg

SEQ ID NO: 181723 - DNA, 1463 bp, Homo Sapiens
ttggctctgtccccagttccgccatttgtgaggccagaggtttccggactgttggcctcgccaggcagccgtctcccgccccaggcggcatcccccagtccctcccgcctccacgagagcctggagctctcagcctcgcccggggctccactctctcctccggctccctgggctgttttgctctaacgatcttgccagatccctccctctgtagacaaccaccaacctctgtttgctgttgaattctctcctcacattacccaggtctgctcaagacatgattttggttttggtttctgagggttctagtgggcagaaggttggagggacacttatgagggtggccgggggtctgacgctgcactttggaaaaactcacacagttgaatttccaaagaaatctgccctttgccctctttgcacctttgatacattctggaagttttctcaggctttggacacttctggggatggaggtgtggagaagtggggagttccctctcttcatagtaaataactctgaaatatgtgaatgtgaatggccggagaatctggccaaggatggggcccaaaagggtggttctaattgtttgcttctgatgttgagtctttagctgaccccacaggcaggtttccaaggtgcaaagagatctttcccgagtcagcggccccatcctcatcctccctccctttacttcctcactgtgcagtctccctcaaggatctactgtgaaaggtgtgtttgtagtgatatccaacctaactcagtaacgaagtcgttacttagctcttagctgtgaaataactctggaaacttccccaccccaaccataaattcttacttataaagaaacaggtccccaaactggaaacagcttagtccaggcctcagcgagaaggaaggacaccatgactgctccatgctgggcacagccgggcagtcttgccaagtgcctgctggaggctgtgccggcaagaggcctgcagcaaggagattcccttccctcgggccattatcaatactgtctttatctggaggtggggaagcgcagccctctgagacagcaggacaatggtcagttcagagagggtgagggcagcaaacgcttcagaggacacagaagccagaggaccctccctccgccccacagctgggtcagcctggaaaatccatctattagggactttttggcagccagatggcagcaatagcccattaggtctcatcccgagttccaagtcttggctgcaaatgagcctcagttcgccttactggagagcacctccagattcctgggcacagttcatttccagctctttctagatctgatcttttaggggaaagacagcttaaaatgttcttttcattttaaagaaaattatttctgtctgcttaagttggaggctacttactctttcacctgacattttctttccttttattcttccagatcaggaatgaa

SEQ ID NO: 181724 - DNA, 1121 bp, Homo Sapiens
ttggattaaccagcactgtgttcattttcataccctttactttgtccctggcaatgtttcttctcctcatcttctccatgtggaaacatcgcaagaagatgcagcacactgtcaaaatatccggagacgccagcaccaaagcccacagaggagttaaaagtgtgatcactttcttcctactctatgccattttctctctgtcttttttcatatcagtttggacctctgaaaggttggaggaaaatctaattattctttcccaggtgatgggaatggcttatccttcatgtcactcatgtgttctgattcttggaaacaagaagctgaaacaggcctctctgtcagtgctactgtggctgaggtacatgttcaaagatggggagccctcaggtcacaaagaatttagagaatcatcttgaatatattagaaaaaaaatagctcctaagaaattcttgtatgttatataaatttatacttccttaagattctttcattgtgtataactttgtgaattttacaaagatatgcttggaatcaacaccatccaaacatatcacaaattaggatatatgaaagtatgtatattaccatacagagaagaatgcgaatactataaagagttcttatacaaacagataatatagattttgtatcaatcattcaccttttttgagatttttaaatgagaaaacctataatgtataaaatacatgtgtgtatgtatgtatgtgacacagttactaaaaataggcttcttaaacttacatctcaatctggtagataaagtacataaaagaatatggaattttagtacctatattaagtgtttttaatttttgtataatatttagtacctgattagcgtgtatgcaaaaaagtaatttgcttcgtttgttgaattagaagccagctgccttactaaactaccacatttgctttgctcattctcttggctttgcagatagaaaattatatcatctgcatatagtgacttataatgattattttacttctccattttactacttgtaattcttttttggtatcagttgtataatgaatggtttgaacattcaaagtgttaagtaatcctgatcgtaactgctgtctttgcaatgga

SEQ ID NO: 181725 - DNA, 1104 bp, Homo Sapiens
  misc_feature (662)..(710): n is a, c, g, or t
tttgtacaaaaaagttggcaattatttgccttttttcacctatcagattaacagattatatgtgttaacaaggtggggagaatttacaactcctgatatgttaaaatctttcaggaaggtagtagaaaatatatgtaagatggaaattagcacttttgaccaacaattttagttttagatatttacctataaggatataataggaggtgttcaaagatgcatgtaactcaatgtagtattaattataattgtaaaatagtaaataacatttttgtcaaatcataatgttaggaaaattagtgatggcacatttaaccaattgaattatattctttttctgaataccgtgatgcatgttcaaattaattgatacaaaaatccaacaactttagcagtttgtttaccagttattgagtaccaactgtgttcaacattgttatttcactcatatgaaatgataaatgtatgtgcgtgttatgatacggtcaataaaaccacttttataggaagaatactcacaaaatacagcgagttctggtcattattttattgttgcatttgtgtgtttgtgtgttttgaatacatacatgtatttcaattaactatagcatttattgaatttttatcacatgtaccagatggggagatcaacactttacatnnnnnnnnnnnnnnnnnnnnnnnnnnnnnnnnnnnnnnnnnnnnnnnnncttattattataataacagatggaataacgaatttgtctttttaaaagataagtaaattgaggttgagtttgaattttgtaattcattctattatatagaagttaaataaacctatcctaggatgtcacaacctttggataataataattaaaaatacttatgatttattaaacccattgagcaaaatcatgttttgtgaaagaacccacatttcagaagtcatattcattcttcttttgtctttaacgccagagacatgataattattaagtgcagcttctcacgacagaaagtgtaagtgttggtatattgtacgaacaggagaaaaacatgaataggaacttgtcttttggaaattcttacagtataaacctttaagagttacttctagaa

SEQ ID NO: 181726 - DNA, 1317 bp, Homo Sapiens
  misc_feature (959)..(1083): n is a, c, g, or t
aagttcaaagttaacaataggatcttgaagaagctttcacatactgcaataaatatactccacaatcactgctattgtcctgtttaggaactttagggcatagatccaccatgtttgttttgctgaattgacgatgagtttttagtttaacttcccactctacctctaaatactctcgtaaattctgaactgtgttttgtacagaagcagctttcaaggagtctagtataagaatacatggccttttacacattttctttggtactgacatattcgactcggtactttgggaatcctctgcactcaaagacagtgtcgaagtagtacgtagatcattatctattgttttgttgtcattttgggactgctgagcctgggactgctgggatacagtttgtggaaaatcttcatacacagcttcttctaaccatggaaaacaaatgactgcgagataccagtgagacgactcatttacaggtacaaagatgtaatctttattaaaaatgtttatgtgacgagtccatgttcttactcttttatgtcttctctgtgccattctgagagtatgaaagacagatttgatatataaaaattttttcatttaagatagggacttcaagagccatttttatatattgaaatattttaaatttagtttaaccatcttctttaagatatatcatatttaacacattataaatatatctccttatagtaacccctggttattcttaaatttaataactataaacaataatgaaatggacagaataaaggcagcaatttattaaatgcttttcagattccaaaactggctgtgcaacttagtataaacacagttaaatctacttattttgcttagctccatctgggcatgatataaaatactgtcattaaaccttaacagaattctccaactgttatatctgtcattagggaggttttaaaactcaatgggnnnnnnnnnnnnnnnnnnnnnnnnnnnnnnnnnnnnnnnnnnnnnnnnnnnnnnnnnnnnnnnnnnnnnnnnnnnnnnnnnnnnnnnnnnnnnnnnnnnnnnnnnnnnnnnnnnnnnnnnnnnnnaagaaaattagccagggtggtgacacacaccaataatcagtcccagctacttgggggattgcttaatctcaggagtttgaggctgtgatcacaccactgcactctggcctcagtaacaagggaagaccctatctctaaaaaataaattaatcagttaacttaatttaattaaaaatcttaatggaggaggaaaaatgaggcttttattctcagattctttaaaataaaatccaa

SEQ ID NO: 181727 - DNA, 1563 bp, Homo Sapiens
  misc_feature (230)..(246): n is a, c, g, or t
  misc_feature (1146)..(1166): n is a, c, g, or t
ttggatttaatttgcttatataaagcactatagccatgttttccaaaaagtataaaaatatacacttacctttcattcagtgaaatataggaagtgctgaattacaatgtgaagttaatgacttctgtttacaaatgagacactctaacgagttttcagtctctctgtatgcctttgctatttaggggtccaccccaagaaagccaaatacaacataaaccgtcctgacnnnnnnnnnnnnnnnnntctttttttaactaataattctctatcaaaatgcttcatatcatcatctcaaatttactttttaaaataattgactttgtattttagaagttttagatttacagaaaaattgcaaagatagtacagagagttcccatctacccctgttactaacatcttacgttactatggtacatctgccccaattagtgaaccaatattgatattccatactttattcagattttcttagttttctcctaatatccattttccacatcaagatcctattcagaataccacactatattgagttggaatgtctccttaggctcctcttgcctgtgacagtttcttagactttccttatttttgatgacattgacagctttgaagagtactgtcagataaattgtagcatgctcctctcttggagtttgttgggtatttttttcatgattagactgggattgtgggttttgaggagatgattacagaagtaaagtgccattttcatcaggtcatatcaagggtacgtactgtcaacatgatttgtgaatgctgacagggaccttgataacctggctgaggtagcgtttgtcactctaaagttcttcctgccctttccatgctgtcatttttggaaggaagtcactacatgcaggagtgaggagtcataattccccttctttagggcagagaagtatctacataaataactgggaattctgtatagaaaatttgtttcttctttctcaaattcactgttgagctttggaattcatctgagaaggaatcatgtactaattacttcatgatagactagattaccaggcacaatcagggaaaaaagcagtgatagtatggttaaattgttattagcattttcagtatatccactttatacatccccaatcatgnnnnnnnnnnnnnnnnnnnnnagaaaagatgttcaagaaatcattaaagaaccccaataagactatattctaaatatttattgaaagaatataatttcagctaaaatcctagaagagggtttgaaataatttaaagaaaatgaccaagtttttttaaaacctacgtttcaaaatctaaatggatatgtgttatttgggacacttattcattatgattatataagaagacaattcttgtttcccttataagtatggactgtatacattaagaaaacaatgtttaatccttattttttaatacagaagtctcaaggttcttgtcaaattttgcctttataagcttattacaaaattacaacttactttactgaagtttataatggaagaagtccatatagcaaaagagctattttaaatc

SEQ ID NO: 181728 - DNA, 1421 bp, Homo Sapiens
  misc_feature (92)..(109): n is a, c, g, or t
  misc_feature (1009)..(1029): n is a, c, g, or t
ttggctctaacgagttttcagtctctctgtatgcctttgctatttaggggtccaccccaagaaagccaaatacaacataaaccgtcctgacnnnnnnnnnnnnnnnnnntctttttttaactaataattctctatcaaaatgcttcatatcatcatctcaaatttactttttaaaataattgactttgtattttagaagttttagatttacagaaaaattgcaaagatagtacagagagttcccatctacccctgttactaacatcttacgttactatggtacatctgccccaattagtgaaccaatattgatattccatactttattcagattttcttagttttctcctaatatccattttccacatcaagatcctattcagaataccacactatattgagttggaatgtctccttaggctcctcttgcctgtgacagtttcttagactttccttatttttgatgacattgacagctttgaagagtactgtcagataaattgtagcatgctcctctcttggagtttgttgggtatttttttcatgattagactgggattgtgggttttgaggagatgatcacagaagtaaagtgccattttcatcaggtcatatcaagggtacgtactgtcaacatgatttgtgaatgctgacagggaccttgataacctggctgaggtagcgtttgtcactctaaagttcttcctgccctttccatgctgtcatttttggaaggaagtcactacatgcaggagtgaggagtcataattccccttctttagggcagagaagtatctacataaataactgggaattctgtatagaaaatttgtttcttctttctcaaattcactgttgagctttggaattcatctgagaaggaatcatgtactaattacttcatgatagactagattaccaggcacaatcagggaaaaaagcagtgatagtatggttaaattgttattagcattttcagtatatccactttatacatccccaatcatgnnnnnnnnnnnnnnnnnnnnnagaaaagatgttcaagaaatcattaaagaaccccaataagactatattctaaatatttattgaaagaatataatttcagctaaaatcctagaagagggtttgaaataatttaaagaaaatgaccaagtttttttaaaacctacgtttcaaaatctaaatggatatgtgttatttgggacacttattcattatgattatataagaagacaattcttgtttcccttataagtatggactgtatacattaaggaaaacaatgtttaatccttattttttaatacagaagtctcaaattcttgtcaaattttgcctttataagcttattacaaaattacaacttactttactgaagtttataatggaagaagtccatatagcaaaggagctgtttt

SEQ ID NO: 181729 - DNA, 1132 bp, Homo Sapiens
  misc_feature (236)..(258): n is a, c, g, or t
taagtcaccaactccaaaggggaaatttggctttttggtgagtacttgtgctagagaacagtagaatgcataatctggtcagcttctcttgggacacactgccagtgataacaggtttgaaatatgcagcagttcaatcatcctgctcaccctcaccacaggtggcaaacaggtaggaaaaggccattgcaacgccctgcagcttttctggccgatgatttgcaaggctgtttgcnnnnnnnnnnnnnnnnnnnnnnngtggcgggataaaagccaccataagtgaagagtacgtctgtagatataaaaattgcttgcttttaaatccatataaaattaactatacttgtcaatcaccatatgtatatgctagcttacacacatatatatagacatgagcttaaaagttaacctaaatttttatggctttcaccggagatagaaagctgtagtaagacaaccagcagattccacattaactggttatcataaaatcagtgacaaaaagcctcatgttccatttctatgtaccctcttgctagagacatgctttgggaaaaaacacatagggttgtgtctccctttagtacatctttggtgtagggcaggtgaaagggtctacaatgtgcagctgtctaaaagaacatcttaaagacaacctggctgacctgttgttcttcacgccctctgaaaagcagtaaactacaattccttctgtcaaccatttcctaactacataaaggatcatgatgaatctacgtgacacgccatcccgtcactaaagtcttataacatacatacaaacatcatagcaaaaggaaagaaagaagttggatggggtagaaaaaaatgtctctaagtgcccctaaattaaaatttcaaaaactcctgagatatgagcctccattttgattgtgctcaatgacttaaaatttgatgaaacaaacaagcttacaaagagtcagacttcagacaaaatcatttaacactaagttgagaaatcactctttcgaagcttctgtttcaaacatgttacaaactataatctagaatcagaaattatgaatctcaaaattcttttcaataaaaccaagacttcagattcctgctaggtacccaaaagagcagccaa

SEQ ID NO: 181730 - DNA, 986 bp, Homo Sapiens
actttgtacaaaaaagttggcatttaccatgataggtattcagaaaatgttagctcttttttgattagtatttgttattatttatctgaatattaatcatttgaatatccttccctctctcaccccctagaaatacaagaagaaaataacagattctagtccatctgaggggaggagaggggctaggaaggatggctgtttctgcttgtttagaagagataagcagtggatgtgacattaactgaaagtaaatggaaaattattagggaaaattgtacttgactttgagtccccagatacactaagaaatagtatttattcatctttaaataagaaggtgttctgctttgttaattactattgacatttccatgaaatgaacgtaactgctatcctctctcattttgaaacattgtttttgctcctttatttctacctcttactttcatttttttccttaatacactatgatctgatttctgtcctcacatcactgaacctgctctttttaaagactctaatgggctgatggtagacaaatccaacaaattgttccttttcttttactggacctgtctctggcaatcccttcttaaaagtctcctctgtcttccctgataatattttttcccattttcccaaaatctctttgtacttctccatgtttttaatctactccttaatgttggtgattccccaagttctcttctcattcttaaatctgaggaagtttagtttgcacccatgaattcaattacttactatagaaagtaacatttgtttctttgttcaagtccaaaaatgaactgggctccttttgctcgtcctacaacgtgtctttgtgaattatacagtagtctagtatctacagtcttgtctcctaactctaattggttatttcctattgatttctgaaatttcctgcacatcatctcttccttttcattcctacagctcctcctttggcctgcgccttccatcatttt

SEQ ID NO: 181731 - DNA, 1126 bp, Homo Sapiens
  misc_feature (142)..(150): n is a, c, g, or t
ttgggtctcagcctctcaagtagctgggactacaggtgtgccaccacacctggctaatttttacgttctttatttaaaaatatgctattattactgactatagtcaccctgttgtgcaatcaatagtagatcttattctaannnnnnnnnacccattaactattcccaaccctgactacccttcccagcctctggtaccttccttctactctctgcccatgatttcatttgttttgatttttagatctcacaaataagtgagaacatggcgatgttcgtctttctgtgcttgccttatttcacttaacatagtgatctccagttccatccacgttgtcacagatgactgggtttcattcttttgatagctgttacttaaaagactgctctgcatccaattagcctacttctttccatttactccctcagccgtctggcttttactcatatcacctcattcgaactgccagtaacataattgctaaatccactcctgtcagctttttgtttgaggaaacaaacaggattcctaatcatctgcttagagaagttaatgccatacttttgtgatgccaaattagagaactgagccttaaagcaactaattcattcccctgaccttatttctgggcctcttaggcatgagtcatagaatggacaaggcaagaataagaccctttcagtaaggacctaaaagccttcaaccttctagctgcagaactgctttaatttcactccaatcctagtttgtattttccaggtacagtctttgcccgctgcctgatttttcctctcatcgtgacgggccagcgagaggcagccaggatccacaatcacttgccagagatccagaagttttccagtcgaatcagagaggccaagttagcaggagaccatattgagtattacaaggcttcctcggagatggcactttaccagaaaaaacatggtattaaactctataaacctctcattctccctgtgactcaatgagcaaaaacatttccttcttgtttcatccagtacccatgaaatttcctctctgtgtttcatgtgtcccaggtcccccaaaaacaggtggtggtggattatacatggctttcagtagtgggtgatgaaaatgttc

SEQ ID NO: 181732 - DNA, 1950 bp, Homo Sapiens
  misc_feature (142)..(150): n is a, c, g, or t
ttgggtctcagcctctcaagtagctgggactacaggtgtgccaccacacctggctaatttttacgttctttatttaaaaatatgctattattactgactatagtcaccctgttgtgcaatcaatagtagatcttattctaannnnnnnnnacccattaactattcccaaccctgactacccttcccagcctctggtaccttccttctactctctgcccatgatttcatttgttttgatttttagatctcacaaataagtgagaacatggcgatgttcgtctttctgtgcttgccttatttcacttaacatagtgatctccagttccatccacgttgtcacagatgactgggtttcattcttttgatagctgttacttaaaagactgctctgcatccaattagcctacttctttccatttactccctcagccgtctggcttttactcatatcacctcattcgaactgccagtaacataattgctaaatccactcctgtcagctttttgtttgaggaaacaaacaggattcctaatcatctgcttagagaagttaatgccatacttttgtgatgccaaattagagaactgagccttaaagcaactaattcattcccctgaccttatttctgggcctcttaggcatgagtcatagaatggacaaggcaagaataagaccctttcagtaaggacctaaaagccttcaaccttctagctgcagaactgctttaatttcactccaatcctagtttgtattttccaggtacagtctttgcccgctgcctgatttttcctctcatcgtgacgggccagcgagaggcagccaggatccacaatcacttgccagagatccagaagttttccagtcgaatcagagaggccaagttagcaggagaccatattgagtgtgagtcagttgcagaatgagcgtgggagaagtccacatttgcacttttccttacattctgctgggggaaaggaacaatgtaaatcagaagttgccacagtcgggaaagttctaaaggtttatctgtttcttagacctaatgctcccaaggagtggccagggttggttagaaatttcacaggccaggtagataatgaggatgttcacctccactgatgtaactgttaccccaaccattaatttcccctcacctcacagattacaaggcttcctcggagatggcactttaccagaaaaaacatggtattaaactctataaacctctcattctccctgtgactcaggtgagcaaaaacatttccttccttgtttcatccagtacccatgaaatttcctctctgtgtttcatgtgtcccaggtcccccaaaaaacaggtggtggtggattatacatggctttcagtagtggggtgatgaaaatgttctctctggtaaagcatgctgacactgtttatcttgtgtaataggccccaatcttcatctccttcttcattgctttgagagagatggccaaccttcctgtgcccagcctgcagacaggtggcctctggtggttccaggatctcacggtatccgatcccatctacatattaccactggcagtcactgctacaatgtgggctgttcttgagctaggtgctgagacaggtgtgcaaagttctgaccttcagtggatgagaaatgtcatcagaatgatgcccctgataaccttgcccataaccatgcatttccccacggcagtgtttatgtactggctctcctccaatttgttttccctggtccaagtatcctgtctccggattccagcagtacgcactgtacttaaaatcccccagcgtgttgtacatgacctggacaaattacctccacgggaaggcttcctagagagcttcaaaaaaggctggaaaaatgctgaaatgacgcgtcagctgcgagagcgtgaacaacgcatgcggaatcagttggagctagcagccaggggttctt

SEQ ID NO: 181733 - DNA, 1165 bp, Homo Sapiens
gtgtaattggattgttgtaacttaaaggataaatgcttaagaggatggatatctcattctccataatgtgattatacaccttgcatgcctctatcaaaacatctcatgtagcccataaatatatacactactaggtatccacaaaaattaacaacaacaaaataaataacagccatcaaaggaagaagataggatagtaagtgaaggggaactaaggatgaagggaagaaacttcccccaggtaacacatgggtgtgctgagcatgtttacatgttcagggtagggcagtgaggagggaaatgctgaagacacaggggagaaaagataattgatggagcaacgtggcagaaagacacataattcaaagcagagttctagcctttacaaaagcaatgctagtggcttcccaatttaggggtttaagtgcctgacctgaacctctgttctaaaccaggatagcttcatgactgttaataaggtcccctgactctaaccccatgtttgtattcaaatatctatacttcttgaatcccagatgatctggtggttttataatgctctttaagaaatataggcagagtgcatctaggtatcatgaacctctattgctcatttgaaatcatctgctcttctgaccccagagcttctgcaactacttcctgaatccattcaaagaattgccatctatgaggttaaatccctaacccatgtccagggtatattccccttacatgcagcaatggccccccaccaaggtaggcccagatcaacatgcataaattccagtaaattctggatcagtcccactggggtgtatgaccccagccccagttcagcgaagctctgctctgcagcagtttggactacatctgcagtctctccagaagccacctcaggtactgctgtgggtgagggagttgcagcaacaacaggaggggcctgaacctggacttctgcaaaagagatagcagaggtactgaggctgcgggggccggaagccgcaaggaagaggtagtgtgggcgacagcagcacggggctactgggaataggagccgtgtggtcagcggtttcccaagccattgcgagggccctgcgacgctgtggacccgacgcccggactgtagcaagcgcagaagctcccggcgtccgcacattagtcccaa

SEQ ID NO: 181734 - DNA, 1495 bp, Homo Sapiens
  misc_feature (406)..(453): n is a, c, g, or t
  misc_feature (898)..(945): n is a, c, g, or t
gcacagagctcactgtcaagggctgcccaacgtcttgctttcatggaggtcacagcattccatccatacatcccacttgcactgtgcctcccaacataggctcatgcctcacgccatcataatgttcatactccactatttgaaactattctctgcatgctgaatccagttgttagctagagagggtgggcaaaggggatagaggacataggatggggcagaaggggcccacactactcacttgcaagagctgattcaggtatatgattttctgtggcaagaatctgtagaggaattcctcagcctgtgggttacattgcaagggaggggaatcacagaatatgctcaatgagatgtgtgacaaatggaactggaagggcctttggaaatcactgggtccaagacnnnnnnnnnnnnnnnnnnnnnnnnnnnnnnnnnnnnnnnnnnnnnnnnctggtaaatggcagaacgaaggttaggactgtgatattcctgctttggaagccatggtttttttcctccacatcaaaagacgggagaagtgccagaagtcgggagagtcataagaaaggtcagattaaaggtagctatcaataattccggggttactttgggtgaaggcttggtaagggaagtagggttaagtctagggtgacttgggggggtcattctgagaggctgttatcctcaagtattggtccaagattctgggtcaaatcgctcaaatccagagacttacctcctggaaaagattctgtctgaagacctccacctgtttgcgggcttccccgctcaggcgcaccccacacggcttggccatgctgcttcagtcgctagatctctggtctcccggctagtcgcccgggctttcgctttcactccccaggtccaggcccgnnnnnnnnnnnnnnnnnnnnnnnnnnnnnnnnnnnnnnnnnnnnnnnntggcaggccgcaagcagtaggtagcccctcagccattcccagccagttgccactaggagaggcggtgctggctgggtcacagtccaggggctgcccgagggaggggctagggtaagtgggaccgcggagactggagcgggggctgtccctcggagaggggcggggcttatagctagggccaactggaagtccagggttggggtaagagaggtgggagtatggcaaagggggtattcagtggcggggctcccccaagaaggctcgaccgcaagtagcggacggagagagatcagagcgagtgggaggggcagccagagggagcgcctggggtggagaaggactagcagctcttagaagagagcgggcaggggttgggtgagggtcttccctctgccttcaggacagaccggagatggggcgggactcgctcgagaggggttagggccggccagagtcggttcccctgcagggtgggacttcctcggtgaggcccggagcgtaccggactggtccagctagaaaaagaaaggttttgagctgaataggccaa

SEQ ID NO: 181735 - DNA, 857 bp, Homo Sapiens
ttggtcctccaacctcagcctcctgagcagctagttcttttctagtgtaatatattatcttacggaatatattccattgtctgcatggaccccagttggtttattcacccatctacttagtgacatcttggttatttcaaagctgacatggtaggtattactggtcgccttacaggggaacagcaggacatctgtagtgtgtggtgaacactagagggagcaagaaccccctttctctatcaggtgggtgttacccatttcccagctgcactaatctgtcgttccttgtagaggcctgatctggtgtttgccctgaataagagatgatctggaaaccatttgtgggaaaattaagttagacatccttccattgaaataaaatgcaccgtgcccagccttgcagcaaataattacatgaaaaaataattaatttaaattctggcaagttctttgaatcaaaaccagggagaggtgctctgttctaataacccagctcttgtggatgttattcatgctaaaacttgtaggattttccattgcttgagttctgctgtagtgttattgcttatcagtgtaggatctgtgctctgtggattggtttaaactttactcgtgggacagctggctttgaaaagttttcatcatcccctgcagggactgcactggtctttgttgaggcacatctaatgttgatagctctgtttcctcccagctggggctccaatctgtgaccttgcttagtagtgatgctctgaaaagtctccctatttcttctgagaacagttagatattgggtgtaggcttttgaaataatatgatggcctcactctgtacgggtttttacaaaagccactata

SEQ ID NO: 181736 - DNA, 1495 bp, Homo Sapiens
ttggcaaatttaagtgcatctttctaaagagaaaaatgactagcatagaattccatttctatttttaccttttaataatttcattattcatttattcataaatgaataggttccactcaaattaacacactaatgtggcatctcttcaagtgctgtttatatgtgcttagttcccacatgtttaaccatgttttaagcctgagtattaaccacaggaactcttgtttatgagaatcggaagttaccagatctagaatagatacatggagttcataagtgaatgatctagtatgcttctggggagttaaagtcctggcagtttaaacatttgaatgagactattctttaggcgctttaataccctgaatttcaccggtgatctagacttctctaggctttgcttgaatgatatacaaagccccatcagtgaattagcagaataagtgatcctaatgagcatgctccttctacctttatttctgacatataggctaaatattagtagtaaaaaagtcatctgtgaaaaactctgtgcacataataatactaaggaaataatttttagtgttttactttgagggcttagtattgtgctgatggtccccagtctgtaaacatattttacaagttcatttgcaagtcagctgttattgtaatctgaagattgcttaagtgctagatcagtctgcaaaggcccattgaatcaataacatacctgaactatagcaccaataactatggaaactgtaccccttttatcacaattcttctaccagcaaatgcagtgaaaattccagcttaggatcttggagttttagactagaaggaacctcttagcatttagcagtgattcccaaacatggctgatcagcagattcaactgggtgcctcttagacaattcctgtattctacctcagatctatagtttaagatccctattattaggaactggaaattgtcagccagatattagagtggtgatctaatagcttcttcattttacagataagtgagcggagtcctaaaaatattaaaataactttcttgatgctttggtagttcattattaatactatacatattttatgggaataatataggttccccacccccaactccaaacctaatattagtgactccaaatgttagaataggagggaaaatgagaagcaggaagtggccctagaatttccattaggtgaaaagttataaattgatgggaatggatgatccataggataggtatgattagctgagttggggctatacaaggtgagggttttttggggagagatggcagggaaggaaataagttagggtagaataagaggcaaaacagccattgaatattaaagacaggatagatagtgactgggagttggagaacagagccttcttttcccttatctctattagtggaattgaaaataaaacaggaaaacaatgaaataagttgtgttgttcttttttgctgtgataagaaagatttttttc

SEQ ID NO: 181737 - DNA, 1388 bp, Homo Sapiens
  misc_feature (86)..(98): n is a, c, g, or t
ttatagaagagagagagagccaatttatttaaggaatgaattcaggagcttaatactggaggcttttctacatgtgactctttagnnnnnnnnnnnnnctgctggcaccacctttattgtatgtacattcttataagacctggagtttattgctcttcactcgagctctcccacaacacatgacaataaactgttggaggaggaaaaaagctatcatctcgatgacataattttaatttttaacaagtcctttatttcagtacaacctgattatttgaaggtcagtcttagggtgaaactggaacatgcctggaagaaaagctcctctttccagtcactttttctgtcttatcttggtattttcaatcagttttgcttcactatccaagaatgaattagaattatctcccagcacttcaaacgttgaactcttctgataatgaatgatggtatttaattctttgccatttcaaagaattatttccttcacatcagttttcctaactccacagctattatcaacactttctagttcctgcttcttcaccttggtactataaaatgatttggcaatttacatttgtatgtgatcatggctactcagaaagatgagtatttatagaatgagagtgaaaatcaacaaggaagattttatctcacccagccagtcctttctagtgtttaatagacctcaaagccagacctttaacctactcataaaatttcttctttgatctgttttcattaaaactggaaattaactggtcagtattccacattcataattagcccatccaaaaatcaaggtctgcttattggtacacttgggccttttcttcacatgataatttgtatttagacacacacgcatttatggattccttccaaattttacattttttagtcttcttttttgattaaacttattattccttcttcaagaggaggtatctgtaatgcttggctcaacattgcaaggacagctcctccctcatccacatttacttccgaagtgtctccacaacatgcaatcgtgttgcccacccaaggcatcattcgtgggtcagaaaatgtcgctgtgagagttgcgtgtgcttcagtgtttttccctttgttttcatactgcactttgaaaaggattcaatgacatctaatgaccttaataagaaattttattcttatgggggcccttgacttagggataatttctcttttatatgtttttgatatggcaggctaatgtatcatttgttcttttattccacaaacgcagcaaattctaagcctagggctgagcactcagtctttctcaatcacatacaaactgtgaatgttgctatgacttactgtaaattaattttgtatatgctatattgatttatgaatgg

SEQ ID NO: 181738 - DNA, 1306 bp, Homo Sapiens
  misc_feature (251)..(292): n is a, c, g, or t
  misc_feature (370)..(696): n is a, c, g, or t
ttggatctgtccaattaattaaggataatctccttaatttcaatcacatctgcaaagttcctttcaccatgcaaggtaacatatttacaagttctgggttttaagacctagaagtcattgggacccattactctgtctactggctgctaaagagaaaagaaacaagaaagaaaatagggaaatactataattactgtactgagataaaaaagatttctagaatacatcataaagtaaaaaagaaaaactannnnnnnnnnnnnnnnnnnnnnnnnnnnnnnnnnnnnnnnnnggaaatagggatttagttaccatcattctatggataatcaaaatgctgaaaaaaatagtatttttctagaaggcagtnnnnnnnnnnnnnnnnnnnnnnnnnnnnnnnnnnnnnnnnnnnnnnnnnnnnnnnnnnnnnnnnnnnnnnnnnnnnnnnnnnnnnnnnnnnnnnnnnnnnnnnnnnnnnnnnnnnnnnnnnnnnnnnnnnnnnnnnnnnnnnnnnnnnnnnnnnnnnnnnnnnnnnnnnnnnnnnnnnnnnnnnnnnnnnnnnnnnnnnnnnnnnnnnnnnnnnnnnnnnnnnnnnnnnnnnnnnnnnnnnnnnnnnnnnnnnnnnnnnnnnnnnnnnnnnnnnnnnnnnnnnnnnnnnnnnnnnnnnnnnnnnnnnnnnnnnnnnnnnnnnnnnnngatgttgatagatatgaagaagaaagataaaatagggaagaggaaggatataaagctccaggtgggagatatacagtgttaaatagggtaatctttgaaagcctccctgataaggtaacatttgaacaactaactgaaggggattaagcagccacatggttacctagagaaaaacccctttggacagagagaacaagcggaaaggcccagtggtagacagcctggctggcatgttaatatcagagaacagcacagagactggaatggaatgattgagagaagagtaggaaaagctaagatcagagaggtagctgggagtccaatggagctggggcatgcatgtcactgtaaggactgagtgagataggaagtcactagagagttttgaactcaggagtgacttggtctggcttgtgttagcaaatggactctgactgcctcattgagtgagaaagctgttacagtgatccaagagagaaatgccagtgcattgaacaaagatgggggtggtagaagcagtaaaaaagtgattggactctgaaatatattttgaaagtagagccaacattatttgtcaataggttacatatgggatatgtgaaaaaagaaa

SEQ ID NO: 181739 - DNA, 2141 bp, Homo Sapiens
  misc_feature (88)..(118): n is a, c, g, or t
ttggcttaatgcagttgagaatcccttaatgcagttgagaacagtaaagttcatgaccataccgaaaagcacttttaagttcacttcnnnnnnnnnnnnnnnnnnnnnnnnnnnnnnnaaaagcatatgtaactagtgatgattttagcattagctttacttggaggggagaagaaacaaaattacaccttaaactctattagatagactacaaaatggatttgatgtattcttacttttccaaagaattttttccacctggaataagaagagaggactagttgaaacatttgagctggagaggcttatgggcaatatgaagtgggccaaattcttgcaatacaccctattcaattgaaagtacagtgtctaaggataagaatacttctttaaagaccaacaattgttttaatgcaatcttaattagtaaatggtttacattttttctattgttattggttttaaaatttgctaccctgaattctgaaatattataagagttaataccaaaaatacttttaatgtctgacatctcttacatttcacatggttctttttattcattgtaaataaaagtaaacttggataaatttgagaataaactttgaattgttgcaaactatgattatcaatttgtaaatttaccctttgacataataatgtacatttttaaatgtagccattaaattctctatatttaacctattggtttctctctaaatgtttttaatctcagttgaatgctgggcagtttataattatgtacaaagggtttttttcctattaagattgacatttttgcacatttttggaaatgtttaatttgtacactgatttactactctgaccaataattgttgatgagtgtatgagcatcatgaatgcgtgcattgaactactgtctgtgtctttatgttttaacttctttcaagatgtagccatcagttactgcactgctattactgacttaaatggacctttttgcttttacaaactatacttatctatggttctttgttgaagaactcaggagttcgacattaatagaaattagaaaattttataatgtattataaaatccattactaagttgaaagtatgcttttaactctgtgtatcaggggatgtatgtttgtgtggagatgtttttttctgtctgtaggcacatgtatatatcccagtaagttcttattttcatttcatttctacatttttatgaacttgttttataagggtactgtttagttgtgataattaaatatatataaaagctttctgagagattatttactatatgaatatattttcagctggctgatcaaaagtatttttaaaattttgtttttagccattcaaaatgtatttgtattttcagaattgaatgcaagtcatacttagagctcaattaaaatactcttgcaagaaaaagcattaaattctctttgagaattccgtgaaatgcaaattaagggaaaaataggttttaagcagtagcaaaaacacaccgctaaaaatggcctttgaattctcagagctatggaaaaatgtgagaaactaaattgtctcgagatgtcaagatttttctatctccagttgctattggcctgtcctactgttgtctttgaatatttcctgtattccaccccaaaagatttcaacttttagtttttctatcactgggcaaggtcagactgggtttataaaacaatatattggcatattgtgattctttgtaattgactataaattggttttgaaatgtccaaacatacgttgtgtgtctttatattgtactgtgtgttttaagtaactggcagaaaaagaattggaaatgaaatttccaatcagacaatgtagtattaaagaaaactttgttttaaatatgcggtaccatgtaaaattactcgtgttaggaataaagtccactgttgaagttgaatgtcactaagcttattatgttaaaaggaaccagtgtgattaggaaaacctaccagaagccagatacagtgtggtacgtgcaacatttcatgcacattttgattttgtttgtcattcaaaattgtgcttgtaaaaatgtatacaatttctgagttttataatttctagtacttgttttttcttgctggtaaatagcttttttt

SEQ ID NO: 181740 - DNA, 893 bp, Homo Sapiens
  misc_feature (811)..(820): n is a, c, g, or t
actttgtacaaaaaagttggctctcaaatcaaagtccagaaaattgttgaatgccaagagaatctaaaactcatttaaataaactttttctattggggtataatttatacatgtggaaatgctcaaatgttgaatttttccatgcatatatactcgtacccgttactcagatcaagataaaacgacgtaaagcttttaacaccccagaaatgtctccctcttcctacctctgagtcataccccaaccagaggtaaccactcttgtgaactggatcatcgtagattagttttgtctgctcttgaatttaagatccataaacacacacatttgtttttgcaacttgtttctgttctacatcttgtctgtggtttcatccaccttgttaagtgtagtcatttgctcttattcataactatttcctacagtttttaatcactgttaatgggcacaatgagtttttttccctcaattgttgactatgaagaaagctgctatgaatatttttgtaatgtctttttggggaaatagaagcattcatttatgttgggtatgtaaaggtatatatagaatgtctagttgttcccaaacaattccacttacataaaaagttttggttgcacatgtgtagatagatagatagaaattcttaggaaagtaggaaggaagaaaggaaatattgggatccagctttaaaaattatatcaagattttgcagggcctttctgtgcaccacctccttttctagtttaattgtaacacaaatccaattctgtgatagtaaaacaaatcagatactaaagttaagaatgnnnnnnnnnnttgtaaaaagttggataggaatgaattttacttcttttaaaatacttatatacttttattgtcaaccatttat

SEQ ID NO: 181741 - DNA, 482 bp, Homo Sapiens
  misc_feature (65)..(86): n is a, c, g, or t
  misc_feature (163)..(361): n is a, c, g, or t
ctcagcatgtggattattctcaaggatagaccacatgttaggtcacacaaatctgaaagtattcnnnnnnnnnnnnnnnnnnnnnnggaaagcattgaagtgatatcaggcatctctggccacaacagactaaaattagaaatcagtaacaaggaattttggnnnnnnnnnnnnnnnnnnnnnnnnnnnnnnnnnnnnnnnnnnnnnnnnnnnnnnnnnnnnnnnnnnnnnnnnnnnnnnnnnnnnnnnnnnnnnnnnnnnnnnnnnnnnnnnnnnnnnnnnnnnnnnnnnnnnnnnnnnnnnnnnnnnnnnnnnnnnnnnnnnnnnnnnnnnnnnnnnnnnnnnnnnnnnnnnnnnnnnncaccctagcaatgtattttaaagaattagaaaagcaagaataaaccaaacccaaattagtagaagaaaaagcaataatgaaagatcagggcagatacaagttaaactgaaaataaaacaac

SEQ ID NO: 181742 - DNA, 1561 bp, Homo Sapiens
ttggtgaggatgaaataaagacagaaagcaagggaactacatgcttctggacacgtgttctatagacttgctctaactagtgttaaagactactcatttttttcctcacatgataagaacattcatattagactatttggtttactgttctaggtaatgattttttaaaagattgggttaagatgaaattattttcttacaaaaggatttaatttgcttttcaaattctgctctgaagctcaagattaaatcatgtcccaaatgactgagctttcattgctatagaaaagcatttggctatttcagtaagtttccgcctccacatcttaagtctcttgatttttcagaaaaggtcaggggagtggatataagcgtgaagggagggagattttcttaaaattggacccaggctcaagtgaaactgtgattaggtaatcccagaagatacataattctggggaaaaaaaactctgaagagggtttaagtttgggattcatgagacttagaaaaagggtatgcttagaataaaggtagaatttgtgtgccaaactttgatgaagttacaatgaagacattaaatgcagctttaagtgcttgtcaccgtgattccaagctacaggttatattgcagtgtttcagctactggcctgattaggagatatattttctttccctcttgggaacagtctctgtgtcttaatgatgatgctgattttctggtttaatatcataaaaggtgtgtgttggtcccaacattactgctccaagtagtggcttcaaagagcaactggataaagattttcaataatagcaatgcagagatgacctgggtttcaagataggaggcctttggagccttcagagaattgtcatagaaatgatcagtaactaattgctcagttgccacctcaagttgttgtttccatcttatgcgggagagattcgggggaaatggcaccctgccattttttgtgtgtggtcctgaatcatcctgttggtaaaactcctgaggtcgtctgagctggagttctgattgcttctgtttctctcatagttgcttccccgtctattctgtcagcgtctgtatggggagaggcagtggggagggcgatctcgtccccttgaagtcaatgaccacctgcttttaaggttctcgtatcttttgctctgaaaaaggtgtgggggaggaaaactttcattttccagcgaaagtagaaagggagagagtgtctagaggaataaacggccaagaaacaggtaagttctgaatgtggtcctagtgtggaatttaccagaaagctcacatggagattaccactgccctcaaaggattgcaggtaaactagcaactgtgggaagtggaggctcctcctctccttttgtaattcaaatgttcctagtgtactgcaatagacactagtttgaatgaattcaagatatcatctcttggtaaaaccaaaagtaaactgattacaaaaggcacaaacccttcaaccatactcccactctctgcctttcctctactttctgtgtggtttaagtacacctgaaaaaacaaaa

SEQ ID NO: 181743 - DNA, 1112 bp, Homo Sapiens
  misc_feature (435)..(444): n is a, c, g, or t
cccattgacaaaggcttcatagtcttaacactggggctcaaattacagttatacctggagatcccactaaatctaaacattgtacccctataatctttttaaaaaggcaaactaaatataaaatggggggtggatgggtaagggtatgcttcactttaactgtagccctgtctaaatttccctgtggtcatagtacccaacgcccctaatatcccatattgaacacagacactctaataaaacaaataataaattaaaattaaagtcagtctttggcagttataaactagcttgataaaatgatgccccatggacctccagttaaaacagttaatatgaggtattcaaggattaaaacttactaattaataaaggggtgattatacccttgtttctccattgaacagcccaatctttcctatccttaaacctggnnnnnnnnnngtgtgcctcatggtggattactacaaccttattgctgcagtcccatccattacccaatttccattattattaaaattattaattctacacaataaataactggccaatattttgctcttacagatttggctaacatgtcccattaagtgtctacttgcacagcttcttggctgccgtttgccttctgccctgaggggcacatacacctttgcaggccacccacagggagctccacggctttgccatggcacacaatgtctgcagacagggtcttcaccacatccgccttctccaggagcacaaatgaggaaactcattgtcacactcattaaggacatacaagtccaacatctttagatactttcgaggttctgatggcaatgtagtcctcatttacaaattttacttaatcttcttgctgctgcttacaaatcagcttgctttaaatggggcaccctccataaacaacctctataatcaaaccttaaaatccatgggcactcctgttggtgccctcagagaccccttcattatagaagctctggcaagctctatgcagccctggagtctctggcccacttaggatggacataaggtgcctaagggctttggatgcaagaaactatccctctcagcctcatgctaccctattaaagcagtaaatccaa

SEQ ID NO: 181744 - DNA, 1069 bp, Homo Sapiens
  misc_feature (110)..(133): n is a, c, g, or t
  misc_feature (809)..(829): n is a, c, g, or t
  misc_feature (876)..(896): n is a, c, g, or t
ttgggtacctgctatcccttcctgatgtgaagaaattgtgaacaagataagatcagtgttgccattgaacataaattctagtgagggtgatcagtaaagaaacattaaannnnnnnnnnnnnnnnnnnnnnnnaattgatatatgatagatgtacatattttggggtacatgtgataatttgatacatgcatataatcaaatcagggtacttgggaacccttaaatatttatctttatgctaagaacatgcaagttactctcttttagctattttgaaatgtacagtcaattagtgttaactaaagtcactctaagggttacacatttagatgctaaattcagttttgggatttaagtgggtagttatttaaagtaggtagcatactgccaggcatgtagtagaggctaatgaagtcatagctccagtctgtttctccctactagatagtagtacataaataagatacagaaaatatgggcagatttcaaggtgagctgtaactatgatgaatatgaagaaagtgtagaggacagggattgtttggtgtagaaaacaaagtttagagacttcctttgaagattttaacttatatgaaggacagtgattattaattttctcctccactgagggggaattaagggaaattatttattaaaaacctttaattatggaaaatttcaaacatatatgaagtaaacagaatagtataatgaactcccatgtacccatcacttaatgtcaacaattaatactttgccatttcttgtttgagtggtacctctgtttactcccctacctccactagannnnnnnnnnnnnnnnnnnnngggtaagatttatatacattgtaatggacaaaacttaactgcttgannnnnnnnnnnnnnnnnnnnngagaccgagtctcgctctgttgcccaggctgaagtgcagtgacatgatctcagctcaccgcaacctccacctcccgggttcaagcaagtcatatgccttagcctcccaagaagctgagacgacaggcatatgccaccttgcctggctatttttgtgtttctagtattttgtat

SEQ ID NO: 181745 - DNA, 660 bp, Homo Sapiens
gtgtgagccaccgcacccggcctggcattgcatgttgatactggttctcctcttacttcctctgctgcctcctctattcctggtccttctgttagatacttgttcagaggatttctaatgtacctaatctgtcaactctgggcctttacaaaggtgagtaagggagcaatgatacctctgaactactgtggaagagaagtgcttcataatgaactgagaaaatccacataaaattccttagaaaaagttaaaacgcatacaaatgcaagatgtaatagtattaggcctaggaagctggctgtaatattcccataagctctaaccacaccagctttgggtgaatcatgctaaaagctggaggttaataactgagctaataaaactgggaaattggagtatgcgaccatgggctgatatctaggaggggttgcagttttgagattgactgttctaactagaatcctttgaaatttagaaggtagtctggtcgtctggctcctgaagaagacgaccagtagggaagaggtattctgcggctatgactggtatgagaacattgaagcctactgggatggggcagtatcttagagggaatgatagactccaccgatttcgaatagagatatgactggtgaatttctagggatcgccatacctcct

SEQ ID NO: 181746 - DNA, 1338 bp, Homo Sapiens
  misc_feature (416)..(469): n is a, c, g, or t
  misc_feature (548)..(615): n is a, c, g, or t
gtttaacatacacttattatatgactcagcaattctactcctggcaattttccaagagaaataaggatatgtcaacaaaaagatttgtacccaaatgcccatgacagtttcatttgtaatagatccaaattgtcaataatccaaatggctattgacaggataatgaataataaaactgtgacatatccatacaatgggacactacatgacaatataaaagaacaaaagacttatatacacaacaccatggataaatctggaaaacattatgctgaaagaagacaacacaaaacaatacattctatattattctgtttgcatgaaattctatgccagacaaaattaatttatagtgacaaaaagatcagtacggggtgtattgactgcaaagaggtgcagggaaattttcatggtannnnnnnnnnnnnnnnnnnnnnnnnnnnnnnnnnnnnnnnnnnnnnnnnnnnnncaaaactcattgaactatttgcttataatgattaggtatcaataaatttaatttttgctgggcaatggtggcttacacnnnnnnnnnnnnnnnnnnnnnnnnnnnnnnnnnnnnnnnnnnnnnnnnnnnnnnnnnnnnnnnnnnnnacaaaaatgttttatgtatggagatagaggacagctagaagagatagagaggaaaacaaaaaattccaattcaatatgctgtgttgtgcctaagaaacttttgacatattaactctcagatatccaatttaagttttaaaagactttgtattgataaagcaatgcagtttatgtgaaccaagcaaaatgtagcacctcaaagatgactcattcctcaatctgtgtttgttttttattacaaaactaaaagcacaaatgtgagtgactcagaatataaggtttttattcacagatgacctgatcatgtatgtagaaaatcctaaagaattcacacaaaaaaagctactaaagcattgtgcatttggctaggtcacaggatacaaggtcattatatcaaaatcaattgtatttttacatactggccataaacatttggaaactggaagttaaatataaatacatgaaataacatgaaacattttaggataaacttaacaaagtatgtgcaagacctaaacactaaaaaatatttctgaaaatattaaagaagatctaaataaatggagagatatcccatgttcatggattggaaaactcaatatcattaagatgtcagttctccctaaaatgatctatagattcaatgcaatcccaatcaaaatctgaacaggcattcttgtaggaattgactagtgaattataaaatttatgtgaaaatgccaa

SEQ ID NO: 181747 - DNA, 1246 bp, Homo Sapiens
ttggcatttttgcaaagcgtaacgttgaagagggcccaggtcacttagtgcaatgtatttataatcttggccacacgtgtctggcgtagacacctgaagttcctcggttctccgccttggtgggtcttctctcctgcgggcacagtgcagatgcagatgagtttcagagctggtcaaaagtaattccatcacctgtaggatgcagaactgctcattctgcaccctttgctagtgccctgtgtgggtggcctcccctgcccctccccatcccttagggcaggtgttatcagccctgttggagaggaggcagctgaaggccacaggggccgcgtgctctgtatcagtcacatgtcacatctgtcaggctccagagcccatgttcttttcactagaatctgtttcactagaatcttttcactgggcatctgtttatcactgagtcagcaaactagacttcttcctgcttccttgcaagcgaatccccacatactcggcaggcaagggccttcccagaagcccgtgtggagagtggttccctgaagggcagtgtctggggctgcttttgacttggttctcagaggcctcacaggtgcatctgaaatgctccttctgagacagtttggtgaccaggccagtatcttttgtctttcttgcaaaccctgtttgatttccctttttgtattcagaagaaaagtcctgatcttgtagcctgtttggagtctgtgatagaaacagagcagaaggcttttaaaatgcatcttcagacagtgaggtgtgtcctgatgcaggattaaccttgaactccggaggcagaagagccaggaaggagcactgagctggagctctcttgcatttggggcttgccgcctcccagctctgcgtttctgcaagctgatggccaggagccaagctacgctgaggggctgtgggggcagtgagcgtgccacccacacagagggactgagcggaagacgcacaccgctcccttgtcgtgtggcacagctgtgtcactgctcttctaaacgtggagaaagccccttaaactccaaatggccaaaggctttgcagtccttggtttcacatccgtggcaccttgggtggagttgcttctgtaagccaacagatgagcaggtgaggagcacagcgcggacctcagagctctctgcaggacgctcttagcctcgcttgcatatgctctcagaccgggctgcagaggggcttctcacgcctcatagcacgggttcct

SEQ ID NO: 181748 - DNA, 1516 bp, Homo Sapiens
  misc_feature (538)..(591): n is a, c, g, or t
  misc_feature (616)..(665): n is a, c, g, or t
  misc_feature (730)..(853): n is a, c, g, or t
ttgggccttgtagatctttcttttgtatgtctgcatgattttctacagtgtggatgtaccataatttatttaacctggctgatattggtggacattaaagttatttaaaatttttcactattgtaaacagttctggaataagtaaatatccttgtagaagtctagttacttccttatgataaatttatcaaaggagaattgcctcatcaaaggtcttttgacacataaaagtttctgaaacatattgttaacagctttccatattaataaaatgtatacctccactaacactgtgtttgagccctattctgttgacattcagcaaaacagaaccttattgctctttttttaatatttgccagtttgatagcaaaacaaaatatgtttatattgcatttctttgctaactgatgagttttattttttatccatctaccattcagctggccagcatatacttactgagtatccaccatgttctgtaagctatcccatgtattaaaactgtagtgatgactagaagttgaacatctgttcnnnnnnnnnnnnnnnnnnnnnnnnnnnnnnnnnnnnnnnnnnnnnnnnnnnnnnttgagataggatctcattctgtcannnnnnnnnnnnnnnnnnnnnnnnnnnnnnnnnnnnnnnnnnnnnnnnnngctgggctcaagcaatgttcccacctcagcctcttgagtagctgggagtacaggtgcatgctacnnnnnnnnnnnnnnnnnnnnnnnnnnnnnnnnnnnnnnnnnnnnnnnnnnnnnnnnnnnnnnnnnnnnnnnnnnnnnnnnnnnnnnnnnnnnnnnnnnnnnnnnnnnnnnnnnnnnnnnnnnnngtgaggctgctgtcagaaaggaacttttacacagtttgccttcagagacagtctatcggcatgttgtagagttttattactaagaaaataaatgttacttacatgatggttttactcagcatttggtgtggtggatcttacataaacctttagaacttacattagagtgttcaagtcttctgagactccagagtcacctaagattgtggtggtgccatgcagcaagaatcagagagatgcagagttagagccagaaggcctgacatggcactttatgtacctaaagctcgtaggggtgcagtactccttaagacaggtgatgaagaagaaagctgtggttcacctaactctgtggtgaaagaaaagcaaaaagaaagttctctctcccaaaaagaagtctttaaagacaaaccggaggctcgaagactaaatatcaatcctgatagaaaggagcataattgtagagaagaaaagaaatcttcaacaaaattaagaatggacacatgccttcaaaaaacaaatagagtttgttctaagagaggaaccactgaatccaaagaagtattatcccaaggacaacagcagggagccccaaatgctggggttataactaatgcacctttgcagagacattttaaaccaaagaacgtggagtgtttggaa

SEQ ID NO: 181749 - DNA, 1108 bp, Homo Sapiens
ttgggtgattatggagatgattggctccatattccaccacgtcattccttcaactcaccagacacctttctttagttgaaataaaccagcatgacctggagatcatggtgactgtaagctaagtctgttttcatgccagatttcagccccacccagagtgtgctctagatgttgttgatttgaatggttttcccagttcccactccacatggggaagttgaatgaatgcacacctgctgctcacttcttgtgaggctgccttttgtgatcaaataacaggaagttctgctttagaggagggcacgatgaccatgtggcagtctgcaagtggaattttgggatggcagcccgaggaacatccagagttactgtgtgacttggtcctgccattgttagctttgaaatcacaggcattgggctctgttttgacaccattcattggactgcgggacagtcattctttacgttctctcttgagctggtgagagaggaggaagagggaagtcaagagcaacctccaaggcctatgtcagcctcttctccttgggtcttggggtgggttagaactgggttccagtctggccagatgggttgctggctgcactgagggtgattcttctcagaagatgggctgcctgtggtcaggacagggcataccagtctggactccaccttcccagacacctactttaaggacctgtggaaactgggtgatccaattatagggctggggcaaccctgctttggccaccctcatttacaaacttaggttgggagcttgggtttcctgtctcacttccaaaagccttcaagatggcagcagatggacacaccctctcatttcttgtgtcttgtctgtcagatggcaggaggcctgtatcagtaaatttgaggaaaatgttctctcctgggccagcctcacagcttgcgttgggtgtgttggaattgttctcttcggccttgttctgccttgtgatcttttcaattcagtgaataaaccaggtatccattttttcaccaacccaccctgaaaattgtcagctttttgtttgagaaatgcctggtctcacagttacatgtatcatagtgtgtgtaaagatgtctgtgt

SEQ ID NO: 181750 - DNA, 2375 bp, Homo Sapiens
  misc_feature (2174)..(2183): n is a, c, g, or t
ttgggttttttcagggtctgttttaagatcattatttgatagctgtagcatgaagcagaggttgatgatgcccataattgcaagactattcctgtaaaaataacaattattgggtaataacttcaagaggaatgagaagtgacaaaattgatttaaaatattgttctacttataaataaatgcttgatataaaaaattttctccataaagtttgacatctgaccccagattctatgtaatcattattagaaattccttctctcattatttcaggattagtagttctgtgtaattcattttacaatttcaaattgttctggtgccataaagtatacagactactttaaagatttccaaatcccctaatttaccccacaacagcatgtaattttagccaagatatgtcctgttactaagtatctcccaatgctttagtaaaacgtatttaggagaaatgttgaaaatgtacatgaagctcctttctgatatagaaaccatttctggagtatttacactggtttgatgtttacattgctctaactcggtgcctcagatacctctgtgaccaaatttgtctccaaccacatagctcatttcctataatgttatatcataggaagccctcacagagacactaacacagctaaagatcttctgatattatcagcaagggatgcaaggactttattggaatctggagagtttaactgccttctcttggtctcctcacttacttcttatgaagttggcattacctgagactcttagctgtgattatgtacaagcttaccttttagggtagaaaaagaaagatcatttgaaaaatgtatctaaaataatccagagaacataatgtttgtcttggtctgataatgataagaagtcaaggattggcagagaaaatactaaacgccaagagttgagcctgtgggtctctccataagagttttaaaactcttgccagttaccactttatccaatttgctatcattttcgtattatcagctatcgccctgtaaaatattcaaaactagctatttctaaagtaaacattttatctgttacttttaaccagataggtgtctttgtcatccttctactataaattgttctttgccaacctgtacaggtagatgaaccaggcgagagttttaatcagccttttcttgtcccctttgtaagaaagagatgcttgccatagagaaggacatgagtacattaaaaataatttaatagccacaatatgatgttctttaagctgcaaattgagtacactgggaatcaacaaatttgatgaagcctgtctgtctcttcaccagtggagtgagtgcagcagttagaaagagaagcaatattgtgcaactggtgcagtggtgagttaatcatagtgtataaccttgtgttcatgaaacaggttgttcattgttctgcatctctcttcatttaaaaaggatacacaattctttcctcattgcatattacaccaaacgtttgagggaaaaatcctcattcgtaaaggattttggatttataatctaaaactcaacaataaagaaataatattccaagtctctggtttcctaagatacataataactgtttataaagaaggtctaagagctgatatttgccaaagtgatagaagagttgttttttcctctctactaccaagctttaagacattaaaagaagtctagtgtatttgaatattttagagaaagctttatcattttttaagatgccaagatgctgcctacgtttgcaaaagttgtctaagaattcaccatgagctatattttcttctggatctttgaccaaggtgatgtcagcttatttctggggaaggtgttgagctcttatacatgaaaatggatataggctattctctgggatgagtgtcatttcaatgctttataaatccatgaagctgcttgtctcataaagtagaactgatacaaattttggttggatatatagagaattttataaatgtattgccttagaatttctgggtggagacccaactacaatgacattgtcatgcaagaactataaagataattagagttaaaagttgtttaaattgtgcccttaaatacagcagaacctggagaaggtcatacttcaaaggtcgattttgagtccgaataaagaaagacctagtaacagatagnnnnnnnnnngttcattttcttctaccaagtagaggtttatgccctcagaactaaactagtaaaaatatctgaacaaaaaacctttcgttgttggcataaaaatgtgatacacttagagacattttgtttattgcatataaatctaatttttccataaattagatttatgatattttcataaagcacttgattagtttttca

SEQ ID NO: 181751 - DNA, 1146 bp, Homo Sapiens
  misc_feature (60)..(68): n is a, c, g, or t
ttggcatacttcaaaggtcgattttgagtccgaataaagaaagacctagtaacagatagnnnnnnnnngttcattttcttctaccaagtagaggtttatgccctcagaactaaactagtaaaaatatctgaacaaaaaacctttcgttgttggcataaaaatgtgatacacttagagacattttgtttattgcatataaatctaatttttccataaattagatttatgatattttcataaagcacttgattagtttttcaaggcgtaccatcacaaagatgctttcctgcagagttctttgtatcaacagcctatggttgagatgttttctcatttcctgtagagagagaataccactaacaaacaagcaaaaactttagtgccaaaatagtggaactattttgtcatcttttgagaaaaaaatatacaaagaagtcatcttttcattaagtggattccctggttcctttccagctggttgtggaagtaatggctaacatccttcagctgactttgtctacaaggattattagcaaattctgtaggagcaagcatgtctgaccttaacttaatggatcccttattcaatcagtggcttctgtctttatgtctgttggcatatcaaaatggtttctgttcctagaaaagtaataacatatgcttatctttattctttttccaggtgattttgttttcaaatgctccttgtgaaaacacctagtgttgtagaaaggaaagtggccagaaagaacaacttgggaccatgagtaggtcattaaatagcttagtgatttatcctcatatagggcttataaaccctgtatgtgtttatatgtgcttcacagagttcgtgtcaggctcaaaggagatatgtataagaaagtggtttgtaaattatgttccatttcataaatagacactattcacaaactaaaatctaataaaaaaccacagttgtaatttaaactgcttgatataaaaagaggtatcatagcagggaaaacacactaattttcatacagtagaggtattgaaaactgaaaatgggaagcaacttgaagtcattgtatttgattgaaaatgtttaatacatctcattattgacaaatatgtcatcttgtatttatttcaaggaaaccaatgaat

SEQ ID NO: 181752 - DNA, 930 bp, Homo Sapiens
ttaaacagtattgagtttgcagcaaagccattctatattattccttaagcctgtctatttatagcatcaccctgattgccataagcatgtattagcatttcttcatcatcgttgtgcacactatttttcactggtacaagcagagcgagacaaaaggcaatgtaaggttgattaccagtccttttcgtaatcatacctgtgtttctgctcctccttattctcactgcagagaaaaaaacatttccacaagattccttcagcagcataactgatcccattgtactgaataacaaacacactccaaacctttcatgaccctcccacaaagggcctgtactgttagaaaagctgagtatcccataagcagtctctgccatgtgaacaaaaacagcctaattgtctgtcttccaaagtggaggttaagagagattgcaggggtgctcacagcacctgggtgggatctggctgctaatgaacacttcttttcatggttggctgttgtcctggctgctgtccattcaccaactcctccccaccataatcttggcatccccttgctctccccgcctctctccacttctgctcacctctcctcctccagcccagccatagataagggcaggagcactgctcagggacagcctgatcatttctggaatggatgcaacaaaaagaagctgctgctattcctccccttatccactctacagagaacccggcatttcctaatgggggctccacaggagcaggagacatgaacagttgggcaacactgcaattcatcttatacctgcctccagattcaacacgactttttccacagggctatcgtgagggtccaaagaaacaaactcttccttacaaaatgtaaatattagctgttattttaaaactataaatgttaattcttggctaggagtgttggttcat

SEQ ID NO: 181753 - DNA, 1097 bp, Homo Sapiens
  misc_feature (457)..(491): n is a, c, g, or t
  misc_feature (791)..(885): n is a, c, g, or t
atgagccattgcaccaggcctccaggaagtgttttgactttatattgagactttggaggtgtcccagcagctacctggcagaagttctagaggagttcctaacgttacatctcttgccatcctgggatgggatagtggattgattgccttggatccctggtggagctttggggaacaaggttggagacgtggagttgataggagatggaaaggtagtgccactatttccatgtttgtctactgcatattcattaaactagaccccttttacttccatgaggaacaagagtctaaaggtaagagtgctcatttttataaatagatggggtgacttaggaagacttgggtcaaattgcctcctcacccaccttcatttctctaagattggggttaatttaagtctctttatcctgtggcatgtgtgtgtgcaagtttgtgtgtacctatagatctaccnnnnnnnnnnnnnnnnnnnnnnnnnnnnnnnnnnngagacaagggtctcactctgttactcaggctgggagtgcagtgatatgattatgagaggcaggactagctggatttcctaggccgactaagaattcttaagcctagctggggaaggtgactgcatctgcctttaaacacagggcttgtaactcagctcatacccaaccaatcaggtagtaaagagggctcactaaaatacaaattactctaaagctttgatgtaaagaaatagtcaaatcgtatattgcctgagagcccagtgggagggacaatgattgggatataaacccaggcattannnnnnnnnnnnnnnnnnnnnnnnnnnnnnnnnnnnnnnnnnnnnnnnnnnnnnnnnnnnnnnnnnnnnnnnnnnnnnnnnnnnnnnnnnnnnnngtgtttgttacttctcgagctgagctttcgctcgccatccaccactgctgtttgctgtcgtcgcacacctgctgctgacttccacccctccagatccagcaaggtgtccgctgtgctcctgatccagcgaggtgcccattgctgctcctgatcgggctaagactcgccattgttcttgcatgggctaaaagcctgggttcgtccctatttga

SEQ ID NO: 181754 - DNA, 1658 bp, Homo Sapiens
  misc_feature (684)..(709): n is a, c, g, or t
tcaaaaaataactacttatagaaacttgtatgcccagtatgagcatttcatgtccctttctgatatgtgaacaagattaaaggaaaaacatgtttcctagggtgcatatggtgttcaggaaaaacactgccaacaaaaggttgtcttaaaaacatgtatatatgttgcttagaaatccaccatgaaacagatttttttccttttctttctcactcagatttggaattcagagtctctgcaagatgtttttccttgtggaaaaataaataatctcctttggaaaccaaaaaagaaatcttttcatgttcacagaactaaagttactaaattctgtgatggttctttggcttgagggttctatatgtcagtggtccttactctgatttgttaaggaattaattatgattagaagagcacaagagtgctcactctttgaggatcttccaaggttcaaaagggagtgcttcaggttcataggagtctcaaagcctcctgggaatacagcattgattttaaaaaatgattagggattgacaaaacctagctaacaatatcctcagctataaatccaaagagatttagtcacaagtaggttgcacttgattttgcacttgattatgctacaagcaacaaaattataaaaataaattttgtgttttcaaatcagtggaaatatgaacatgnnnnnnnnnnnnnnnnnnnnnnnnnncatatgcaaataaaagaataaacagcttcacactccctttgaagaaaaaaaatattagacccaggtccattttattaataatatgatctataatctcttgacattacaagtagtttttacagttaaatttcacactgaagacaaacactgtttggcttagggagcagaaagctgagtaacttacatcctttatatcagacactatattttaacagtttaagaaaaccttttacactttctggatttaagcatcaatatgtaagttgtttcctttacaggaaactgaaattagtaagaattaagtgaatatactgacagatggctcatttgggaacatgaagcctagagcaaagccaagcttctataactcataaagtcaaaggtaaaacattctggattcttcaaacctaaatgggcacttgttattttccacttttcttcaaccatgagctaagccctaactaaaatcaaagttgataaagattaagtggtaaacaaaaaaattattaaagctgtccttaactcctgtctgagtgttttttaagatatagatatgctttccacagcattccattttggctgcctcaagcaccagcacatgcagtttgtgaatcaatctgtagtaactgtgttctagcatttatacagaatggaagttcaaccaaacccagccccatatgaacagccaagggaacacacttcagtgtaggactacagagcttctctgataagctacagttaagttgtagctataaaggaatatgacaaaggaaagtctgggtgctaacatgcagaaaggcattttcaaaaatgcaagctaggacttagcagttactaatagactattctagtgggggaaaaggtttccttgcaaccatctgtatctggtataccatacacaccgatggaagctcatcctttattgcaattttgttttcaaaatacccaa

SEQ ID NO: 181755 - DNA, 934 bp, Homo Sapiens
tttgtacaaaaaagttggctcttattgcaagatacctctaagatgaagcgcttcaatcaaacactttcaaccaacaaaagtggttatacaagtcgcaaccctcagtcataccacctacttagtaaagaacaaagcagaaacagtcttcggaaagagtctttaatatttatgaaaggagtcatggatgaatgtactcatgtagcaaatttctcagtcccagttgatccaagcctcattatagtggttcaagccaaagaagatgcctatattccacgaacaggagttcgaagtttacaagaaatttggcctggttgtgaaatccgatacttagaagggggtcatattagtgcttatctttttaaacaaggactcttcagacaagccatctatgatgcatttgaccgcttcctccataaatacgctaactagttggattattatatgtaaccagtgtggccatgatgtttcttacaaaagggagcttcatcctgtgatcatgtgaaggacaagcagacagcactaatatatctaatcgctatcaatttggtctggaattcattgttacacatcagttaactataaacttcgaatacatttgaataatttcaagataatatttgaagtaaataatgttaaagtgtttttactattgtttattggaatcccatatattcagtgtttagtctgttgttactgtttatgaaaaactaaatttttaatcatgaataatttattaaattaaataaatttattcatagaaacttttctgggttttagtaaaattgctaaatcaaaccaagattttaatatatcagcatttactttgtacccttataacatttcactcttgacttgatttgagaaacatgtttattttttgaatgttcttgtgttcaactaattttctgctgtggaaataaatacttatgatata

SEQ ID NO: 181756 - DNA, 1244 bp, Homo Sapiens
  misc_feature (938)..(976): n is a, c, g, or t
ttgggttatcattacgtatctaacaagattcagaaacaaaaatcttggacttttcacatccgaaatatgtcagctcttaataaatgtgtggtgcttaagtctacatatggcatccatagttgatctagagtatggatatgagtgtgttgaccagttatcagtaggtggacaaatatttgggcatgctacagatgagactatgcactaagtgtggactgagtcctaaagaagcttatagtcaggtgttgtttaaaacattatcagaattcttaaacccaaggaatttaattttatttggtatttcttaagcctaaaatgaaccaagagaaagatgattttagaaagtacttgtagtgaaagatgattttagaaagtacttgtagtgcatgtgtggcttctgacttttgggatggcaccattttataatagtttcaaaatttagcttttgaaattctcaacattttatggtagaagactttggacctcaagtataaaattatacgtttataatttttttaaaatttaaattataagtattgtgaattcacactctcaggctattgtctgacttgatctacgtctcataaagcctgtacctgagtggagtggaaggtggagtcttaggttaatcagttactgactctaccctcaccctctttcaattgaggtaaactttgctgtttttctttttcataaagcattctcaaattgttgagtttattgctgaaaaaaatctccatgactttacagatagaattacaaactaaatgatgtcttgtatttagaagcagagtacagacctaacgaactgttagattctccaccatcacttagggtttgcccagaagcaacaccagagaattacagacaacgcgcttttgctgaactgtccattttggtggttgtgtttttcagtcaaatataagcaggatgggcgnnnnnnnnnnnnnnnnnnnnnnnnnnnnnnnnnnnnnnnctaatgcctaaatatgggtattaaagggaaaatttttaaagtctgattaaatccaatatgacatgaaattaaatatatggattagtaaggaaaaatgttaaaaagtagagaggataccaagaagattaaactggactagccttatttgcaagtgaaggatctggtgctgctttcagatgtttatcttttatttttttcccttaagctttaatcttcgtcattgtcttaaagtcaactggtgtttcttgttcattgactttggtacgat

SEQ ID NO: 181757 - DNA, 1270 bp, Homo Sapiens
  misc_feature (160)..(230): n is a, c, g, or t
ttggagataaaggtgtacagtgtttgtggtgaggctgctggacactgctgttttgggctttctagagagaatgcaaacatgcaaaaacagtgtggtagtgtaggcagaacaagatctagaatcagaagacctggagtcgaatctcagctccaacacccannnnnnnnnnnnnnnnnnnnnnnnnnnnnnnnnnnnnnnnnnnnnnnnnnnnnnnnnnnnnnnnnnnnnnntgtgtcttttctaaggggaaagatcaaatgacatcatgtatgtgaaaatgcttagaaatgggtgatgatgatgatgatactgattattagggtatctaataaagttggggaaagaacaaaatccccccctcacaccctattgcaccaccagccttctccctccctgctcaattatacccatgttatagggaaggaaatagggaagaaacttgtctaaggtcacatggatgttcgcaacaattgggatgcagaacttgatctgactcccaggccaggtttgattttgatttgcagtggcagagaggactaattttttactaggttctgagccctgtactgaactctggattgccctgtacttggtggtggtatacagttcagcagtttttagcatatacacgaatttgtgcagccataaccactatctaattctagaacatttttatcacccccaaaagaaatcatgtacccatttgcagtcacttgccattccctcttctccccagccctgggaaaccactgacctaccttatatctctatgaatttgcctaatctggacatttcatataaatgcaattgtacatgtggccttttgtttctggcttctttcacttagcatgttttcaaggttcatttgtgctgtagcatttatcagtactttgttcctttttctagctgagtaacgtgtgggtatatcacattttgtttattcatctgttgagggatgtttgggttgtttctactttttgactattgtgattagtgctgctatgaacattgatgtacagatttttgtgtagatatgttttcaattatcttggggcatcttttatttttaatgtcagttttctatttttaaaaaatctagacaggttggcaaatcatttctgtaaagagtcagtaaatattttagcctttgtggtccatgacattacgtatacagattacaatttctggagctctgccaattccagtgtgagagcagccatagataatatgtaaaccaaatgagcatggctatgttccaataaaacttttt

SEQ ID NO: 181758 - DNA, 1485 bp, Homo Sapiens
aatgtaaaggagagcttctagtatttacaaggagagatatgaaaatgatataattcaatctgtgtatcacaaaagatgaaaatcattccaaaacagatgtaaaggacctattaaaatgtaactagtgtaactgaaaagagtggtggatatttttttctgtttaaaacagctaaaagtgatcctgtacatgagccagattgtgtaataataaagaaaaccagaacatgtctatcccaccccaaaaagggaacctgtcagctttagttttctccagcagtcttggattggcatattactcatcttaggttcccctctcccttgttatttaaagctgttttgaagttcgtttggctattaatatcaatgcagaaatcagggaaggaaacccttgtggatcatatcatgtcactcagaaactatcctctcaacaaacagagtgaatcaattaaaatgggcagcttgatgactggcccttgatttcttgagttcaacagatgagattaagagctaagtaaggaggcagaggccaagatgagaaagtaggtggacattttcccttgcacttgggcttggagaacgaagtcaacagaacacaggtgtgccaaaagactatataaaaccagtgtcccagggcacaccctgagttcatgggtggcaaagtattggagccacaccaaccagacctttccgaaagaagccatggttctgtagaaagtctcaatggtttggcctccctctgactaagaggcagcaacaaaggtggggaatctgagtgagtatgggcaatgtcagagcccagaatcagcagcagaggaggatgatgagtaaactcaccagatggtgtccatctggctttaggctttgccgctgaagattttaattcagtagtcagagtctcctctttgttccttctctcttctcatgacttctgcaggtggatatgctgggtgacaagaagagcatttgcagggtttctggttctagtgccttcattcttcccaccctggtaattgagttttctcttcaaccctgatctgggtagcccctttagctgctctaaagaaggaagtgagaacttctccacttgctgggagggtatcatctctgggggacaagggcaagacgcccagcttgcctgatccctttgatgccttctttccagtttgtctaagggctccagcgatctgagagttggtaagaaatctttgtgactactggcatctacagatagatgtcagagctgttggcctgctaaccttcttggtggtgggggctcttaacagagaatctgtgaacatgcccaaaagaagcaaacaggcttgatgaccatggctgaaatgcagtgtgatgaaattcaggcccacaaaacactgaagggaggacataaggtgcttgtggcttcacggagtttggcagaaaacttcattcaggtcttttaaaggtggggaaaaggtagtggcagtgagagtttaactattcagccaa

SEQ ID NO: 181759 - DNA, 268 bp, Homo Sapiens
ttggcaataacacagaaaatacaaataaaatgaactagcagaaaagaaagcctttgcatgtcgttgagggctataagtaaacagtttaagagaaagaaaaagacaaagttgaaaaacacaaggactgcaatttggtagacacttgaagtctattagaaattcatttagccaactttgagtaccaaaacatggtagttataaaggagacacaatgggtgagtgggaagttacacaatctgtggaccttacattaaaaatcacaaagtac

SEQ ID NO: 181760 - DNA, 778 bp, Homo Sapiens
ttggatactttttaatgcagcgttattttggtcagagttaagtggttaaagagtcaatattcttatacatattacacacagtcagatagacagaccgatacacacatgtgcacacacacagagaataatataggtctaatggcttagaatttacactttaatttccttctattacttgacacattctttatttttcagtttccattgctggtttcaggaaatgatgctagagaggtaggccagaaccaaataaaataggatgtgccaagaaagacagaacacaagtagacataagaagccactgaaggattttaaccaacatctcatatttatactgtagtttaaaattgtcatattgtcaaccaggtatgcataagtagagttttatttttcataaaagaattatttgtacatacagcttcatatctgctaatggagaaaataacttaaacttggccctgccaggcaacccattttcttccagtttaaaacttagtctttttcaggttagctaggccaattccaggtgctcgtcctaccttctttctcccatttctacaccacccttcttttttgtctctccctgggagatatctgagcttaaggaaaaattcgttaagagtggggatcggagagacctctgttccactagttgccttctggacattttctggtctccactgttgatgtatccatcccttctggcctttgggtgcactgaggcatcttgctattgtctatggttatgccatagctcctagtcaaaaggctcacattc

SEQ ID NO: 181761 - DNA, 1602 bp, Homo Sapiens
ttggggaaaactgggagaagggaatggttcttgagtccctactatatgtcaggtgtgtgcctctccagttgccactgcattggcgacagacggtggggacccacaggacaagggctcacagactggataaggctggctccatacccctttctctgtacaaatcagatctgaactgccttgtatgacatatccagacctgcagctgtaagttatcacattttccttccaagagctggtctcactgatgaacgcatttggtatcattggaagagaaccacaagaagtgtgttcacagtgggggaacccagagctccactggccatcggcttcacaggtgatttcagaaagtcctaggagcttgaagcctttgaagcactgaatccgggctgcctttccacagtcaaaatctgtcccattgacagttccatattcaattactggtgtggaacatctgcaaggcaggcaggaaggtgagctgccactccaggagccattggagaggcaccttcttgatgaatttccatggagcttataaccaggaaagcactgatactgtatatggcccccatgaataaaggaaaaaccattagggaaaccatgggcaagatcttcaggaggtccacagttgactggtttacagagaggaatctctgcatcccagttgccatctgactgacaggtgagttttggagcaccgtgcaagatgtagccctcatgacagtggaatgttacttccttcatgaagccatagtccaggccttccgtcaccccattggccagttgtggcggggtggcacatctgacaggcacacagtcgggagtggctccactccaacttccattggcaagacaaacccgactcctggctccctcaagcaagaacccttcattgcaagtgtattcaatctctttttggaatgtgtactcgtctcctctcacctggccattggctgagactgggggtgaactgcagtccacaggaatgcaaatgggctcatcctcatcccagtttttgtcatcctggcatgttctcctctcagtgccattcagcacatatccggggtcacactcatagtacaacgtgctcaggtatgtgtagttgcttcctttgatggatccattcatgactggatttggctttttgcatgaaatggcttcacagcgtggggaggcaccactccactttctattctctagacaaagccttaagtcagagcctgctagaatgtgtccaggtttacagctatactgcacagcacttcccatgctagtctctgtaaaacgcaaaaagccattttcaggagcagtaggcaagtcacattcaattgaaatgcaggatggtgcactgccattccaagttccatcttcctggcagatcagcacagggttccccagaagttcatatcctggattacaggtgtatgaaaccatggtaccatacagaaagtttgatgaatgtgtagcaggagactcctttgtattttcccaggttttagccactgctcccaaatgataaggagggtgaggagtcacatatggaacttccatcatgtcgtcttcttgctcaaaatatccctggtcatcttggagtttagtacccaa

SEQ ID NO: 181762 - DNA, 956 bp, Homo Sapiens
ttggctgattcccaggtctgtttgaggtttagggttgtggatgggctgctcttctgaatctggatcagtgtgtctaggttgtgttcaggagggaagcacagccgcagcagtctggacaaatcaagtgctttaacgatggcatagtcctctgggaataatcagtccttaatacagttttcacttgacataatagttttggtaaactgtctttatctggctgcacccccttttaagtaagcccttaattttaaatggtcccggcgtggtgttcagtatctgcatatgccccagttctcatttaagggcagttcaatgtaattgctaattaccagccctgtatttactgaaatggctgtctgtcatgcttgccatttttatgaaacactttattgcaggtcagctattattgcacgtgctacttcaagtcactggctcaggctggtgtcatgtgtggtttgctgcaaacggcagcctgctttgcagtgtgagctcttcctggaaacagcagtctcttgtagctgatgccacatcagctttaagtcattaggaagatattctaggccccttgttgcttcagccatcagtctataaataacacaacactaattttccatcaagtaacagcttaaaacagaacactgtcaaaccactttatgttccacccttaaatcacatcactgaggaaacactgtaagagaatgcagttgactctttcccccccttctttttgaatgaacctcgtaaacctaatgctttagaaagagctctcagaagactgagaatggtttttaggataattttgcctcagtaaatcctctctacattcaagcatttattaggccattacttgttttgggactacagattatcctggcagctcaataactggataaacaggactttagtgaaagattttcagaggttctttagggaaaagaatgaccaggagaagtggg

SEQ ID NO: 181763 - DNA, 2117 bp, Homo Sapiens
  misc_feature (1646)..(1660): n is a, c, g, or t
ttggctcgcgcagaggccggcccgacgagccatggttgctgggagcgacgcggggcgggccctgggggtcctcagcgtggtctgcctgctgcactgctttggtttcatcagctgtttttcccaacaaatatatggtgttgtgtatgggaatgtaactttccatgtaccaagcaatgtgcctttaaaagaggtcctatggaaaaaacaaaaggataaagttgcagaactggaaaattctgaattcagagctttctcatcttttaaaaatagggtttatttagacactgtgtcaggtagcctcactatctacaacttaacatcatcagatgaagatgagtatgaaatggaatcgccaaatattactgataccatgaagttctttctttatgtgcttgagtctcttccatctcccacactaacttgtgcattgactaatggaagcattgaagtccaatgcatgataccagagcattacaacagccatcgaggacttataatgtactcatgggattgtcctatggagcaatgtaaacgtaactcaaccagtatatattttaagatggaaaatgatcttccacaaaaaatacagtgtactcttagcaatccattatttaatacaacatcatcaatcattttgacaacctgtatcccaagcagcggtcctgagattgtggactgtgacgggtgtactattgactggaagaaaggaaagaatgttactgtcaaaaccatcaagaaaaagcagaagcataagggtcgaggcactgttagaacaattacgaaacaagtacccaatgagtcctttttcaacttcttcaatccattgaaagcatccggggatggagaatcactggatgaagattctgaattcacattagcctctgattttgaaattggacactttttccgtgagcggatagtcccgcgggctgtgctgtacttcactggggaggccatagaagatgatgacaattttgaagaaggtgaagaaggagaagaggaggaattagaaggtgacgaggagggagaagacgaggatgatgcggaaattaaccccaagaaggaacccagccagccggcggaatgcaagcagcagtaggaagcggaggcgggtgcctggcagaccggctgtcgggactccaggcctgtgggcggggcctcggtccttgccgcagcacaatcccgtggacagagcttactccatctaactcgttttcaagtgcatgattttcactttcacttttcctttttccttattattttgcttaacttgtacagtggcaactgaaatgcatttcagaaataggaggtttcgtccagcaccctctgcagccttggtgcctgtagctctggacttccctgggcctttccctgtgggagggccctgtagaccacatcagggtggggtgggggtcacttggcaaaaagggccgaggtctggtgatgtggttcccaggatctggaacctctcccacccctcctgcagttggactgaattcttccctttcatccgaagaaacccacttgctgtttccagccgctgaatctgctgagtgtgcagcctgcatcacctgctgtatgccgatcatctcagaaagggctgtgtagagtagggccctgttctccttaggatgttgcttcttgannnnnnnnnnnnnnnaggggtgggtcagggttgtgacacaccagcccaggtgagagctgctgcgggtcacctcatatttatttatcccttcttgcctgtgaggactgcggcttttcgctgtggctcgtccttaacgtttctgaaccaccttggtgccctgagcaggaagatgtgccacttcctagcaggcgcaaggcctgtgcggaagaaacgccgctccctgccaccagggctgaagatgcgagcccgtcctcatgacgcaggcgccaccctgctgccggagccgggcttcggcagtcttctccactgagggactgggctgggaagtcctgcgtttcagtggagcgtatgagcgtcaagtcctgctttctcagtagccccattgcggggccccaccattcatcctgtctgaaagtcctgggtttggtgtgaccgcttggccggctggtgggtggggttttcaagtgggtga

SEQ ID NO: 181764 - DNA, 1485 bp, Homo Sapiens
  misc_feature (360)..(415): n is a, c, g, or t
  misc_feature (898)..(945): n is a, c, g, or t
ttggatcaaaagcatcaaccagcagtcaggggcgcacgtggagcttcagaggaacccccctcccaacagcgaccccaacctgcggagattcaccatcaggggggttccccagcagatcgaggtggccaggcagctcatagatgagaaagttggcgggaccaatctcggagcacctggagccttcggacagagtccattcagccagccacctgccccacctcatcaaaatacctttcctccaaggagctccgggtgcttcccaaacatggctgccaaggtgaatgggaacccccacagcacccctgtgagtggtcctccggcctttctgacccagggctggggcagcacctaccaggcgtnnnnnnnnnnnnnnnnnnnnnnnnnnnnnnnnnnnnnnnnnnnnnnnnnnnnnnnncccaactacagcaaggcctgggaagactattacaaaaaacagagtcacgccgccagcgctgctcctcaggccagctccccaccggactacacaatggcctgggcagaatattacagacagcaggtcgctttctacggacagacgttagggcaggcgcaggcccacagccaggagcagtaggacagcgtcctcgtggccaactctcccctcaaaatcattgtcaaagaaaacctatttgtaacagaggtttttacatttgcaaaccttttgatgaagaactgttgttttgttctgtgaaacactatatttagattaacggaatttttctaaaaatcaggaaaattagttactaaaaattgctgatcatttttgtttcattatttttgttatttcaaatgtataagctctgggattctttttggagcaatacctacaaagtcaggcaccagaatgtgcctcagagctgtgacatttcaacatgannnnnnnnnnnnnnnnnnnnnnnnnnnnnnnnnnnnnnnnnnnnnnnnctgttgcaacagaaagtggcttggaagtcttaggtggtatgtaacaaattctttttaaaaattttaaagcagtatttaagtattcttaaatgtgtaaattcatttaatgttttacttctaatttcttgtatcttggctgtctggttttattgcatttttaaaaaaactgaactattatgtattgtaatgaatgatgtgaattctgaactgagacagataattgtattgctgtccaacaggggttgggaggggcattttgtagggtttgtataatttctagagttcgaaaggggtaatataaaaatgtgctcgtgtgtttagcctacgtttttctcatgcctccattaccagttgcaattgtgtatctaagacctccaagcttgtttttaaaacaaacaaaaacctttctctattatctcagaatataatactgtatttttaatattaagaaattcatataactttaacacacactgtgaacataaaccgtataaaatgtagttataactatttttaattccaagtgttgtttgctttttt

SEQ ID NO: 181765 - DNA, 1242 bp, Homo Sapiens
  misc_feature (84)..(92): n is a, c, g, or t
  misc_feature (349)..(363): n is a, c, g, or t
  misc_feature (961)..(976): n is a, c, g, or t
ttgggtacaattgataatataaaggggctcattgaaacttgagagcctgttgagttttggttagttgtagattgcatttttatnnnnnnnnntacagatagattgatgataatagatattggggcattgtttctgtctcatgagaattcttttattcattaccataagccttcactgatactataagcattattttaaatgacgctgatcttaagtctgaaataaatggaaagcagaaaaggtgagccagttgatttgaatgcattggatattagtgttagaaacaatgtatagtttagattgaaactgaactgacttatttagcacttaaacaaaaatttgacaatgnnnnnnnnnnnnnnnaagacagcttagtgtggtgatacttagaattctatggtttgatgtttcttttagaaatgagaagtatagttttattttttaatataaaaaatggttttaatactaaaactagtaatttgatactagttgtttataaacattgtaaaatatatcttttaaacaaattatcttggtagttaattcataagggtgggtttgggtaggaatagcagagtactttcagagggaaaggggagtcattcagaagtgatagcattttatttgtttgaatactctgccagtaaaatcagctgtacttagaaagttatctgttgtgtagaataatgatgtagagtttactaatcagtgaggatgtcttgtttttattttctgcaaactctgcctcactttaaaatgcattataacaatacctaattaaagataattttggctctgaaagttaccttattttttgttgagttagtgacttcatttttcttgccacaatataagcttttgagggatttttttaaattggtgcttttaataagcaaataaatcccagggttttattttcttcagtgatacccctatagaaactcttaaatgtatttgcgcnnnnnnnnnnnnnnnntttcttatgcatgctcgatgcattttcgtcctgagaaaaatgttctctacagaaactacccgtgtgtaaaaagaagattggcttaaaatggctactgtgatgggaacagtgtcttagggagatgcagcttggacttgaggtaaattgaatactttacaactgtggtttagagtttgctttaatgacattgtatgtaaaaggtcacatgattgctgtaattttgtattcattatggtttcctcaataaatgtacattgatgactatt

SEQ ID NO: 181766 - DNA, 1460 bp, Homo Sapiens
  misc_feature (1348)..(1365): n is a, c, g, or t
ccctttcattgacacccaaaccccataccagctgcttttctgtatgcaattgtcaaagactgaacagggggcgctcacaccatccccccgattccacttggactcttccaatttgagctcattgttcctgggaggggttgaagctcagaggcaccctcctcttgcctctgaccaacccccagcctgtgtgtcctttatatttacacattaatcttcccttttcaagcactgtgctataaatacccttaccacccccactggccctgtccccagcccttttcaggatgcagagaagcatcgtgaccttcgtgtgacctgcccatttggaatcccagaccgctcccccgcaagagttcctcccatgattgctggggccgcttgcccatttcccaagcccacaccaggcggaagggaagagggttcctgtgtttttcatttttatacgatatgtttacagttatgttgctttaatcttttaaagtatttaaccttttaaaggattttttagcaacaagtcccttcctctgacttctctgtggcagtgatgtgggcagagcagggcttaggagctccctgggatttgccacccatcacaatggtttcggacatattggaggggagagggccacagcccacagaactgctgcctgaacagggacctatgaatgaagtaccgaccgctccgagatctgtatgagttggaggcaggccagtgtgaaggtgtgggaggaatccgcccacacccagcttcatacagcaccctgaggacaatgtggcttccctgattcacacctactgagccaaggccccctctgaagttaggtcaagagggcccaccctagccgggccaactcattcctttgaggacctgatactcaatgaactgcttactaccaaaaaaatgcaaaggattcagcaaaaagtgcaatttccatttgagaagtaagattctccccaaaacatgacaccaccttttcatcctttcagtacctcaaagggaaagggaaataaaaggcatacagcactaaccctccgaaccacagccggggctttaaaagtgtggttcaccctttagaaccctaaaagacccattaacacgtccagtcagttatcgaagtgccagtgaggtgaggggcgtggcagagtcaggagggaccaggaggctggaagagcccgctcacattctcaacaggacacacctgtcctgtttacagcaggacgcattactgtggcaacagccacaggactccagggacttggttattccttcataaaaccttgtcaacttcattgcctattggaggataaactcaaaacatcttcaaaatataacctgagccacaatatnnnnnnnnnnnnnnnnnncttttcatgttaatgccttaagaagtttacagattatgtaccaataaaataaatccacataaatttgaaattcttgggggatacacacctgaagc

SEQ ID NO: 181767 - DNA, 1109 bp, Homo Sapiens
ttggcaaaaacccagtgctgtccaaaccagccacaccctgcaagccggatcttgtatgtggggtccctgtttgatctttaatttgtatttaccttctctgtctctaggatggggctgtgtgtcctcacatctctcccacatgttagggaggcagttcggggatagaggaaggtgacctgactttagccccagcccgtcctagctatgacatgtgggtaaatgcctcatcccccttagagccctgggcctctcaggtgtaaaatggggtatcacaatctttcctcctttacctccctcagaggcaatgaggataagatgtatgtccttaaaatgcgttctctgtctttgccaccagtgtccacatggcttacatggtggctcagaggggccgcattcctcattcttgaagttggggtggcagtggagttggggagaacctgcaagagtcattggtctggggtctgcaggggcagcctagagaaacagggagccctcaccccattcccggggcttcaagggctaggaatttggggtggaaccaggcatgaaatagtccccctgcaaacacacgtagaggctgcaagctgactgtcagggcccatgggcttctctgccgcccaacctggctttgcccaggtgcctggcttccggccctggtgagatcggaggtttggggctcaggctgttcctgggtccttggccacacggaggagattccaaagtgtccttcccagacccctagggtcacctccactccctaaggtttcattgacttggtagagactacatctcagaagtttaaaaactttttattagagtaaaatttcaaacacgaacatatcttttcagggcctgtggcctctatcagaccctgaccacaaggagagaaaccgcctgccccagacctccctgcccttgagcctcctttatggaaggcccttccccaaccctctccccacggcctctagggcctctccttctcctgaaaatcatctgccacacgtgggaaagttccttgcattttcctaggaaatttccacattcataataaacgtagacgatcgggtcccagctaacgagtggggagctgggagtcaaacctggcccta

SEQ ID NO: 181768 - DNA, 1613 bp, Homo Sapiens
  misc_feature (1429)..(1484): n is a, c, g, or t
ttggcataaaaacaatcattccttaattcttcattgtggaactgaaatatttctgtaatgcattttttaaaaggagactcctagacacagctgtaatagtgggaatagaaatgtagagcttttctcataacacaaaaccagaaaataattttcagcactttgacttactctatgtaataaggaaaaaaattgtttccacaaagttgaactatgtagtaatatttggtaacatatggcatggccactttatatcacagaatgtgtgtcaagttgcaaagcatacttgggccatagcagacactaagaattaaaactcttaaatcagtgaaacaaaaactaatgggcagcattctctctgtttggaatgggatcagtatacaattaatacaatttaattttacacattccctaagacaccatttttaagttacagtcacatgagtgtttgtataaatttaagtcaatgcttttagcctaggcaaagctaaatacaaggtttttggggttttcttttttcagctttattattgaagtattacaaacttaacatcagataccaatgtgtaaaaagtactattgggtccttaagggctctatcagggagttgaaatttcatacgctttaccaggttacttgtaaaaaatgaacagctgtaagacatttcaaaaccattgcagacacattgttaaaatgcagccatttgataatgaaagcagaaaccttaagttttacctaattattgcactaaatgtaaatgataacataaaattaagtgtgcattttaaacagattctatttcccacttactgcttagcatagaaaaagagctatggttagaggagtgaccagcaagatttatttcagatggaaaaggggtgagaaagtggaagcaccttactgttagagcatgttgcatctatttagtgctactgaacaattcagtagttatttctgaactttgctgcaaagtgctctttagttaaagcacattaagaagggtcactgcttaattgctttgtaaaatgaagcaatggtattttttatccgatatagtgtaatttaaaagttttcctacaaagtgagtttatattgttgcctaaactatgttatgtaagcaaagggtttggaaaggcgggagggagtctagattcggcgagagtgtgcgtttgtgtgtgtgaatgtatgaaaagtttccccattgggttattcttaagatgtgtttattgtaaagttttctacgttttgcccacagtaaatgtacaacttcgcaattgtaggatttaattgattgaattccaaatttatactgtctcttcccttctgcagagacattatgccactgtaaggtgcatgtacagaaaatacctctgaggttgacttgttaaataactgatgaatgttatttcacactgaatctcaaagcagtcannnnnnnnnnnnnnnnnnnnnnnnnnnnnnnnnnnnnnnnnnnnnnnnnnnnnnnnaattaggcacactaagagtggctaaatttgggggaattggtggataggaaagaccttgaaaagtgatgtgtagatgaaacacagtatggatgttgggttacagagttcagtttaacagggaattgggga

SEQ ID NO: 181769 - DNA, 683 bp, Homo Sapiens
ctttgtacaaaaaagttggctaaatatatgttaaataatttgggaacataaaaataagtggcatttaaatataatgtaagagcactttctattttcagttgatttttaactttgttacatacttgtgttcttttagtgtcaacatgtaagatgccagtggagctatattgtgattaacctcaaattttctttgtaggtttgatccagatcggtttgatgatgaattagtaatgaaaactttttcctcacttggattctcaggcacacaggagtgtccagagttgaggtgaataatagaatgccagactctgttcttagaattttgatgatcactgttgatgagaatgggcaatctgtatgattaaagtattatttttttattattattgtactttaagttctggggttcatgtgcagaacgtgcaggtttaaagtataatttttaatctttagtaactaattgactttcttcctgactaggtttgcatatatggtgaccacagtacttcttagtgtattggtgaagagactgcacctactttctgtggagggacaggttattgaaacaaagtatgaactggtaacatcatcaagggaagaagcttggatcactgtctcaaagagatattaaaattttatacatttaaaatcattgttaaattgattgaggaaaacaaccattt

SEQ ID NO: 181770 - DNA, 1286 bp, Homo Sapiens
ttggctgaattctgtctgcagttctgttttgtgtgaccagcacagtgttttaaaacgttgcattctgaatccatctttttgaaatggggcatgtactcttaaggtggccactagcttaccattcccaatttttcttagtctcaaacattcacatgtttttcaaggccttggagttggcaaatcctgaatatatagtgaaggtaggaaatagctcttcttatgccacatcttagtctgattttgaagtcagttgtgtaagtttgggctgacagtggtattttccagtgaagactatcgccaagaatgcatatcattctgcttattttattctagtggataaaaattcaacgtatatttaagtgtatttttgacatctgtgcttgtccaacacagggctgtagggactgatgaaaagagaatgttgtgatttgagcttttataaaaaaagataagtgatcctagataaaatattttagatggtgattaaaatgcccatagattaattttttaatcggttctctgaaatcttgagatgttatccaagttacaatttaagcaatgagagtaaaatttgaattctaaattctcagcatcttccctcattcttgagtggagagacagaggaagcaaacgccaaggagccttctaattttgactatatgatcattaactaaaggcagcaagggattgtaaactaatcttacatagtcaatgtttcatagaatgctttggttacaatcaggttttttaaagactttaaaggttttttgtatgctataatatatgcttatgatttctaaaaattatgcagtatacacaaagggcataaagtcaaaaagtgtgtctccctctgtgactttattctcataccccagaggcatataatttcttgtattcttgtgtagtctttaagaaatgttatcgtttattttatatatggctctctctctgtatgcctcttcctgttcttattttaaatgttcaagtttgtgacttggttcttgtttaacttggttgtctttccatattgccaccttccagctctaacattaatgtctccaggattccattatatggatgtccctttgggagaacatttgtttatagacttttctactaaaaatattgttataatgataatatccttatgcatatatgaagattactcttgattctgcctgactggaaactttattaataaagtagacattattctattttgaggctcaccagctgtgtaggtatgatcttgtgcttccatttaagaaattcttccatttaaagaa

SEQ ID NO: 181771 - DNA, 1744 bp, Homo Sapiens
  misc_feature (309)..(324): n is a, c, g, or t
  misc_feature (1234)..(1271): n is a, c, g, or t
ttgggcctgagtaaaattaggtttttaggtctttttggcatttaattcttttacagctgatgtggaatcaattattcctttatatgttcataagtacaaaatttcactatcttaattacttccaaacaaacaatttccaagcaagggtatgtgtgcctggtttttctgctcctccaattctaagatcgttatttgtttgccttctgtttctcacccaaaaatacagatggttgggaaagatacatcttattgagttgtcctatgcagtctctgtctatatttgcatttctttctattcctatcttgccnnnnnnnnnnnnnnnnacacagatttggttttcccttccctttgtgaaaaccagaattgagcagcattgtacatcagagatggtacccaggaaatgtctttgttcctcagtatttttcgtcaaaacttccatgcaaagacagtcccagcaaagttgacatacatcccaacctctctcattggcttttctaactttttatagagctattcccctgagaaaagtgaaatgctgagtatgatgggtattgcctgttgataggatagctaaggaaatttgcttttggagaatgtatcttaaataattatacaggaaagtagtcacagtatagtgttctgtttaaggtacatcatgggtacataaatgcctaaaaccttcatcctttggtctatttctctgtaagtgtaaattacatatatattagaaagagagatagaatcaaagaattaggggtgttacagaggcagctttttgctgccttggttttgactgtatcagcatttctattgcagacctctattttcaggggttttagagactcgaccataaaaatttgtttcaggcttaaaagttttgaaagatttttttaggtatctaattttaaacaaatagatcttgtttttatattataggagggaaataaatggagtttactagttcaattttgcgctaatataacttttaataaacttaactttttaaacaaaaacataaaatctaattagttcatagttggttgatgcttttttaaaagaatcaattattgaccttgagaaacttgcctgcttcatcagtatagtaacctatctttgagatattttaaaacgtgtatacctttattaacattatcttgattccagcggtggatcagtatgataatgcagatttatgacatccatataagctatctggtaatatagatttaggannnnnnnnnnnnnnnnnnnnnnnnnnnnnnnnnnnnnnttactagatagattaaggagaaaaagctcccataaacttagtttgtcaaataaataccatatatttaaaaaatgcacagacatttatcattcagagtcagaatgagattcaagtaattgcaaagggaagttgtctcttgggtaaacaatacacattttatagcttcttgtgaaactaattttttcctttctatattgtggttatgggaaagtaaaagaattaaaattaatacagactttatttaaataacattaaactgtgaagcagagagaaacgccaggaaattaaatatttacgccattatcttgtggttgtctgacaatacttcacctttcttttaattccccatgatgttttcaattatggagagagtattaaaatctagatttaagtttctgcattgttctcattacactcaacactatttcattaagttcttgataatatgtagtcttctgtgtgcaaggaaagaa

SEQ ID NO: 181772 - DNA, 623 bp, Homo Sapiens
gtagtctgtgttctgggtggcatcctggcagggctaggacaggtagagatggacaatgcaacatccactgcttgttctggggtattccttatgttggtaagtttgtgaaaagacacttattaaagaatattaatttcatattctttagttttgtggctattttactgtcctttgactttagtgatgtttcactatttctatcatttccttgattttgaaattaggttactcatgttacttacagtgaagttttacaaaatcccatttgaaaacaacatttaacttagttatataacatattttttataccagattcagaaacacgagttgatctgaaatttatgtacctggatcctccaagagatcatcacaccttagagattcagcagcaagccctgctaagagagcagcagaagaggctgaacagaataaaaatgcaggaaggtgccaaaggtaagaaataatcattgctgtgtcaaatagtatcagcacgctgtttttccgtaggctttctgcatctcttctattgatttcattcccaggcatcctcctttcactggcagccccatgctcacagggtccgtttggtctgtacatgaatgttcgccaacttttttgtacaa

SEQ ID NO: 181773 - DNA, 1094 bp, Homo Sapiens
ttggctcctacttacctacagcatgcaataagccctgtgcttctaaattccaagtattcctgctactagtcacttctctataaactcaggaccactattttagtaagcctctttcactttccctagcttactgtaatactgctaaatggctcctggtctacaagataaactctgtctaatcccacatggctgtcagagtagttgctttacagaccaaactggggtcacagtgcctcttctaacatccctccagtggttcttaactatttctgaacaaaggaaaacactatggcatggtgtgcaaagtcattcctaagccggcccctgaagcagctctagcaccttctttcgccactgccctcgtgcatccccccaactcagtccttccccagcacttggccataggagaaaatgctccacctgtcctctccatactcttccccctgcatgaagtgtctttcttttccacctaactgactcctgttcatttgtaaagattcctccttatccacttcagaaagtcctagtcggggtggaatctgcattctgggctaaatgtcttgctcaaggcaatcaccaaacctgcatatcctacaccgtaacatttcacccactgcatcctcaatattcattttcctacctgtatctctcaatagagtgtgcattcattaaagataagcaccatgccttgctaaatacagttctaaataaaaattgataaatggataaatgaatactcaagaaaatcccgtacttgtctccgtaatttctctagaaatgacatctgcttttttctttaatagcctcttatttcatcccagatgtcttccccaaacacagtaactccttccaaattctcccttaatttttttgctctttatcacatccattcagcactttatctcatgttctgctctatcttatttattatttcatgcttgtaacttgtctcctcatctgtacaataaactctgtgtggaagagttatgatatcttgagatgcctggccggaaatggacagattcttgtattaacaagtttgaaaacgactgaaagtcaaagtaaactaaaagatgctttttctttttatttta

SEQ ID NO: 181774 - DNA, 768 bp, Homo Sapiens
tcttcttggccttagaaattaaaatcatgaaaggagatcatctgctggtcccagaatcacttaaggaatattatacaaatttgggtccccttgctcctctctatacttcctggggacaagatcacaggctctgattttttttcctgggtgctgaggaaagtctgatccagccttcttggcactggccacaaactatcagcatgcccatgttacagggagggaattgaaaacccagagaggtgggtgataagagcaggttttacttgcagggtagtttattatttattcctaactttttattttaagagttttcaaatctcagatcgaatgaatagaacaataagcacccatgtgcccttcacctagattcacccatttttaatattttgccatatctgcttcccatttccctggctcttgcatgtcctctgtttctctctttccatggaagactctctggggtcaggcatgggtgatggaagggatgaaaaacaggcccacctaaccctgcttgcagatctgactcctgtgagcttttgatgtgttttcattgttccttgtgcacttcctgactttctgacacaagatgtttcatgttcaacctgtagtttcccctccccagggccagaatgaactgtttctccaagcatgcctggtttctttgaatgaagaatggtatttagaaaccaagatctagaactaggtgtgttcactgccagatttgtcatggcctccaaggccttctaagcagacagacctagattctca

SEQ ID NO: 181775 - DNA, 1365 bp, Homo Sapiens
tcccgggaggcatgcggatgctgacgatattctcagtgccccacacggcaggtgttgctgctgatgctcagcgcagtcggggggcctcgggctgggcggttgggctcgagggtcaggctcgggggtcaggctaggggctcgaggctctgagaaggactcaaaaagaaaacctagaaatcagaaacagtaccagaaatgaagcagtggctcatgtgcacacgcggctgagggaagaatcagcgagctggaaggtgttagaaacttcacaaactgaaaagcaagaagaaatgagaataaatttgaaaacagaagaaaatggccaagacctgtgaaacagcgacaacaggtgcagcttgtaaagggaaccccagtaggagtagaaggaaaggaacagaaggaagatttaatgtagtaatggtttagaactttccaaacttgtaactgacaccaaaccacagatccagaaagctcaacgaatgccaacaccaagcaggataaatgccagaaagtcaaccccaggccaccttgtattcaaactgcagaaaatcaaagaaaaaagagaagatcttgaaagaatccaggagattccttataggcgaggtgattccttatctgtaaaggaacaaggataacaattacattggaccttttcccaggaaccatgcaagaaggaagagagtagtgtgaaacatttaaagcattataagaagaagaatatcatattcagaaaaagattattcttcaaaagtgaaggaaattgactttgtcagataagcaaaaattgaagtaatttgttgccagtagacctgccttgcaagaaatgctaaaagaagctcttcaacggaaggaaatatcatatagcccagaaactctggtttacctaaagaaagaaaaagcattagagagggaataagtgaaggtaaaatgaaatatatttttcttacccttaattggtctagcagataacttttgctcaacgtaacaacagcaaccatgtattggttaactgcagcttatggataagtggaatgaataacagaaaagtcataaggacaggagggaggaatttggggtactctgttataagaaacctgtactatcgttttaaggaatatagtattatttaaaagtggacatggattagttatacattatattgcaaactatggcaaccactaaaaagctttttaaaagaagtataattgatgtgttaagagaggagagataatggaatcatataaaatgcccagtaaaagccagagaaggcagataaagaatgggagaccccaaagatacaaagaacaaaggcaacaaatagaaaacttacaaatatggtaaatattactccaactatatcaacgccaa

SEQ ID NO: 181776 - DNA, 1054 bp, Homo Sapiens
  misc_feature (46)..(65): n is a, c, g, or t
  misc_feature (110)..(149): n is a, c, g, or t
ttgggtcatgtttctccacataaagttactatttttcctttgcaannnnnnnnnnnnnnnnnnnngagacggagtcttgccctgttgccctgcactccagcatggatgcnnnnnnnnnnnnnnnnnnnnnnnnnnnnnnnnnnnnnnnnacaaacaacctactttttgtataggtatagtttgaacctagtattcagaccagtaaaatgaaaaccttgcagtaaatgcttcccagtctttattgggctaaaataggccacgtgtgcttttagaaagatggccgcataataacatgtttattgaatgcctttttacctaacatgcaggttctactttattttcccactttgtacaagacaagcagtttttgttcttataagtagtgaggaagtcaatatagtagatttacgacattgcattttcaagccactgggtgtaaaaataaaattactcaaaatatgtaaaaccactgaaaacaatgatttaattgaaccagtcaaacattatttaaaattgagagctggtgtcccatccaggtaggccacttttaaaagacagattttaagtttagtctttaaagttttcaggctgtaccatgttgtccttccattagatgtctgaaaacttgaaaaactgccgtatcatctcacagtgatgcttttttgtggtgtgggcagggaatttcaggcacacttttgccaatcccacaccagggaaagctatagtctttggttgcctgtggttaaggaattgagttaaaagtttcctttttatctcagggatttgcaggagttatttattcattcatcagatatttacttaactcttaactcatgccagaggcacttgaagatacctgattcctgtcctcagaagtttagagttgagatgtggggaaacggagaagtaaataagtacagcagacggctaaaagtgctgttttaatagaagtttgcacaacccaaaggagacagaggtctatataaggtccatcatgggaatcagaggttgaggatgcccaggttgatgaagcttaaattgagcttccccttta

SEQ ID NO: 181777 - DNA, 1242 bp, Homo Sapiens
ggcccagtcttaggagtccccacccggtgccggtccgctactccctgtggccaacacatcccgcctgcccaggtccagcgtgttttcctcccagtctgtcacccagggcagggccagaggcaggtcatacccagagcctgctggggcagccctcaagcctgtcttcacccgggactgaaccaaagtgtgcagggacagcgctggtgcgggagggatgggcagggcagggctcccagcctcccgcagccttggccttgctccatccccgggagcagcaggagcagcgggtcctccaggactggatgggggcatctccccactcctggtggacggacaggctcaggtgattccttcaggcaggccctctggctctccagacgcatctcagcgcctagagaatgggaaaccaccagcacagttaaacagtttacagaaggttcagcggggcaggcaccgggggtcacactggtgccaggcaacaccactggaagctggcagtccccggcaaggactgtaaaatttatcatcctggatgtcttttctctgtactttaataaactatgagtaaactaacagaagagcactcctgcgtattagagaatccgaagacgacaggtgggatagagcccaaagcctatgtggatgcaaatcagtaagaaccacccgagacagcgacagacaggtgacacggagtgcctgcatcccagctgcaaatcagtaagaaccaccccagacagcgacagacaggtgacacggagtgcctgcatcctagatgcaaatcagtaagaaccacccgagacagtgacagacaggtgacacggagtgcctgcatcccagatgcaaatcagtaagaaccacctgagacagtgacagacaggtgacagcgagtgcctgcgtcccagatgcaaatcagtaagaaccacccgagacagtgacagacaggtgacagcgagtgcctgcgtcccaggtgcaaatcagtaagaaccacccgagacagtgacagacaggtgacacggagtgcctgcgtcccaggtgcaaatcagtaagaaacacccgagacagtgacagacaggtgacagcaagtgcctgcgtcccgggtgcaaatcagtaagaaccacccgagacagcgacagacaggtgacacggagtgcctgcatcccagatgcaaatcagtaagaaccacccgagacagcgacagacaggtgacagcgagtgcctgcgtcccgggtgcaaatcagccaa

SEQ ID NO: 181778 - DNA, 774 bp, Homo Sapiens
caactttgtacaaaaaagttggcttattgcgcccagcacgcctggcgccaggatgcaggcactccgtgtcacctgtctgtcccatactgtctcgggtggttcttactgatttgcagctgggatgcaggcactccctgtcacctgtctgtcccatactgtctcgggtcgttcttaactgatttgcacctgggacgcaggcactctgtgtcacctgtctgtcattgtctcgggtggttcttactgatttgcacctgggacgcaggcattcgctgtcacctgtctgtcactgtctcgggtggttcttactgatttgcacctgggatgcaggcactccgtgtcacttgtctgtcccagtctcgggtggttcttactgatttgcacctgggatgcaggcactcggtgtcacctgtctgtcccatcctgtctcgggtcattcttaactgatttgcacccgggacgcaggcactctgtgtcacctgtctgtcactgtctcgggtggttcttactgatttgcacccgggacgcaggcactcgctgtcacctgtctgtcactgtctcgggtggttcttactgatttgcacctgggacgcaagcactcgctgtcacctgtctgtcactgtctcgggtggttcttactgatttgcatctgggacgcaggcactcgctgtcacctgtctgtcactgtctcgggtggttcttactgatttgcatctgggacgcaagcactcgctgtcacctgtctgtcactgtctcgggtggttcttactgatttgc

SEQ ID NO: 181779 - DNA, 910 bp, Homo Sapiens
  misc_feature (57)..(98): n is a, c, g, or t
ttggcgcttttctaaccacgaacagtgctcgttcgttcgcagggccagcaaggagannnnnnnnnnnnnnnnnnnnnnnnnnnnnnnnnnnnnnnnnntttggatcccgcggactccgcccggcccggcctccccaggcatggcgccgctgcgcttctccgccaatctgtcctggctattccccgagctccccggcctccccgcgcgggtgcgggccgcgggcagctcgggcttcgaggccgtcgaggtggcctggccgtacgcggagacgcctgaggcgctggcgcgcgccgcgcgagaagcggggctgcggcttgtactgatcaacacgcccccgggagaccaagagaagggggaaatggggctgggggccgtccccgggagacaggcggccttccgagagggactggagcaggccgtgcggtatgccaaagccctgggctgtcccaggtaccccgctccaccccacccccacccctgtgacccatgaccctgatgcaggttcagggagtcgaggacgccagatctgagacgctcagaagtctgagcccactggtttatctctgcctctgcggtcctggtcctttgtaaattgccttttgtattttatctgtcttatgccactctgtttgccactctttcatgctcaccccatgctgggatcccatgctgggagctcagtctgcctaggcagataggagagtaaatatatacagtgatgcatttgaggacaggcctattccaggaagctgtgggagcagggtaggcacctaaccctgtctggatcagagaaagctgcttacaggtagtgatgcttggactgtcttcaagagtgggcattgcttgatgggcaggaagttgagtgttccttgcaagggtgctgtggcaagaggaggcctggtgtatttgg

SEQ ID NO: 181780 - DNA, 696 bp, Homo Sapiens
ccacaaactgaaactctgtacccactgaaaaagagctccaaattccaccctcaccccagaccctggtaaccactatttcactttctttctgaatttcccttcatatgagtgggatcaaacaagagttgtccttttgtgtttagcattcttacttagcaagccatcaactgctcgaacagtcactggggcaactacttttcgcccagtgtcctccagaaaagaaagatctggagggtcaggccactctttttcttcaaaataatggggtgcagaagggtagggatgaacctcttcctcctttgccactttagctttagctcaaaggaactccaactttttattatttgcaacagttagctttctttgtttcacatctctgccttgcagaaccatgacctatcaaggtgttttgtcaaacaaaaactaatactttccctgggaaaaagccatgtggtagcaagtaccagaaatttttatggccaaataatacaccactatatccatagaccgcatttggtttatccactcatctgctgattgtttccccctcttgggtattatgagtaatgctatgaacatgggtgtacacatctctcttgaagtcccttcttaggtcctttagggatacatatccaggagcagaactactagatcacatatgctaacgtctgaatgtccccccaccaaattcgtatg

SEQ ID NO: 181781 - DNA, 1745 bp, Homo Sapiens
ggtacatcagacatgactgcctgcatgaagtcaaacagggtaacaccagtgaagctcaagtcaagagctgtggatattttgtctaaccaacaagaagtctcaagaaatcaggcagtgcagctgcctgctctcagctatcgtatccagccaaaagatgcatgatgatggagtggtgggggaaggccagttcagtatcctatttaaaagtaaacttcctgaataatggatatatgtggagatacagacatagatatatagatacagctgtaattatttagcctcaagtgactttctccattgcttcacgctatgccactattttgcttctttaatttttttaaccttgcttagtattctatagtttgcccaaccagttttacgtccaaggaaaattagccaatgcataaaatatacaaactatgaaaggcaaggatcaggaaaccagagactttgccaccaaatctcagattattagaaactaggtgtcagggtttatcaagaaggccaggaaggccttttgggttaagccttacattcatgaagaacctcgagggtagatttttgagagcattccaaatgaatggtctctggtcaaatgaatgaatggtcaaatgaataaatctgccctcacagagatacaaaaggaaaaggaatataattcataccatttggtttaagccttacattcatgaagaacctcaagggtagatttttgagatcattccaaatgaagtcgaatctgccctcacagagacacaagaaaggaatataattcatacactattgcatttttaataaatcttttgaaatttgcagaattagattgtattgtgtattttcggttaaatgataattgaatgtaaatatttagatgcagcaccatattttataacccagctttagcatttcttcatattttaaggaaaccccccacctccttcttttaagggcgcttcttgctctctgaaatgccctgctaaatgcttctcttaattatttgaataaggtagtttggaataaagaaagaaaagatcactctacatacagatagtaaacttaatttgtgatcctatatatgagacagtataaaaatacagataagttttagaaagactcaaaacaatatgtaaatgactgatgtttgcattattaaggaagacttgggatgttgggtcaagaggggaaagtgttagtcaatccactttggagcaatatcatgaaggtcaattataattccatatacctttctttgatgccacagtcagagatagaatacagtttgggtggccatggatgtgccccaatacagtacacattttttggttaaatttgttttcagatcatttcatggaatctttgaagtatctttgactctaactttgacttggtggtggaccttccttggtttttataacacctaagagatatcctttagaattacatgtattttagcataaggaaattgaaaaagtaaaacatactggtttttttcaacaagaccatatgtaaattaaatagtgaaatgtgtatgagtttcagtagaactgtaccatcaacaatgtttccataaatatgcagagttctttcttttgtattgttatttacaatattgttaaattgaatgcatttgcaatttctaggattctaaagaattgagtacagaaagtagcaattttattatttgatgataatatgagaattactgtgccaatactgttttgataaataaatagatttttaaaaat

SEQ ID NO: 181782 - DNA, 1292 bp, Homo Sapiens
tcaggagacagagcaaagcagagtgccgggtgggtgaggaagctggccgctggagagccaccagggagagcaagccagcagccgggcagaagcagagcctgcagatgctccctggaggtttcccctgctggtcctcggcatgggaggtgggccccagcagctgctagagagtgaaggagctggaccaagccccgggggaggaaggcatcacggcaagggaagggtcgcagtcacaaccacacctcgagagggagacctgtggccaaagcccgggggggcacacactacagctgttcccgtgcccactttggtcctgagagactcagggccaggggtccagaacagttcagcatcaggaatggggcggggaaggcagagagggagaaggggctggctccgaccagagcagagccctggggatagcttgaatctgccctcacaccctccggcctacctctatggagccacagtccactgctccagcccctgggcaaccccccggcccgccctcctggggacacagaggccatcaagggatgggctacggtggccggtgcccaggccagaccagggccgtgggcgtgctcagttaggatcaactgttggatgacgggatggccgcgcgggtgaatgcagggacgcgaccagcaaggcccccgttcaaatggggcaggggtcggaagctgctcacacacctctcaaaaatgaattccaccctccagcctttgcacctagaactcttcgcatggcccagctagtggctcagctgtggtggtcgagtcctttcattcactcacctggcgaaaccaacatcccacatactctaactgagccccactctgtgccaggctggtgctgggacaccctgaggagacacggggctggtcaagggcaccccgggatggccaggtcaggaactggggagggacaaagagagggagatattgagagagaggaagacgaggaagaaggcaacagaagcagaaaaagcagggactcaaggagccaggttaaagggctgcccctacactcaagggagcaatgagacccctctgccggtgcctcagaaaagtccagaaacccaagcaggatggggacgtggggagttaacttttgaaagtttttagggctccaggagccttgggcacaaaaccccagagaacctgccgggggccagctgatttcttccacgccctctccgggctttccaatgtccacaggagctactgcagcactaacagtggctttggggcctgtatgtgaatgactgccatgtgccaacttttttgtac

SEQ ID NO: 181783 - DNA, 2321 bp, Homo Sapiens
  misc_feature (1919)..(1975): n is a, c, g, or t
ttggctgaaaggtaaccttagccctgccttgtgttccaaaagctgcaaggatcatttgctggctgtccctaagttcaaggcctccctaccttccccttcttttccaagtcacaacccgccctgcccgggccagacagcccagaagaacacttttctgccatttaaaaatccctctttcatcccccccagtccagtattgagtggaagtgcgccggagttccactgacagggcagctgctcttggagcaaacaagcccacactccagttgtttagggcattatctgaagagtcagtgacccctgaatgtgtactggctcccaggcctcctcagacttggcccaggtctagtcagtgatcctggagaggaaactggggagggggcttccaactgccctgcatggaagaggagaggaaggtgcccctgtgtgggctggaagcctgcggaggttttgccattgctgatcttgatagaatcctaaaccgatttatagctgataacagttccatggggagagaaatcctaagttatgattaatgtttttccccgctataatatcttgcctgtttttttggattattttccccattgtgatcctaagctcttaaaaaacttgagggaaaacattcatctaatttactaaaagagaaagctttccattgaaaggtagatactttgaggagtaaaaagacttctttgaatgctggtaaacaccgcatttattttgtgtatgcagtttgatttgcacatgtataaatgggatgcttttcatttttgtttggactgggtttgtgtcactgctcattacagtttgcttttttgtgtgtttgctgtgcgtttggagatattagtcagtttctttagtgatatttgtttccttgatgtgccttttcgtttttctttggggtttttggaatccggatgctgttgaagggcaatagcagactcctccagctaagagacaggacatgttcttgagccactgtagctgttgaagctggacaccagacgctccctataacccccccgccaggccatagcgtgtatgcatgtgcacttccacccacagaggagggtgtgaagccttgagaacctcaagaaagggctggattctgccatacctttgggtctaccttgggactgctggttgccaacgtgtcaaccagcctgtgttccctgccacccacgcacttgctgaggtgtggctgaggcagaatcatgtgaatgggtgcatccaaggagttcagggccctgcttggagaagaaatactttagcatcatgaaagggaaagaacgtgcaccccttttttgtttctttagtgaatgcaagatttaataaaagtgaataatggcttcccctttgggagtggagcccagtgcagctcactgacagggttgacatcagtatgatgtgttggactgaaactgtatgtctgtaggtaggtgtgtgccttttagggcagaccacggtggccaccccatttctccaaggtggtttacctagcttgtgtatattagacattgccaccctcacctctggccaaaaattcttgatttaaaaagaaaagtctattttgttaacgacaggctctgttgtatgtgttactatcccaagcctggattattttatttatttaaaagtattttaatttccatattggctttattctaatcccatccatccctgtggagctgcagagcatcttcatgtgagtagacggatggacataaatagattcatgctcatttaggaagctgggagtttcgtgaagctgagggtgagttcctgtgattcttgttcgcttcaacaaaaagtgggagaccaagtttttatagcaaaagaccaaattagctgtagagtcttgaatgcagaaaaaaattaccctagctttcttagcacttagggttttgtgaggattnnnnnnnnnnnnnnnnnnnnnnnnnnnnnnnnnnnnnnnnnnnnnnnnnnnnnnnnnattagtgtttcgtaaaacttgagaaatagagctgagctcattcccttcctgttgattcaaaaataatacctacatgaaaacatgattccaagttgattgaatgttgtagaattactggtttagagtagcccagttctcgggcctaccctgctggttgggatcttactgtattcttgaatgcactggtttgaaaatatgccagacttcagcccccaaggaaacaagggctgcagaatttatgaactccagctggaaaaggtaaaggggacctttggctagccacatactggacttaccccctgacgtcctttcaaaacatccaagggttttcctcaggaacattttt

SEQ ID NO: 181784 - DNA, 1410 bp, Homo Sapiens
  misc_feature (432)..(497): n is a, c, g, or t
tgtacaaaaaagttgggcctctccctccctcacacactgcacgtcaccctgtttggccccggtggatggctggttagccagagacgggtaagattcctcagggaaggaacaacctaagacaggcacagtcgcagaggggccatcaggagagaacttgggggcaacagaggtggggcatggaccctcacccccacaatcctacaggggcctgaaccctcacaccttctgagggaggtctcctgcccccatggctgctttgcttcccacgcccagttcagatcgggacccaggtagcagacagagacctggccaacagcaagtgcccactcaccacagcaaggatttgtttctcatttctaccttggaccacagggatggggcagctgaaagaaagggctgtgtcagggtgtctttctcccttttctccctcannnnnnnnnnnnnnnnnnnnnnnnnnnnnnnnnnnnnnnnnnnnnnnnnnnnnnnnnnnnnnnnnngtctgtctcctatacctccccatctctcccttgcccctgccccatcttgcctttttctctttttcctccttttcctttcttattcctttgcctctcctcttcctgagccccacctgctcatctccctgccccaacatcctgtgccatccctgtggtgtgtttgggtcttggccaaagccagacctggcagaactgatggatacctggtgaggcagcggagcccctgggctcccaccccattccctcctcccggggctgcacaggtgagtaggtggaaggtaaggggggcagggaggggaaagaggtcctgggcttaaagcctgggcttggagtactgctccttgacactcagggtcaggcagagagaaaagagacagccttcaaggcagtccatgtctgggtgccccgggtcaggtggggagtgggggccatttttccctgagcacaggctgggagggagtggagggatgagcaggatgggatgggctgtccctcgggtttggtatatttgctcctagagcagcccaggaggcacggtggctctgaagcatcactcacttctgtcccgttcttgacagcgccattcgcgaacgatttcccaagttactacgcctggatggccatgagctacccccaccaattgcctttgatgttgaagcccccacgacgttaccgccctgcaagggaagctattttggaacagaaaacttgaagagtctggtcttgcacttcctgcaacagtactatgcaatttacgactctggagaccggcaagggctcctggatgcctaccatgatggggcctgctgttccctgagcattcctttcattcctcagaaccctgcccgaagcagcttagccgagtatttcaaggatagcagaaatgtgaagaagcttaaagaccctaccttgc

SEQ ID NO: 181785 - DNA, 1116 bp, Homo Sapiens
ttggcatgttcaaatattctattattgtgacattcatttttttcatgctttttatatgaggggaggcctaaaaacaaaaattagaataaatatgaataatatgtacttcactttaggagtctttcatctgagttgaccagaaacattgtctttaagtttctattcatcattgcatctgcgtccagcattaagacagctactgtgttttcttgacttgatgtccttctcatcaagctgtgaatgtatgtgaaagagaagggccctgtttagtacagaccatgggaaggtgatgctgtgtataaagtattgccactctagcatgtaacatcatagaacgcagcatgaggtacatcacagctctgctttgctttggagttaaattcagagtagtgattttatgtttttaaaaaatttatacttaagcccttaggtatcttaacattcgcttccagtgaggcaccgctgaagctctcctgctagtcggcacaagtctttgctgtccagggataccagtgttttcttgagacagactttttattctataaatctttataaagtttgcactttgggttgaccttcaggtataagacatactgcctttgtttagtacttaaaaaagaacaaaaactaaatctgaacagagccaggctttctttttcttagaattttgtgtctacttttataccatgtaagtgcccagaggcatcttaagatggacatgattttatcaatcttaaataaaaataaatgctttataggtttgggatttgcaagtgtgtaatatgctgcaagccagcggaatctgttgtaatacaataaagtttattgtaacataaaccaatttatcaaaaatatggctcatggattactagcctattccataaaattggaccccctatggagtatttcatattaatttattatacctccaccgtgtgtgttattacttagcacttattacatgccaatgatttcttaactctgaacaaaatcaaaagatggaacttgacccaggccaaaaagttgtttgatactttggcacagtagcaaggtagaagaagaaagtcctgctttcctatatgccgcctttttggcgcctgtgccctagtatacttt

SEQ ID NO: 181786 - DNA, 1035 bp, Homo Sapiens
  misc_feature (819)..(885): n is a, c, g, or t
ttgggttgagtcaactcccagtatttattttttcctttcttccagtctgactccttggctggagaagtgagcaaaagttttcagtaggggtaggcactgcttggaatctgagcagcaagggtgggaactaaacagaggaaaggtttagggaaacctcccctccctcttccaccccctcattctcccattctgggggccccaagctgagggggagagaggagcaattaaaaccttgggggagtcctcacacgccccccttccccaccacacacccaaacaaggacacagcacagccctccaaaacttggaggtctctttctcattcttgggtcttgcattcttcccttttcgtttttccccctctccctcagaaggaagaagaggtggcgggagagggagggagggaaacgctgtgttccctggaagaaaggactctctctttcgggggcaataaaactttctctttctccctctctccgtgtgtgtccagtaaaccccaattacgccggcggggagcccaagcgctctcggaccgcctacacgcgccagcaggtcttggagctggagaaggaatttcactacaaccgctacctgacacggcgccggagggtggagatcgcccacgcgctctgcctctccgagcgccagatcaagatctggttccagaaccggcgcatgaagtggaaaaaagaccacaagttgcccaacaccaagatccgctcgggtggtgcggcaggctcagccggagggccccctggccggcccaatggaggcccccgcgcgctctagtgcccccgcacgcgggagccacgaacctcnnnnnnnnnnnnnnnnnnnnnnnnnnnnnnnnnnnnnnnnnnnnnnnnnnnnnnnnnnnnnnnnnnnccccggaaaaatctatctgccctcccccacactttatatacgaataaacgcagaagagggggaggggaagctttatttatagaaatgacaatagagggccacggggaggcccccccagaagcaagattcaaatctcttgctttctttctt

SEQ ID NO: 181787 - DNA, 1192 bp, Homo Sapiens
  misc_feature (806)..(857): n is a, c, g, or t
ttggtcagtgttgagaagagggcagatgattgtgccattagatgtggtggtgctgggggtgtggggggagaggagagaagtaacagtgtccagaggatgttggcagcaggctccactgcagtacccctgagagcgacgccgcccacctcctggaagcgaccccgcccacctccccgagagtgcccccacccatctcttgaggagcgctcccccagctccctaagagcggccccgcctagtcctgagagctgctccgcccagctctggagagtggccccgcccacctccccaagagcggccccgcccatctctggagtgaccccgcccacctccccaagagcagccccgcccagctccggggaggccccgcccacctcttgaagagcggcccggtcttccagatgttggtgttgcccacgcagccccgcggcgggtcggtgatgttctccttctcgaggagctcgtgcacggcctgggccaccacgcccacggcgtcgctgatgtgggccgactcgttcttgccgttgatgagctgcagcccgaggatgcctaggcgagcatgcgactcagagcccgtggggtcctccccgttcggggaccccgccaaggcccagcactcaccgtccggggcgtagcgcagggcgttccccgagatctcgcgctcgccgaccagccacacgtacccggagcccgtcatgttcagcatcgcggctgcgcggtatacagtggcagcatcgtcctcgctgtggggcagacggggatgacgggccaggactccagcactcccaccgcggcgctccgcaggnnnnnnnnnnnnnnnnnnnnnnnnnnnnnnnnnnnnnnnnnnnnnnnnnnnnagagcgaagcctgcagaccccgcagaggcgctgcggcccagaacccaggagcctcccaggcctccgttgctggctcttaccttgggggagcagggatggggttagatgctggcccccttaccttgggggagcaggggtggggttagatgctggcccttaccttgggggagcagggatggggttagatacctggcttatggggactgacttccttcttgtgacctgcacctgtgctccccagcacgcccttccctccacctcagaaagctctgatggggtcccaggatggtaatgggatcatcattgatcacttgctggccagataccaggcactg

SEQ ID NO: 181788 - DNA, 1365 bp, Homo Sapiens
ttggctcagaatcaggagaaggaaatgctgcttagattaaatgcgttgttgcatgcacttaatgaagttgatcctggtgactggcagaaattcgtgaagaagggactcaaatttcggtaccaggaccacacatttttaaagatgctcctcaccgccgtacagctcctgtacagcccagaaagctccgtgcgcacgaagctcatccagctcccggtggtctacgtgatgctcatgcagcactcgctgtttctgccgactctactgacgtctgacggagaggagagcccggacagccaagtaaaagaagcgctggtggacctgatgctgacggtggtggagatgtgcccctctgtctgtgagagcagccactttgcagtgcttctcggggcctatggcgccactctcagcgtcctagatcagaagattttacttctgcttcgagcgtatgagcagaacaagctcagcctcatcaacttcagggtgctgctgtggggcccagcggccgtggagcatcacaagacgtgccggagcctgggcaggtcactgtggcagcagccgagtgtcggggacatccttcgcctgctggaccgggaccggatgatgcagaccatcctgcacttcccccagaaccggaggctgctgccccccgaggacacacaggagctgatattcaaagacaaaagcagggtggatcttgatggcctctatgacccctgctttctccttcagctcttcagtgagctgaccaggccagagtttgtggtggattgtcgaaaatttttggattcaaatgctctgggcctaactgtcacagccctcagcagctatgacccccagatgcgagccatagcctaccatgtcctggcggcctactactcgcacttggagggcgcacggttccaagagcagtcccagctactttacctgttggatgtagtccggaatgggattcgaactcaggacatgagacttacttttaccttggctctcttcattgccaaagcagccctgcagattttgaaaccagaggagcacatgtacctgaaggtcagcaacttcctgctgtcgcatgagtacttgaacatggacaaagtgccaggcttctaccagttcttctacagctccgactttgagcaaaaaacagagcagaagtgggtgtttggccttctgcggcaggggatccgtgacaagcagtgctacgaactgtgtgcccggcgtggcatcttccacatcatcctgtccttcttccacagcccgctgtgtgacgaggcagcacagaattggattctggaattctacagaatgctgcccaggttgccagatctgcgtatgaaatcatacgagactatagccttttaacatgga

SEQ ID NO: 181789 - DNA, 1354 bp, Homo Sapiens
  misc_feature (319)..(375): n is a, c, g, or t
  misc_feature (401)..(410): n is a, c, g, or t
  misc_feature (1235)..(1283): n is a, c, g, or t
catttcaggtaagtgcagtctccctcgctgtaaagattaccaaggacttggaaagttttatcttcaatctgcatgctataagacccatcatggttatacgttacagctatggctacatctttatggaaaaagggaaaaaatgaagaaaaattagaagacattcatttatttaataaccgagatataaagaatctcactctcaacctaaagacaaccaactattcaaaggaaaatcaacaactttgaacttcttggaaataaagtattttgttagaaaagcatctgtcaagctagtaccaataaagatgaatttcaaacnnnnnnnnnnnnnnnnnnnnnnnnnnnnnnnnnnnnnnnnnnnnnnnnnnnnnnnnnagacagggtatcactctgtctcaagnnnnnnnnnntgcaatgaattggtaaagagaagtttttggttgagaatggaatctgccacctgatcacctctgtcatcttgactcactaaatctccgagccttgattttctgagccattaaatgggtataaaaatgtaacaattattaaacaaatatgaaaatgctttagaaatggtaagactatatacacctaataaatgattcatgttacaggcacatctcactttattgcacattctgcagatactatgttttttacctattgagtttgtggcaacaccatgtcaagcataattttccaacagcatgtgctcacttcgtgtctctatgtcacatttttgtaattcttacaatatttaaaacttttaaattattatatctgtgacagtcatctgcgatctctgatattactactataattgttttacggtgcctcaatctgcgcccatgtaagatagagaacttcctcaatcaatattgtgtgtgttcttactgctccactgaccagccattcccctgtctctctccctctctatgggtctccctattccctgaggcaatacaatattgaaattagactaattaataaccctacaatggcctataagtggtcaaatgaagagttacatgtctcccactttaaatcaaaagctagaaatgattaagtttagtgaggaaggaatgtcaaaagctgagataagccaaaagttaggcttctgatgccaaaccaccaagttgtgaatgcaaaggaaaagttcttgaaggaagttaaaagtgcttctccagtaaacacatgaaggataaaaaggtgaaatagctgggctgggagcagtnnnnnnnnnnnnnnnnnnnnnnnnnnnnnnnnnnnnnnnnnnnnnnnnntgagcctgggagtttgagaccaccctaggaaacaaagcaagaccccatctctaaaataataataatgccaa

SEQ ID NO: 181790 - DNA, 1367 bp, Homo Sapiens
  misc_feature (1155)..(1179): n is a, c, g, or t
ttgggttctatttaagaaatcgttgcttacttcagggctgtgagtgttttctcatatggaggcacatttaaatatgtaaatgacctggaactgattattgtataaggtgtgacatggatgtaattaaagaactttaaacaaaagggtgatagtaatttgataattagatagtagaaaatagaagtcgaaggctgagaaatagtagaaacctgttagtatagtctgattgcttaaaatctgctagcttatgaggaagattaacaaattaatatattcaagtcaaattgatgagatttcattatagactgcctatgggtggagggagaggagatgctgaagaggaacgaatggattttgctttgagaaactgagtctgtacggtgccatcaaataatatggggaaaagaatggactgtgggggcaatagcattaagtttagtagatgctaacatactgagttttatgttcttgtgaaatatcttaaggagaaatacacatctaatactgtactttggatttataaaagataaacacagaattttattttctgtttgtaggtagtgctataaatacaaaaatagaaaatatactactggctacatccatgttttattaacataattttttgtgaattcatctgtagagcctccatctacagcagcaatggggcccggatcttccagacaaaccctggatatatatataggtctgcagctcattttaccctttatagggataagaaatcaccatcactctagaacttccagaattgcttattagatttctcatattatttgacaatacttacatggagtttactgtacacataagtcatgcagtaactgtatttttattgagagtattaatcccttggtttcaacattgtttttgaaattagtaactaagtaagtacttgaatatgattggatgggatctcatactcaaaaggctgaaagcatcttaatatgactttctcaaaggaacctaaaacttaaccaagtccaaaagggaatcatttttcattttttaacagaatggcgtgggatggatttatgaattttctaggtaattgtcatttaagtattttgcaaagttcgtagaggtcaccaatactgcaaatatgtatgagatgtaactgtaagatacgcagctaannnnnnnnnnnnnnnnnnnnnnnnnagacataccagggtctagagagtctagaagaagtctgtgtatatcattctggagtacctattttccatgaggggatgaaatactggagctgttgtagaagaaaaacttctgattttaatacattcttagcccaagagggctgtacaaaagggaaacacatgtggactaaaaaagatgctgggaaaaaa

SEQ ID NO: 181791 - DNA, 1131 bp, Homo Sapiens
  misc_feature (215)..(341): n is a, c, g, or t
ttggatagactagtgggatagaattgagagtcagaaatgaacccatacatatatgatcaacttatttttgacaagggtgccaagattattcagtggagaaagaagtttgaaaactggcacaggggcaaccagatatgtaaccatatgcaaaacttggagttgaatctttacccaacatcgtatacaaaaattatggatacagaaaaatggatcannnnnnnnnnnnnnnnnnnnnnnnnnnnnnnnnnnnnnnnnnnnnnnnnnnnnnnnnnnnnnnnnnnnnnnnnnnnnnnnnnnnnnnnnnnnnnnnnnnnnnnnnnnnnnnnnnnnnnnnnnnnnnnggcgtgagccactgcgcccagctgattttgttttttaaagtgttatattttcattcattcagagttgaattttgtaatctgaattatggagtcatatcaaatggaaccaaccagttaaaccagtaacttatagtgtatttcactttcttcaattgtatttttcctttagtgaacaggtggaagcattctggataagggagtagtgagccctttaaatgccttacctttctctaaaatagggtatggtctgtatttgcttcagtactccagagcaatgccattttattgtatttaagtcaatccattttacaaaacagaagtaattattctgtcacaaaaggaaagacgccacttttagtacgtacatatattccatattaagaacaaaattaagtaactaaacttaagtttcttagagttgcctggatagtgattaaatgttcttctcatcttaaaatattgtttgtcatcttgaaatttatgcaagtaagtacaaagttatataaatatactgagttttcattattgcttttctgaaattaaccccagccctagcctgaataattatccttttgactatgcaaaaggtatatttgtatgtcctccaaaacacacattgtgctttgcatatagtagggcctcaatacatgtacaatgtaaggatggatataatgatgtttgtaatttcccacggtaatgtcccatgtatagtctcttgatttagaaaatctcctttaatattttctcagagtactgcatttaaaacaatggtgaaaaccattgggacttt

SEQ ID NO: 181792 - DNA, 1078 bp, Homo Sapiens
tttaacagtgaaaattaaaatggaaagaaagagcacagtaaatggtgatttactcaaatcaatgattttttactctcatctctatataaaaaaagatgctgccttggactgacaataactaggtggatttctataaatcttgtccccaagtttagaagaccttttagcaatgtttgtagtactaaactgaaattctaaccctgcagagaagctacggaataccttatctgagggagacagacatgagctgaactcttcttctgatgctttatgaatgagatgaggcttgttatctagcctctcagaacttaaatttcctcatctgtaaaatggggattatcaaacttaccttgaatgcaactacaagcattacatgagataatttaagtgaattattgcgtaatggtacgcacatgaaagatgtgtaataagtgcttataaaatacatgaattagtttgctagtgtatttccactgattgcattcttgagactaaaaaagcaagcctgctattcagaaatctataataataataatgagtttctatttatgggccttctaatacatgcatattacatacacagtcagtacagggcagtaataaagagcatggtctctaaaacccaactgcctgagtatgaagcctggctttccttcttaccaactttatgaacctgtgtctcagttttatcatctgtaaaacaggggtgataatataatccatttatagactgctacaaggattcactgagttaataaagtaaagacccttagaaccatgacacaatagttaacgttactgaagtgttaaactggatttggcaaaagcaatataagagacaacttatactttctttgtgcttctaggattaaatgtcttgagatacttttggttcccaagtcccctttatgatctagtgagagtaactgactctccagaaaaatacacaaacaatacatacccacacagttctgcataagattatagaatgctcaaagacccttggcgctcatgcatggattaagctaaagttcccagatctaatttaactcaagagatgaaccaagacaaataccaa

SEQ ID NO: 181793 - DNA, 912 bp, Homo Sapiens
tgtacaacaagttgttccaaagatacttaaacatagtaaagtttttcagtaactgaattgaacatcaagtttgaaaaaataaaacccagttccttagtcatgctaaccttatttcaggtgctcaaagggcccatgcatctagtgctgctgtcctggacagagcggctctaagtgatctgcttttacacgctttatggtccgactatacataatcctcccattagtaactaaagtattggccaataaatttttcccaggcatacattaaacattcacaatactctgtggccatgtttaacttgggagcaagtagtggcaaaacctcctatacaaaaacgtgaccacacctcattcatgcctttgtagagctaagcaaaatgctttagatcaaaaattgccttgaattatttacgttcattataatctctcctctaggcctttgtgtgttttgatagagttcgtttgaattggctcaataaatcattttatttgctgcagaattcccaaagaacattcagatccatatacatgagattcctgctgcgtttagccatacatttgccagacttgtgatgtcgtttattccctgtgaaagctcaagtgcagcccacagggaggttttcagctgaccttgttgtgacatgcagatgaggtagtagagtttagaatttggaacggggatgggtactggtctttacagttaacacaacctggagtagcccatgccatactgtgtccttttaagtcagtaaattgaactaagtcggttattcggcaagcagttcctataaaaaactacatggctaaggtgagtgatgatcactgaaaggaattcattgacccactgaaaaaatgagagtagatgaaactactgcagtcatcctgcctgcccctgttagctggctgagccaa

SEQ ID NO: 181794 - DNA, 1186 bp, Homo Sapiens
ttggcgcggtggccgggtgccggtaagggtttccagcgcccccggcctaggttttggaggcgcgggaatgcgttcgttgctcagtgtcggacttccccctattcccatcggccgaggctgtcactttacgctcataaccgtttttctttactgcactcgtgtcgggaggaaagggacttgcgtggcacccccagacctccccgtctccgcttccacgtttggtacatcctgcctgaggcaggaagccgcagctgagggacggcctgtcgtacggtgcggatggtggtggcctgcgaggctcatttctagcaaggaacaaggctttcccgctttgattttataaatattatgtttacaaagctgtaatatatagaaattgataagacgtgtccctgtccctggaaacgcaggcaccgcgtgtttggaaagacattcatctgggctgtttgacagactccccagttggtgccatgctctgtgcttagggaactgtgagacccctggaggggtgggtaccgggaccgcactcagcctggggtttggaggcggcctcctataggaagcgacctgggacctaagatttttagactgactgtgggttcactggaataaaaaggaagaaacaaagagcattgcaggcatcgggactgtcacatttgacaagatcaaagctgcaggaaaatggacagtgaggttcagagagatggaaggatcttggatttgattgatgatgcttggcgagaagacaagctgccttatgaggatgtcgcaataccactgaatgagcttcctgaacctgaacaagacaatggtggcaccacagaatctgtcaaagaacaagaaatgaagtggacagacttagccttacagtacctccatgagaatgttccccccattggaaactgacgcttggctcctttcttgtggatggattttctcaaagtacacagataaagcatggtttgtttcagtctccaaattcaaacctttgagtaataaatcagcactcaaaatgtacacccatttagtttgtggtagcaaagtgcaatgcgaaattgaatgagaaactgagatttctcagtaatggtgaatatttcgctctttaaacctaaaactcttcattgagtagcttatatttgacatgattggttaaacatttgcctctacctctgattttgctttgctg

SEQ ID NO: 181795 - DNA, 1222 bp, Homo Sapiens
  misc_feature (660)..(945): n is a, c, g, or t
gcgaaccagcgccgcttcacgccaaaggacatgaaagtagcgcacagctcggctgcccccatgtcgaaatacaggtaaggcactgggatgtcgggcttccggcgtgcctcagccctctcagcgtacagcatgagctggctgaagcagctccaaaaggggcagcgtgtgagcagcaccgaacccaactgcatgatcagctgcaacatccaccgtctcgaacctatgttcgacgccatcttgggaaagggcagtccgctgcggcctcaccccagtcagagaagcaggcgcggggatgggacacgcagcttccgggtcaagcgctttttctttttcctcccggaaacaacggtgtcattctctagttccggatctaaggtgacccagttgcgaagtccagccttctcgtctgctcatggagccttcagggccatatttgtccctgcgaatttgaaaactagactagaggaaggaacagtgggttcaggatagcagaagtcttggaccgtagtatgatgtattgaagcaaactggtctttgaatgcagcccgatcagggccctaatcctgattccaaccctgtgtgattctgggcacatcacctaaactttatgagactcatcatgaaatggggataattacacctacctcagagttgtgaacnnnnnnnnnnnnnnnnnnnnnnnnnnnnnnnnnnnnnnnnnnnnnnnnnnnnnnnnnnnnnnnnnnnnnnnnnnnnnnnnnnnnnnnnnnnnnnnnnnnnnnnnnnnnnnnnnnnnnnnnnnnnnnnnnnnnnnnnnnnnnnnnnnnnnnnnnnnnnnnnnnnnnnnnnnnnnnnnnnnnnnnnnnnnnnnnnnnnnnnnnnnnnnnnnnnnnnnnnnnnnnnnnnnnnnnnnnnnnnnnnnnnnnnnnnnnnnnnnnnnnnnnnnnnnnnnnnnnnnnnnnnnnntgaccctgtgtggcacgcgatgtcctcttctgccctgctgtgaacatgtgggactaatacattgccatccatctccttatctagtgctgggtgtcatgtgtctaggtatccccataatcctggggtgagaatctccctttaccaatggggtgactaggaggcaattaaaacagatacataaggaaatgcatgtcataaaatgcatgctatctagcaagtttttacatggctaactgagaaactgcagcaaaaaacggtgtggagagttctgggccaa

SEQ ID NO: 181796 - DNA, 1388 bp, Homo Sapiens
ttgggcattagatacccccaatgagcggtctgggctttactgcatattgaatgttatgtgtatgtccatgacaattctcacaatatgactctccttgcaaagccatggtgggtgtggtttttattagttgtgcttttaattctcctgtatctgtaatctatatcaactgtgtctttcccatgtatctgtaagggtattttcctacaattgagtatcaatttgaggccaaatgtggaggaaaagttaaatattaaatgtgaactcaattgaacatggccacaaacaatggtcaccaagtcctggaacaggctgtgtgagctccttgaggccttcatccagtgctgttttggagaaatgtctattttaatctattcctatatgttagttattgaaaaacaatagacaatcgtaaaaacaagttgacctttttgtgttccttgagccttgtcgtgaagggccctcgtgactgggccttatgtcaaacaactcattacagaaagagctagagtcccagactgcaccgaagcttcatgagacctctcctcatctgtgcacgtttgagtggctgactctggagcccaggctgttgcttcccagactggtggtgaatcctccatagtctgggacaaatatggccctgaaggctccatgagcagacgagaaggctggacttcgcaactgggtcaccttagatccggaactagagaatgacaccgttgtttccgggaggaaaaagaaaaagcgcttgacccggaagctgcgtgtcccatccccgcgcctgcttctctgactggggtgaggccgcagcggactgccctttcccaagatggcgtcgaagataggaagcccgacatcccagtgccttacctgtatttcgacatgggggcagccgtgctgtgcgctagtttcatgtcctttggcgtgaagcggcgctggttcgcgctgggggccgcactccaattggccattagcacctacgccgcctacatcgggggctacgtccactacggggactggctgaaggtccgtatgtactcgcgcacagttgccatcatcggcggctttcttgtgttggccagcggtgctggggagctgtaccgccggaaacctcgcagccgctccctgcagtccaccggccaggtgttcctgggtatctacctcatctgtgtggcctactcactgcagcacagcaagggaggaccggctggcgtatctgaaccatctcccaggaggggagctgatgatccagctgttcttcgtgctgtatggcatcctggccctggcctttctgtcagctactacgtgaccctcgctgcccagatcctggctgtactgctgccccctgtcatgctgctcattgatggcaatgttgcttactggcacaacac

SEQ ID NO: 181797 - DNA, 1691 bp, Homo Sapiens
ttgggtcaaatggtactctatgtctattgggttcagtacagtattttatttgttttccctatcatttttacctttgaacatctgggtcagggttagacagatttaatacagcttattcagctactcttagtgtcatcctgccaaagacactccagtcagagagccagagcaggtcctggcccagcctcccttggatgtcccagggccctgccaccatctgtaaggggtataggacttctggcggtgacccgggatgtggtctgggtcatgccccacagcatctctatgtgcaatgagtgtatcctcaggaccgggggcaggtcaccctctctgtgaaacagataaaatgtgccacgttcttagaacaatgtcagcttacattgcatatccaataactcagctttcattcaggatagctataggatggtaaaaacagaagacaaagttgtgtatgtactttaatcccaaatttgagttattcgcaagagtgtatggacatagcgacgggggaaaaagccagataggagtgtgcttgtgtcactgatggtgccagcctaacagtggtctgtattatgggcagattttgttttattccttaacttctctcatgtttcctggttttctacatgcagttattaacagaaaaagacaaatagtggtgtctcctgatagcactgcacgccatggtcatggagagggcagagctgatgcaggggctagtgggaggcattggagctgtgggtcctggcaggggccttgggccatctccccagccgtcagctcatgggagccctgtggccctgaaggacatttaaattctaaatacacttaaatcacattttagtatggttgacgagggacatagggactgagaccagatcccgagcggatccatgtccctggcttccaggaggcctcctcacaggatgtgggcacagggacagtgtgagtgtgcagcccagccatcccttccaagggctgtgcctgctggttccagcaatgccctcaggatcacactgacagcaggggcaggtgagaagggagcaggttagcagagccagcaaggggtgggctgaggctttcttccctgtcacagcacaatttgggtgtgggccacgtgagatcatgggccaggcggtggaaaagacctcctgtgtgaggtcatctgcccgtcctcctggagccactgaccccaccatatactttccagagccccatccagcgatctaagtcatgactcaacagatggagtttctgccagctcccgagggtgcagaagccctgctgtctgggactggggctctagtcaggcatttattcatctgtcttatgacaaatatctcagcaggaaggccaggtttggaaagggacatgtggctcatttcacctctgccgtgtgcctgtgagtgacctcagcccccaactccctgtgccatctgcagaggggctgggcagctggccggggaaagggctccttctgcagcatggcagccaccctggctgggcccattccggttttcacagcttgttcgcatttgtgatctcatgtgagccacaccgttcagtggagggagctgggatctgaccagctgggccctctgtcctggccgccttcatactgtttctcatggggtcagatgaaagcccggaccataaggcgggggcaattgcttgtgaacctgaaatcccca

SEQ ID NO: 181798 - DNA, 874 bp, Homo Sapiens
catactctccttactttatttcagttaccatccccatagaatttgacaagaattgctatgactgaaaggttttcgagtcctaattaaaactttatttatggcagtattcataattagcctgaaatgcattctgtaggtaatctctgagtttctggaatattttcttagactttttggatgtgcagcagcttacatgtctgaagttacttgaaggcatcacttttaagaaagcttacagttgggccctgtaccatcccaagtcctttgtagctcctcttgaacatgtttgccatacttttaaaagggtagttgaataaatagcatcaccattctttgctgtggcacaggttataaacttaagtggagtttaccggcagcatcaaatgtttcagctttaaaaaataaaagtagggtacaagtttaatgtttagttctagaaattttgtgcaatatgttcataacgatggctgtggttgccacaaagtgcctcgtttacctttaaatactgttaatgtgtcatgcatgcagatggaaggggtggaactgtgcactaaagtgggggctttaactgtagtatttggcagagttgccttctacctgccagttcaaaagttcaacctgttttcatatagaatatatatactaaaaaatttcagtctgttaaacagccttactctgattcagcctcttcagatactcttgtgctgtgcagcagtggctctgtgtgtaaatgctatgcactgaggatacacaaaataccaatatgatgtgtacaggataatgcctcatcccaatcagatgtccatttgttattgtgtttggttaacacccttttatctcttagtgttataaactccacttaaaactgattaaa

SEQ ID NO: 181799 - DNA, 1482 bp, Homo Sapiens
  misc_feature (57)..(67): n is a, c, g, or t
  misc_feature (1180)..(1219): n is a, c, g, or t
  misc_feature (1272)..(1316): n is a, c, g, or t
  misc_feature (1374)..(1394): n is a, c, g, or t
ttgggtcttctttcaagaaatttctgttcattttgcctatttttaaatgggattacnnnnnnnnnnngctattgagctgagttccttatatattctgataattaactccttgtcagatgaatagttttcaaatattttctctcattctttgtctcttcacattgttaactatttcctttgctgtgcggaagctttttagcttgatgaaattccatttgtcaatttttgccttgattgcctatgccttgaggtcttactacaaaaatatttacccaaaagtcttaaagcagttccccaaagttttcttgtagtagttttgtagtttcagatcttacacttaagtctttaatcgattttgattttattttcgtatgtggtgagtgatagtgatctagttctgttttctgcatataggtagccagttttcccagcagcatttattgaagagattgccctttccccaatgtatatccatggcacctttgtcaaaaatgagttgactgttaatgcatggctttatttctgggttctctattctgttccattggtctttgtgtctgtttttataccaatatcatgctgttatggttaagaattctcatttctgacatagagaccatttaaataacaaaagataaaacatgagagaatattagaaagcttttaaaagatttaataaaatcttacagtagaataatagaggtaataaatatgttttgacatgtcatgacatagattttgttaggagcagtttgttcttatctgcttccgtggctatgttttgattataaaaattatgttttgagttatttgatttcttcgttgcatatgattcttgtctttaatgaatcacttccctaccttgaacaggtcacagtgaacttttgctttagttcactgctgtacagcactgagtgggaagatagttacacccttaaggatgataatatatcttctactttaggtgttctgcttccatcttctttcttctagaaaacatttttgtttaatgactcacaaaaaatatctgaaatgaatacagctttatattttgcagttgtaaaaatgctaaactagtataaggtaattagctctttcaaaaataagtcgctttctacataaaagaatgattaaatgaatagttatcttctttgaaattttttaaatccacagttacagnnnnnnnnnnnnnnnnnnnnnnnnnnnnnnnnnnnnnnnnggtagcaagccttatcttcacattttaaaaggttgtgttagaaagccagtttnnnnnnnnnnnnnnnnnnnnnnnnnnnnnnnnnnnnnnnnnnnnntcttatggcaaagagaataactttctgggctagagagtatgggttgtgtagtaaagannnnnnnnnnnnnnnnnnnnnctcctcctacacttgacagccaacaagctacaagtcttctttggaagaactgcaaattcttgaatttaggacacagtggtatcttttc

SEQ ID NO: 181800 - DNA, 1010 bp, Homo Sapiens
ctttgtacaaaaaagttggattagatgttccgcaagaaagaagtttgtggaggtcggacataaagcttccaacatcagtaatgcaaaattgtcttgaacctgcgataaaattttgttggacttttttttcattgcagtgaaaagggccatgtagcatgcctcaaagccaggttactcagcctagtccttgtttaagcagttttgatattcattcaagttcaattttctcactgattttatgattaatttcttggaaaatttgaaagttttcaagaagtaaaaaattaatatcttgttatcccagtatatagagattaacttcagttcaatgtttggtgcattttcttctagtctttttttcaatgtataaatattaaagttatttcatagttgagatcatactgcatatatgatactgtatcttgcttttttcattttaacgtcgtgagcaattttcccatgacattacaaactgtctttgaaaaatggaaaacatttggggctgtcagcataactgaaaatgttttcttggtgtgacacatgtatctttgtaattggtttgatttagtgtgctttatttcaataaaaattcagtattataatttacagattggggtggggagtggtatctacttcaaattactgaaatcttcctagtagaattcctttttaaatgtttgaactcccctggtacatcttaaacacgacattgacactgcaagtgcttggatgtcctggcacctcagaacacaactttgtgcaaaaggagtgctgtgcatctgaatagtgcaattcatttccaatgcaagaatgccagtttcttagggcccccggtcaggatattacccacttggtttaagttgtgatttcaaatcccattttctatgggagatacactggtggaacaaatctgcagagggccctgcacctgcgctggtggatcaacggtgtcttctcacctccagggctagctgccttgcccttcctcgtggggcttaagtggctgggaa

SEQ ID NO: 181801 - DNA, 1016 bp, Homo Sapiens
  misc_feature (140)..(153): n is a, c, g, or t
ttggcaactaggtattgtagaggctggaaaaagatgtgatgggattatacaggtgatgcatatttttgttttgagactcaacaatgtgctacaaatgtgatacttaaccctgaactgcatgtattggggattgttttttnnnnnnnnnnnnnncaactttgaatcaataaattaacagtttttcacttgctggctcttcttgctgtaaatggtgactaagaggttgggacagaaatcttgacaactagtggaaaacttggataatcttcaaggaccatggagccttctgtttccttctgtttgcagaaaagcaacactgcctgggttgtgatcctttacaagtgactacttcagacacaattggccacctctttgtatcactggatgactgatgtatgatttatgtgctgctgcccttagagggaagaaaaatgccatgttaaatcctgttttcttaaataaaaatgttgacaataaccagccttcccaagtgggagacaaaccattgctatgaggaccttaacttgtatttcctgtctctttgggggagaggggagggataaaccttgaattgcaaagatgtgtgttacaccttgatgtgaaaactttcctttggcagaagtggggctagagtggtgtcctgttgggagtgttccgtttttatgtacttgcttctgagtcgcgccactcagacacctgcctcttgggattgactgttttagtgcatgactttaaccttgtggcctggtgctctgcatttgtgaaacactctccctagccccattccttgcagcacatgctattatttggcagtggtggtatctttaattaatgtgctttctttaattagtgtgctttcttctcactgagcctctgaagttgggtgcttggaatcagctgaagtgtttaaaggcaaatatagtcatttctttcttaacctcatgcaccatgcagcccttctcaaatcaaatactacgcagtggacccttcctttactcaaaggaagtttcatgaaa

SEQ ID NO: 181802 - DNA, 1202 bp, Homo Sapiens
ttggcttcactctcactgagaatcacactactgtcccatagataaggcaggcattgaagcacctgtcgtgatcctctaggggggagaatgaaaggttatttcctgcattgcatcatcatagcttttaatataatgctacagaatcatatccacattaggttagagttcagatatttggatatgaatacctaacctagccatatccatggccatctctgttcttttcagcaatgttttccatattatattagcaatgacagaaacagaacaagccaagatccagtcagttcttgggagcttgtctagagcaccaagtaatgaaatagccaggtagtgggatgactgtacctttaaaaatacataatttagtttgcaagctatattatgctactttctattttccttgttactttatagcaattcattttaccctcacaaagtcaatttagaaccttatcattaactgggatgtgtagtgatatttttgggcctctgggtttcatgtgtcaatacaaggaatatttatttaaaatagatttatttagaggaggcacagtgttgttgatctgtgtgacaccacccatatttttaaaaacctttgtatgtttctctaaatttgttgttgactgaatataatagaccctaccataattcgtcaaatatcactgattagttacatcctttgtgtgagattagctgtaaagtatactgctcttattcttattcagaatagttaattggtagccaaaaatacatgtatcacagatgttaggtcgaatttaaacagcacagtcaagtgctatggaagtttttctgctaaattagtagattaaagaatactataccctaggcatggggagcagcacgttttcctttggtaggtaggatctctatactagtgaacagtgccagttccacactttggacttagaactgttctctagttattgtaacacagaatactgtcaatccctaatttacttaatgttacttattggaagtggggctgatgaaatacgcacaggagggaaatctactgtgtttaggcacaggcagccccagtgtataagagatcatattccaaaaagttgtcagttggttgtttgcaacctggaatgtattttcctttagagaccaggttatccatggtggttaggcccctagagcagctggaaaagatgatcaaaccaatagttagctga

SEQ ID NO: 181803 - DNA, 1278 bp, Homo Sapiens
  misc_feature (358)..(647): n is a, c, g, or t
ttggggataagataaatacataaatgttactactgtgtacaagataggaaactagagctataagacagatgaaaataaaatactatacaaaccaatggagaaaaattatatatccacttacaaggaaccttgggaaatactccttgaagaagtgtgtggcaaagatctgttttaaaggacagacaggatttcaaaagttaaagattgagtgaaggcaattacatgaagacaaaatgattgggtatgttcctcaaagaaaagaaagtagcctagctagctgcaacttgaaaataaaagggactgtttatgttagattgatacctatactgttttattgttagtttaaaaaggaacacannnnnnnnnnnnnnnnnnnnnnnnnnnnnnnnnnnnnnnnnnnnnnnnnnnnnnnnnnnnnnnnnnnnnnnnnnnnnnnnnnnnnnnnnnnnnnnnnnnnnnnnnnnnnnnnnnnnnnnnnnnnnnnnnnnnnnnnnnnnnnnnnnnnnnnnnnnnnnnnnnnnnnnnnnnnnnnnnnnnnnnnnnnnnnnnnnnnnnnnnnnnnnnnnnnnnnnnnnnnnnnnnnnnnnnnnnnnnnnnnnnnnnnnnnnnnnnnnnnnnnnnnnnnnnnnnnnnnnnnnnnnnnnnnnaacatacataaggaatatattgtctcagatatctaaagaatccaggagtacacctggtgttggccactgggtgatgtggtgtggaaacaatctttctccatctcttaggtctactgttttctgtgtctcctccattttaagatagacttttgtaagtaaaagtttactgtttccagtggaaggaagttgcctctttccaaacagtaccaataaaagttccaaggctgactcatgggtccaactatagctgtgtgtcccaaactgaactgatttctgtgactctgataacccagcatgagtcatatacctacttctagaactggtgggaagccctgtcccacctaaacctcatagaatgagatgggaggaggaatgattccccccaaaataccaggttgttactagaaggggaacagatgttaggtgagcaaaaacaaaagctgtctcctgtagatgcacattgtaaagaactttgaatgtccattttagagatttgaacccaatgtgagctatgatggaaaaccattaatcattttgatcaaagataagaaatagaaatgttagcccaaatagattcaacaacttaaatatatttggttatagtagtcaaaagcacttctatcattttgga

SEQ ID NO: 181804 - DNA, 661 bp, Homo Sapiens
aaaggctatcaatacaaaagtttatctaaattactgtacagctatacaatggaatactctacaaaatggagagatccataagataaagcaaatgaataaagcaaaatgcatgtgttgacagctgttgtgatacctcagttcttgtcttcttggtttaaaagaatttaaatgagacagcaaaggagatgcagcataatttattgcaaaagaaaaggagtattttgaaagttaggtgcagaacagacagtacacctgagagagagaattcagggccggctgctcgtaagggtgagacagcattgattattgctggagaaactccctttatgggagttttgcattattattcataaggaggtgaggtgttgcagtaatcatgtcctgggtggtcctctgcacaggtgcagtagctgttaatgcttgttcatacaccacatgtctcagtagcatcttaaatttccacctagaggtgtgttttttattattatcatgtgcaaaggatcagtttgaggacaggtaaaatcaaaatgtgtatgctctctagaagggaaagtccctactgaagatagctttgcttaaatgagctcaattacaatgtgaatgctgaggtttattgtgttggctgtatggtcatgagaaaatggtcatttccttgactacc

SEQ ID NO: 181805 - DNA, 1097 bp, Homo Sapiens
  misc_feature (85)..(111): n is a, c, g, or t
atagaaccatatggatgaatctcagatacatcacattaaatgaaagcactccgactcaaaaggagatatacatacacgtacaaannnnnnnnnnnnnnnnnnnnnnnnnnnaggactccacttatacaatattatggaaaaggcagaactatagagacggaaacagactggtgattgccaagggctgggagtgggaaaagggactaaaaagggataggaaagaagttagggaagtgaggggcctgttcttcatcttgattgtggtgttgattgcatgattagatacaactgtcaaaactcagaactctacactaaaaagtgtgactattactgaatgtaaattatacctcaataaatataactttaaaaatatttcagttatgtccacacaaaaagcctgcacagatatttataacagctttcctcataattgccaaaaggaagcatccaacagtccttcagtaggtgaataaataaacatccagacgatggaacataatttggctctaaaaagaaatgcattatcaagccatgaaaagacatggaggaaactgaaatccacattactaagtgaaagaagtcaatttgaaaaggctacacactgtataatttcaactatatgatataaaagatcaaaggtaaaactatggagacagaaaaaatgttgccaggattagaggagatgaagggatgacaggcagaacacagaggatttttagggcagtgaaactactctgtgtataacagtggaaacatgccatgatccacttgctccaacaagcagaaagtacaagacacattctatggtgttacaccaaggatgaaccctaatataacctatagacttggggtggtaatgagtgtcagtggaggttcaccaattgtaacaaatatactactctgagaggaatgctgataatgtgggaggctatgcatatgtggattaggggatatatgggaaacctctgtaatttctacccaattttgctttgaacctaaaactactctaaaaaataaagccttccgtatatacgggtatatgcatatacatatacgtaagtattataatattgttacaataaatatataagagccaa

SEQ ID NO: 181806 - DNA, 1205 bp, Homo Sapiens
  misc_feature (996)..(1048): n is a, c, g, or t
ttggctcaattaggacttgtaaaatcaggactttacaaactctcaattaaaagccctgacccaactcaatcactgattggagtggactgtccttcagtctatctgtctaactgaggaaaggaggaatacccactagtaagagatgtcagttggagccttcatctcttgtacacaaggtctgtcatataataaaagacatgtaaagtgctgggattacaggtgtgagccaccgcgcctgaccacatctccttattcttaaatgtatgtgtttctcatggtttgatttattcttgctgggccatttcagcccctgtcatggcttcactcgccatctaaatgcagatgattactgccttgacggttcttaacccagctctcccctgagctgcaggcctgcatatccagtaggtctactggacatctgtactggttgttgtggaggaacctctggcttgctcattaagtcctactgattttcactatcccctgaatttccccacttatttttgtctttcactatcgcaggccttagaagaggtctacctgcctccagtcttacctagtccagtctatcccctggagttagaatggccatcctgaagtgaaaagtaatgtcacattactcccttcagtgatttcttgtagaagtgccaatccctgaatgccaccaagatcttaatcttcacatctttaatcttatctctttgactcctctttacaccggagaacggctccagctgttctagctctctttcagttctttgaaccttcccaccttagggtctataaggttccctctgcccaaattgttctactctcccttcttcttcaacacatccttcagtttaagcacttgcttctctcagtttaaactccacttccttagggatgtctctgtgacctccctgtgctggattagcttccctactctatgctcttgtaaaacactatctacttcctttgtcataaactcatcattttcctataaacattaannnnnnnnnnnnnnnnnnnnnnnnnnnnnnnnnnnnnnnnnnnnnnnnnnnnnaccctgtacctccaatgtctggcacttgtaggtgctcaaatattcgttgaatgaatgaaaaatccatattgtaattgatgtcctctggccacatagttttaaaattaggtgattgattatatgaccgaatagaaactatcaaatgttttcctaataa

SEQ ID NO: 181807 - DNA, 2248 bp, Homo Sapiens
ttgggtccttgatccttggttaaggaaatgaccaaccagtacggtattctcttcaaacaagagcaagcccatgatgatgccatttggtcagttgcttgggggacaaacaagaaggaaaactctgagacagtggtcacaggctccctagatgacctggtgaaggtctggaaatggcgtgatgagaggctggacctacaatggagtctggagggacatcagctgggagtggtgtctgtggacatcagccacaccctgcccattgctgcatccagctctcttgatgctcatattcgtctttgggacttggaaaatggcaaacagataaagtccatagatgcaggacctgtggatgcctggactttggccttttctcctgattcccagtatctggccacaggaactcatgtcgggaaagtgaacatttttggtgtggaaagtgggaaaaaggaatattctttggacacgagaggaaaattcattcttagtattgcatatagtcctgatgggaaatacctagccagtggagccatagatggaatcatcaatatttttgatattgcaactggaaaacttctgcataccctggaaggccatgccatgcccattcgctccttgaccttttccccggactcccagctccttgtcactgcttcagatgatggctacatcaagatctatgatgtgtgtcgcttcttgctgctctcaagccctactccccatgcttctgcttctagcttgctgggagctgggaaactgaccaagcatggaaaactacagggatatatttactggattggaaagccacagaatcatcggaatacttggaggacagctaaaatggaaaaaggccttaaaatgatggcatcaggcaaaatgaatagcaggagaaggtgctgtatttgggggaatctgatgcagcacatggggaaatgtggagaaagggaacatgcagccacaaacacttacacaagcccttatggccaatgagcatcagaagcgaccaggaagacactccgaaagattctagaggaatggcttgagaatgtcaggagatggcaactaacccaaaccaaggccaggtaagactttcagagcgttagaaaacctcataaagaggctgtctgtgatctcaaggaagtaaacctcagcaagaacactttggcaggtgacatggaatggaaataaggccaggaagggtgaagagaagactgggaaacaagaggaattcatggcacacccaatacatgttgtgatacagctcacttccctgacatctagtctgtgtatctcacgattagcacccagacagcatttccagcccgtgtggagcaccagctctgcgcagcctcacctttttcaacatgtacctcgataatcttcttctcacggatcaccttggccccgctgcagctctcgcagcggtccttggggttgatgcgctcaccctggcccttgcactcgatgcacacggtctggatctgctgtaccatgcccggcccgatctgctggatgtggatctgcatcccccgccccttgcacagcgggcacttctccaccgatcccttcttcccaccaacaccttcacatttctcacaaattacatttttctggagggccaatttcttcgtgactccattatatagatcttcaagagttacagataactggtgtacaacattcttgcctcttctctctctagccatccgtccaccaccaccaaagaacatgtcaaagatgtccatgggtgaagagaagctggggctgcctgagcctccttctttaattgcctgctctccgccttggtcataaacatcccttttctttggatctgaaagcacttcatatgcctgggatatgagtttaaacttctcgccctcatccgggttcttgtccgggtggtacttgagcgccagcttccgataggccttcttgatctcctccggggacgcgctgggcttcacgcccaggatgtcatagtactgggtctccttcaccatcttgtgtctgggcttctcgggcgtctgctcctttggctgcccgtctgattccccggagctccagctctgactgccgccccgggccatggcgggggccggagaaggcggcttgggcctggagggcgccctccgacaactgtcccgccgccccgacgccgcccccttgcccttccgtgggtccgtggagccggctggctggagagtaggcggcctggagggctgtgttggccggagccctgcgccgaagccaa

SEQ ID NO: 181808 - DNA, 932 bp, Homo Sapiens
ccaggcacataggttcaagttgccctgaatatgcacgcctttaaatttatttttaaaaggaggctttatatcagtattatgaatgggaaaccaagacgcccatcataaatagcaggtaaaggtttaaaataagtacagtacagggaaaacaaaacaatgatactaaatcctagctggatgtcatgggtgctgaaggctgtgaccctgacgcctaccctctctgttcaaaaggtaggttggcaagtgcttgaggggctgaaagacaaactagcacccaaactgagacccgctccttgatgcaatcggaggggtcgaaagggcattgaacgaggaaagctcagtctgtaagtccctatgataggtatacccctaaaccacttatggttatctgtcccacactcagggccctcttgttttcggcagggaactttggggctgcaaaagggtgtgtttgaggctcacttgtcagagctggcatgtaccccaggtccctgcatcctcaggtaggtgctccttggcccttccagtaagtcatggggatgtctgcgggagaaatgagctcacgctgaggcacttagagcctccttttcccaccacacagggtgaatcattctgacacatgcgccctcagcccattggggacacacctctaattttagcactgcccacggggtatcttagagatccgtttacaggactgcttttccttgctggactgtgggctcccagaggtcaggattgtagttcatccatatcctcctctgaatgctgcccctggggcctgtgcacacagtatgtgctcaggggaggcatgttgcatgatggtgattgagtcccacttgtacctacaagcgaggatccagcttggggcagaggcctggctgggggtgtaacccgcagtggtcagtctgctgaggccttgactttgcaaa

SEQ ID NO: 181809 - DNA, 735 bp, Homo Sapiens
ttggctcaggggcttgattttccatttggagttgtaaccaggtaaagtcattgtgcagcagatcaggtagcctcttctttgggttagctgtgctgtgagcaggttgtatgcccacaggctaatgaggtctcctcttgccctgtcaggtgatgccaaacttaactctcctgggcctttccaccaaagccttcctcgcacatgtgacttcagagctaggcaaatggtgggttttgggaggctgctcctggttctgaagttagtctcccgtcgtgggtccccacagcatcccactccaagacaacagctcttgggataggatctgcacctccgccccacttgtctgtgctgttcctcttttctttccctccacagcttggagaccctctggaggctttcccagtgttcaagaaatatgatagaaacgggttgaatgtctccattgaatgtaagcgagtgtctggactggaaccagccaccgtggattgggccttcgacctgaccaaaacgaatatgcaaaccatgtatgagcagagcgagtggggctggaaggaccgagagaaacgggaggaaatgacagatgaccgagcctggtacctcatcgcgtgagagaacagctccgtccctgttgccttttctcacttccggtttgacgtggagtgtggggatgaagtcctgtactgctatgaagtgcagttggaaagcactgtgcggcggaaaggcctggggaagttcctc

SEQ ID NO: 181810 - DNA, 917 bp, Homo Sapiens
ttggcctgaaacaattctgatgaacacattatgctttgcataagttttgaggggcaatttatagacccaaaacaaatgacaggggaaggtgacagaaaaacatctaagagaggggagagaaaaatgatgtattaccaagttttaaagttatttatttgttatttttactgggacatagaagtaaaatataactatagataaatctctctctgtctctctcactcaaagaatgctttaatgccaactttcggtattcaaccttgtgtcacctgacctttctggcattgcctgagctttcagagtttgtgcttgttttgttttacttgattattctcagtttgtctgtccagcagcctgccctgcttcttgtggagaattgtttctacttggattctaaccatgccctttaggtggtctgtgactaagggtattccatcttcctggatatagtcatgcagctcaaggcaggcagatgggtttgtccttaggatttttgaatgggcactaaaagagtagatgactatttctgccagtagaagctgtggatcaggggcttggaagctgctggtggtcaccatgtgagaaagcccacaccctaatggaggtgactgaaacggaaccactaaaagcacaaaaggggagggagggagggagggtgcttcgcttccttgttcctggggtcaagctgtataagactccaggccttgctcttgtttatgtacatgaaatattctgatatccttctcataaaatctctttttgcctaagtaaattcaagctggagtttcatgacttgtatctagtgttcataactaatacagttgttcagttttaggagttaaaatggttcttactgttgaattggactatccaactgtaccccaaaagtgctgtctttttaatgcaaacagtaaagt

SEQ ID NO: 181811 - DNA, 1123 bp, Homo Sapiens
  misc_feature (191)..(251): n is a, c, g, or t
gggttttaggaagattccccaaatggcccacaaacctaatagggcagcacagacgggatgttgcgggtgcatctgtatgtatgtgtgcacaggtgcctgtgcatgtgtacatgtgtgcatagacctgtatgtacatctgtctccatgtacgtatgtctgtgtggcacagatgcgatactgcgggtgcatcnnnnnnnnnnnnnnnnnnnnnnnnnnnnnnnnnnnnnnnnnnnnnnnnnnnnnnnnnnnnnctgtctccatgtacgtatgtctgtgtgtggcacagatgggatactgcgggtgcatctgcatgtgtgtacacaggtgcctgtgcatgtgtacatgtgtgcatagacctgtgtgtacatctgtctccatgtacgtatgtctgtgtgtggcacagatgggatactgcgggtgcatctgcatatgtgtgcacaggtgcctgtgcatgtgtacatgtgtgcatagacctgtatgtgcatctgtctccatgtacgtatgtctgtgtatggcacagatgggatactgcgggtgcatctgcatgtgtgtacacaggtgcctgtgcatgtgtacatgtgtgcatagacctgtatgtgcatctgtctccatgtacgtatgtctgtgtgtggcacagatgggatactgtgggtgcatctgcatgtgtgtacacaggtgcctgtgcatgcatacgtgtgtgcatagacctgtgtgtgcatctgtcttcatgtacctatgtctgtgtgtggcacagatgggatgctgtgggtgtatctgcatgtgtgtacataggtgcctgtgcatgcgtatgtatgtgtgtgcacagacctgtgtgtgcatctgtctccatgtacctacgtctgtgtgtggcacagatgggatgctgtgggtgtatctgcatgtgtgtacacaggtgcctgtgcatgcgtatgtatgtgtgtgcacagacctgtgtgtgcatctgtctccatgtacctacgtctgtgtgtggcacagatggtatgctgtgggtgtatctgcgtgtgtgtacacaggtgcctgtgcatgcgtatgtatgtgtgtgcacagacctgtgtgtgcatctgtctccatgtacctacgtctgtgtgtggcacagatccaa

SEQ ID NO: 181812 - DNA, 393 bp, Homo Sapiens
ctttgtacaaaaaagttggaaatctcctaaatgatcctaaatgaactttttccttgattttttggtatgcctcttacaaattagtggctattagataataacatttaatgataacattctctttgagaattaataaaacccagtgtacaaaggcagaactttggaagcagacagacctagatttgaatcccatctctaccatttactaactgcagggccttaggggaaagttgcgtatgttttcaaagcttcatttatatatgagatacttgtgaagtgctaatttagcacaatactggaacatactaagtatttagtaaataataacttaaaaaaatatatattttaagttatactaagtatttagtaaatatactaacatatctactatat

SEQ ID NO: 181813 - DNA, 760 bp, Homo Sapiens
ttggttatttgtggttaataacaattaaaaagcggaaataatggttttgtcaaggccctctacccagaaaccaccaggatcacactggtagtcaaagaaaatttgctgtgttgagttgaagtttgaacacatgatcaagaaagggctgtggcttgtatcagagggtgtttaaaaggatttactatcagatttggccttgtgttctgtgattttggtgagcgttcaaggaagccaggctttggtctggattggatgttctcaggtcatgaatataattctctgggaactcccaaagttctcatctacaaagcagaagttaattggagctgaaaactaatcagtaaagccacagcagccagtcatatgggggagaagaggggaatgtttgatggtttttgtggtttagaggtgagttccggaaaaaaagaagacatgtttgacatcctcaaacgagaaaatttttcatgtgttttataggccaaggaggcagaagcttttgttttaatgagccagaaagccccaaaagcctatttaagttttctcaggtatcatttcaacctctgaacttccagaattaactagggaagaggaaaaacatgtaacaccttagagttttattaaagagcaaacaatatccagtaatctccattactttccatgttaacataagttttcataacgctctatagatgaatgtgatttggcagtcacttgtatttcttaacacctacttacccatcattccctcttagatgaaaaa

SEQ ID NO: 181814 - DNA, 770 bp, Homo Sapiens
ttgggttaaaagtttccttcagatgaatacataagaaaaatccaaatccaaaagcttcatttttatttttggtatttgataagattcttttctggcaaagaattcaaggtaaaagatttttatacacactttagtattacaactattttaattattactagtaattaaaacctctgttctgtgcatactgttttttccaagaaaccctcttattataataaaatcttgagtcatttcagctatgtgcaaagttgataaagtcactgactgaatttttttaaaaagcttgatgcttaaatgcttaaataaatgcttaaatctacttttaagcatttatgtcagtgaattcaaaatactattatctttaaatcactcaaaacccattttaaacttgtatgcctttactcagttagttccaatggagtgttaaagggaggaaaagaagaaaaaattactcctaggactgagtaatattctgagctcatcaatctatctttaggtattgggaatatgcattaaaaacatttttttaccttgtctcgtgatacagctgaaggtaattctctggctagcctgtttctcctttgttcctaagaaacacaagcaaaacaaaagtgattatccaagtattgagatatatgcctactaaaaaatgttcatgttaattgagacgtgtggagtaacttacagatacatcctctcactgttgggactcatgccataattatcatattttaaaataaataagaaatcatttaacccaaaaaaaa

SEQ ID NO: 181815 - DNA, 1100 bp, Homo Sapiens
  misc_feature (1019)..(1031): n is a, c, g, or t
ttggctccaaaacatttttgtaggttctttggccagttgccaaagagtgtgaaagaatccaatagaggatttttcttactgatagcagtcattcattgcagtaaaataaaatatgatcccattagggaatcttgaattctgacctcccatactccgttttgaaataaccactttatatttcattttttaaaaatctgatgatctctttgaggcaggtttcagatttggcagtacaacatgaaagattaggaaaagcattaataacgtgtgggtggaaagcttgttaaaaatctgagagtgaagtttgagttaaaagttgtttgaacatggcattgactgggaggccaaagatttaaagaagcggaagattcttctcttaagacatgaggagtaagttgtgtgataatggtatgtgttttgtgtgcatgaatggacattgtaaatgttgaattctaggctccgacaatcattgtcaacagaagatcaagctgcaaatatttatgttttaaaacttaaattataaagctagttaagtctttctaatgactagttttaatgttcatgggtacattttacctaagttaccgtttacattgtatagaaaaagatacatcttaagcacagattggttattaggaattagtttggggaagaggtttttttgtggattctttcatactgcaaagaaaaaccatttgccttttggggaattgagctaacttctaatctagtcttaagactagaatgctaaaaacaaaaacatgaaggaaattaaaaccccttattattaaattgatttgtaaaaacattgttactggaaatttattggacttgaggccttcctccagaaaataaggacttgattgtcaggcctatattaggttctgaaccttaatgccatgtatttgtacttactaaaaattgtttcatgaaaagtacattagcagtatgaacttctggtccagttggaagtttttccatttgaaaaatgtgatgtttgcatggaactgtttgaaacnnnnnnnnnnnnnctagtccctctcctctcacactgcatagaatttagcctagaattttctctttggataaaagaacaaaaa

SEQ ID NO: 181816 - DNA, 878 bp, Homo Sapiens
  misc_feature (53)..(67): n is a, c, g, or t
actttgtacaaaaaagttggttttttagttgtgtaattcacaaagggctgcannnnnnnnnnnnnnnaataaggcttataactatggctggatcttttgctctagtcttctaagaagggccattttattttttagagtcacttctaaagtcatgtggtaattaactttggagactgttttgcgtatgagtgctgatacaaattaaaacccaagtagacctcattgcatgtcaccctatgaatgttgacaatggaaggaataccttgcctgtagtatactgtcacttctggattgataagctgaggaagaaagttaagtttcttttttacataagtcagaaaaacttacagctggtgttcctagtttcctggttgacctcagcagatgaagtgaacagatagtgttaattcagattgaagaaattatctgaatcttggtttgtgtagatttacaatctacatgcaatattaactaaatcagatagcttttacagtttcacatgtgtacataggttccctcccggtcccttccatatccattagttattgaactttctaaactggcattgaaacattacaacaatgttttgttgcaccaattttataaacttaagcagtgcaatacgtgttacttttctgaggcaaaccaaaggtaaatttctcaaggttcttgctgccttctttagcagcatttgatggaagatcttttatacatttgtaatagataaaaataaaccagattgcaaatccttttttaaaatcctaaaccatgtaccaagtttttggtccaaattatgtaggataagttaaacttaaattgcattctattaaccaatatgagtgtatttctgtaagcatagttatgttgaaataaagttt

SEQ ID NO: 181817 - DNA, 1355 bp, Homo Sapiens
ttggagtagattacactcaaaggctttttcttccttttcttactcctgttttttccactcactcttcccaagagatttcctaaagcttcaagcttaataagcctaatagtgaaaaataactgaatttaatggtataatgaagttcttcatttccagacatctttaattgatcttaaagctcatttgagtctttgcccctgaacaaagacagacccattaaaatctaagaattctaaattttcacaactgtttgagcttcttttcattttgaaggatttggaatatatatgttttcataaaagtatcaagtgaaatatagttacatgggagctcaatcatgtgcagattgcattctgttatgttgactcaatatttaatttacaactatccttatttatattgacctcaagaactccattttatgcaatgcagaccactgagatatagctaacattctttcaaataattttccttttcttttataattcctctatagcaaatttttatgtataactgattatacatatccatatttatatttcattgattccaagacatcactttttcaatttaacatctctgaaattgtgacatttcttgcaactgttggcacttcagatgcagtgtttaaaattatgcttgaataaatattacactaatccaactttacctaaacgtttatgcatctaggcaaattttgttttcttataaagatttgagagcccatttatgacaaaatatgaaggcgaaatttaaggacaattgagtcacgcacaactcaacatggagcctaactgattatcagctcagatcccgcatatcttgagtttacaaaagctctttcaggtccccatttatactttacgtgagtgcgaatgatttcagcaaaccctaacttaactaacaagaatgggtaggtatgtctacgtttcattaacaaatttttattatttttattctattatatgagatccttttatattatcatctcacttttaaacaaaattaactggaaaaatattacatggaactgtcatagttaggttttgcagcatcttacatgtcttgtatcaatggcaggagaaaaatatgataaaaacaatcagtgctgtgaaaaacaactttcttctagagtcctcttactttttattcttctttatcatttgtgggtttttcccccttggctctgatcactttaacttcaagcttatgtaacgactgttataaaactgcatatttaaattatttgaattatatgaaataattgttcagctatctgggcagctgttaatgtaaacctgagagtaataacactactcttttatctacctggaatacttttctgcataaaattt

SEQ ID NO: 181818 - DNA, 1727 bp, Homo Sapiens
ttggcatgattgcaggtttttgtcttgctcttcccagttctggaaaatctccactgtgtgctctcccgcaccacatcggtgcccaccctcttcattagtagaacacattctcggacttgatccctgggctctgcagagtctggtgctgagtaccttctttggtgtgggtaggttttggcagcaggagcttggaggtgggaaggtggaaggtgcagtgttaggacactgctctctcaagcccgtgtatactggtgagtctccagtgctccctcttggggggacgtggtgtcctgtggactcactgtgacctcttgagtgtcacagttaccctgagtgtggcttggtaggttttgcccacctggtcagtaagtgtcctggtggctgccacctccatggatgagagctgctctcacttgcgggccctttgctaccttttctccctttctgtgagcacctagtggtttaatcccatcagagagtcccatcacacttgggcatgtgaatgtacctctttcaattgtaaatattatgaaatctaaacacagatcaagtatttctgttgaaaaagtgcagtgctcatctagggcaaagtagacaaacccactctgttgcttcttggccactctggtaagaattttgagcccagccactgaccacagcagatgcagccagttttcttgttttctgtgtctgtatgaccactgataacagggcatggtgtggccagggccctcctctgtgtccctgggacagccaagcagccagggtcacctaatacatacagcacccctcacgtttgctctcatactgcagttccagttgtcttttaagtttttatggtaatgacatgagtctcacagaccccaacactgagggctggatcttaaatgctgggtgctgcttcctttgaccaagggatgtctgtgccatccccacagaggtgcccaaggaggcctcttttggggttgtttcttgatggtcgtttctccttcccaagccatcagagaactttagggaatggggctggaggaccccctcatgcagcaagcttggccccagtgaggaagaagtggggacagggcatggtgccctgtcatggggtgaggactccccaggagattctgtcatgcattaggctgagccctaagtctcataggtcccagcttacccctaagatagcagaatgttggatgttgctcttggaagcaagagagatcactggagaggtagttggttgataagagctaagcagagccttccatggcaagcatgggggcaggctgggttggcccaggacaggtcctggtgtgggggggtgtcatgggtcttggaaaatagcctttcttcatgagagtgggcaaggtgtgcacatggaacaggcactgtcctgagtatccaggacctgctgaagaaggataaaggcatcttccagaatgtcagtcccctcaggtatgtgcctcctagctcttccctgggatatgttagcacaggcagcaaatgcattcccaggcacagagggtcctgccttgggttctggcaccccctcttgtctgtcacctccctttgtgtagttggtcctgagcttatcctgggacacccatccctcagtgggctctgctctgtccccagccctggacacctgtctcaggtctctgactcagtctctgtcctgcttgtcccaggtgaacctgagcaaggtgggcgagtattggtgggacgccatcctg

SEQ ID NO: 181819 - DNA, 1241 bp, Homo Sapiens
  misc_feature (588)..(763): n is a, c, g, or t
  misc_feature (796)..(821): n is a, c, g, or t
ttggatctttatgtgtgtccctcagttgaatttcagctgcaagaggaccgggatgacaaacttaatttcacattctttcctgccttttatttccctcccacttttacatgaaatcacaattaaacattgcttaccatatcccacgtactgtactgagtcttctgtgtgattatctatatcctcatggctgaaagaagtagctatgaacggcctgcagatgaggtttatgtctattaagtaatctgctcaaggtcacagtgctgttaattgtggaacccaacacaactctgacatcaaaacgtatggtttttattgctaggcaatacttcttggccttttgtaaaaattggatattactaatatatttgacggtagaaactgtggagttataggaaattagaaaattaaaaataatcacaaccaaacgtgaatcttaactaagtataaaatagatgaattttgtagaggagtcccaccttattctgttgtatgttctaaaaggtttgtagatgtctatctgtggcgtaattgtaatctgaaactttgtgtttagtggcaagaaaagccgtcccacagcattaagagatnnnnnnnnnnnnnnnnnnnnnnnnnnnnnnnnnnnnnnnnnnnnnnnnnnnnnnnnnnnnnnnnnnnnnnnnnnnnnnnnnnnnnnnnnnnnnnnnnnnnnnnnnnnnnnnnnnnnnnnnnnnnnnnnnnnnnnnnnnnnnnnnnnnnnnnnnnnnnnnnnnnnnnnnnnnnnnnnttagcctgggcaacacagtgagactctgtcacnnnnnnnnnnnnnnnnnnnnnnnnnntaaccttatttctgagaaaagtgtgtgaaaattcctctcatcaaagtgatttttagattacacctttggaaaggacacataaatattaaatttgcatcagacatataagcatcagaattctgaaagtgtgactttttttctctgttgtatctcatatttcctaatgcaagtgtgatgaaacaacagattgaggaagcttgcagtgttttttttgtaaataccaaatgtagagaagtcaatttctcacataatagaccaatatcctaagttgaaccttggattgctttagaaaccaaaaacatgtaggctgatttatttcatccattgggtgaaataaaaatagaaacgtgcagttcttaactttaaatgaattgtataataggcaagaaaaaatttcaaagcataaacataatcacattg

SEQ ID NO: 181820 - DNA, 730 bp, Homo Sapiens
tatccccccttaggtgggagcagttgtgggtgggagagggcaaacttcttcccccaaaatagatagaggctggacttccggaaaagctgggaagggggaccatagtttctggggaggggtggagaactcacatttacctagctgctggccaggctattttcatacccacagaccgatttaatcctcaactactgtactcatttagtagatgagaagaatgagacattgaaaacatgcacagtggaggtgggaatgaaagccagctctccaactctccagtcctctttcctgtgactgcatcaggctgcagggtgaaggggaggtctgggatacaaagagaacttagaggtggagcagttggattctgtgcagtgctaggagggaggagaggggttggagtaggtgggaagtaggcctccttcagtttggatagcacttcccttaacccaatgactctagtgggagggtggagggatggggatgggaagggagcctgggagtgaggaggaaaggcaaactctgtcttcccccaggggagtcaatgaatagtacctaaaatggaaaccaaacaaaacaacttcaggaagtaacaagggcttgcttagagacatgacggtaaaccctgaaccatcagctaaaagaggtagatagcagtggttgcccctggggagaggtaaatgtgatggagagggaacaactgtgtacaaaacatgtgactttacgttttgat

SEQ ID NO: 181821 - DNA, 1655 bp, Homo Sapiens
  misc_feature (96)..(108): n is a, c, g, or t
  misc_feature (396)..(578): n is a, c, g, or t
ttggcttaacaagaggtactagatctttggatccatgatttacttcaatgttgtcaaacttatgttgcacgaaggatacaaattattaacctcagnnnnnnnnnnnnnaaagaaaaaacacaacagcagcagctcagcccttctgaacagccccacagtaacaacaagctcatgtgcaggggccagtgagaaaaagaaatttttggtaaggatccagattacctgttaaagccaaaatgtacttttaaatctgctactcatgctgcaacagcagaattcacttcccagacaagttgttttagtggatttgtaaaaagcattggttacccgtgacctgtgttcagtgcttctagtcaccatttctcacaacagtattattcataaacagcctctatnnnnnnnnnnnnnnnnnnnnnnnnnnnnnnnnnnnnnnnnnnnnnnnnnnnnnnnnnnnnnnnnnnnnnnnnnnnnnnnnnnnnnnnnnnnnnnnnnnnnnnnnnnnnnnnnnnnnnnnnnnnnnnnnnnnnnnnnnnnnnnnnnnnnnnnnnnnnnnnnnnnnnnnnnnnnnnnnnnnnnnnatgactttatgcactatgtaagggactgttgatttattgggcaagaaattatgtatatgcttggagatgtgtagatattcattggtatgttcattccttacacacgtcatgagtttctgtacattgtgataagctaataatgggaatcctacctaagatttctgttttaggaagaatgtgaagatgtggaactagaacagctgtttagaaattgaagctcaaagttttatgttaatatgggcaaaaggggaaataaaatgctaagatagcttttcctcttaatgaagtcaaggttatagaatggcctgtcctgggaagtgtagcagatgttttgcttctgaccaagagggatattcttcagcaaaattctgaaagcagaaaaagacaaagtctcagcaaatgcatttctaggaaagatagggtaagaggcagtgcggggaagatgttggggagaggtatttatagcctagtataatgaaaggagcctggtgatattaataatcatttaacatcggattttataattcacagagttacacatttattattattattgtagtttttgttagcctaggcctgagatagaatgaaacagttttcttcattaccagttcttctgccagaaagtccatgcttaggaagagagaggaatgaaagatcaaaacctaatttaaatggtgaagagttgccaaatttggttaagaaatgtctaattggattacagattcaaattacagagtcccagttgaaagaagctaagcattttggctagctggaaaggttgtttattcaagggtggaatggggctggcagaggcaaacagcctttcactatgagaatggcagtgctggctacaaggcagagtcgagactggcacagcttcatggagctcaagcttggcccagcaaggaaagccagaggagctgtgggttcattaacaggattgtttgggtgccgaggcctgtaagaactgaaaaatctaatttaatatctctgcttagcaagacttgagacatccttttccctaagtaaacaagcttggtaagtaattgaaaaagagaatggatttgagaacaa

SEQ ID NO: 181822 - DNA, 1512 bp, Homo Sapiens
  misc_feature (1403)..(1413): n is a, c, g, or t
ttggctggtaacagaagagcacttggcacttatcttcatggcgttatttctaatttaaaagaacataactcatgtggacttatgccagtctagaggcagaatcagaaggcttggttgaacatatcgctttccctttttcctctccctccgcccctcccagtacagtccatctttcaatgttgcagcctggttgagaaggagagaaaaaggtggcaggaatttccaggagatccccaagaatgctgccttgtctgtggacaaagatggaccatgtgcccttcggaattagggatagaaacaaatattgtgtgctcttaacgattaagctgtgttatggtgggttttcaggtttttaccttttttctttacccctttactctgcaagaatggggaaagaatgcatactgcgaaaatgagtcttttaaattctgtctgcctactagttttaagtatatggtatgttgtaaaatttccaatgatgagagacagcacaataaatgtaccttatctccttaggctgaaggccataactacatagtggagtaatttaagaactctcttgccttcaccaacccaaaaggttgctttttgatagcaactggctaatgaatttttaaaaagagaagaaaaatactagttttcctctcttttgggaaatagattttaaatggctaaactactagccttaaaactactagtctaataaaatcaactaccacttttgtgaatctgacaggccacatttttatatggccctttacagaatggagtgtgttgaacaggatactaacgccattgagttgagctggcctagcgatggagggacactctaacacaactttccctcagctattatgcaacagatcagggaaaaagatgggatgacagatggggtcagacagaaagagcttctgggaaacaagcttacatagtcttttttaaaatgcacaaagcctcccagctaagaggtcacttggtttgggcttcattaggactgagactttgttgagttctttctgggacttggagagtggatgatattcaggctctgaacattcccagcgctctcccgagggtgccactttctcaagatgaaaactgtgactgaaaaaattaataataaatgtttctgagctgcctgtgttctccctgtgtgggtgagagaagggactagactcctaagcctgcctcagatacaagaggcatcattggctccaattttagagaacttgaaagcaaggctttggacaaaattttgagaccctaatcactttaccttcctccaaattacccaacatacggtaaacaacatttgtgcagaagtatgtatgtatttagttcaggttgacttgtgtccttataaactcttactcaaatgatttgaacttttatgcgactgggannnnnnnnnnncaaagctacaagcatggcccgcctgtggtatcgaggtgttgcaaacaaatatctgtgttgcgcttccctgttttaacctacctcgttttgtttgttttt

SEQ ID NO: 181823 - DNA, 968 bp, Homo Sapiens
ttggtgaaccctgaagtcggtgtctgctgcgttcacggcaggattcggttaggaggaacagcacagcatgctgggctctggatttaaagctgagcgcttaagagtgaatttgagattagtcataaatcgccttaaactattggagaaaaagaaaacggaactggcccagaaagcaaggaaggagattgctgactatctggctgctgggaaagatgaacgagctcggatccgtgtggagcatattatccgggaagactacctcgtggaggccatggagatcctggagctgtactgtgacctgctgctggctcggtttggccttatccagtctatgaaggaactagattctggtctggctgaatctgtgtctacattgatctgggctgctcctcgactccagtcagaagtggctgagttgaaaatagtgagtacaagtagtttcagtgatgtctgtagcttttcatattgttagaaaggttggttaatataagttacttctgctgatttgaccagatattttgtaccattcttatgttgcttttgaaataggttttgtaaatttgtttctccctttcagccttatatcgtagaatagaacagtgttttgcaaacttgagcagtttttttaaggagcaaagttttgtgtatctccagttttgtcttaatgttatttaactctatgcaaatagaaaagttcttatacaactgtaaaccagtaaagttaaaataacattaaagtgacagatgtttttgctttatttattaattccacaaatatttattaaataaattgtatgagctatgtaagtgctgggggtaacagtggtgaacaaaatatggcaccagccatactcctgtagcttagagtctagcagaagagacagacatttaccagaaaattgcacatcacaacatggatatggtactgactcctagatacaaattcagttgtgttgttttctattttc

SEQ ID NO: 181824 - DNA, 943 bp, Homo Sapiens
  misc_feature (868)..(896): n is a, c, g, or t
ggcgttgctccagccctccttggccggcggacggacaaaggaggcattgcccctgacgaactcgcccaccagcacccgggccaggaacatcgtgtgggtctgcgtgtcggatttgctgtagtggtgggaatatgcagcatctcgggcaaagtagctcctgaaatgacacacgagggctcagctggtggaggggcctgcagccaggaagggtcagcacactgcgaatagcgtcctggtgatgtgcaacgccagggcctctactcttccaccccgcatctccctccctccctctgtgccatgtctccactctccctcatgaagtcacatgcatcagtgataccaacacccttctgagtggcagcatctgaggagttaccaaactgagatagcaaattcctttcaagttccggatctgccccacgaaacctaaaggcctgtggacacgtcactacttaatcccccaaacctcagattcctcaggcataaaatggggctgttcagcccaaccttacagggttggcatggaaaatgaatgagatcccatatacggaagcagtctgtagactctggcagcccaatgtatagaattatgagccttgtcaaatggaaatctgagttagaagctgtcacctgtacatttaaatccacaagtctaccactggctgctgtccatcttgaccccttgccatcgctgcctcagacggaaactgactaacaaagaactgatggacccggaacatggactgctgggcagaaaatgttctcaacttggtaagcatattgtggttacagaagataatgtcctgttcttgggatgtgttaaagggtgaaaggagacaatatatgccacctacctgaaaatggtgcnnnnnnnnnnnnnnnnnnnnnnnnnnnnnagtggcagcatgttaaaaccaatgaacgcaggtaaaatttaccccaa

SEQ ID NO: 181825 - DNA, 1167 bp, Homo Sapiens
ttggcagcctgacacataattcttaaacctttcctgtttaagaaacttctagaggctgtgtactctcaccaatcctcttcgagaatttgttcatgtgtatttccccattatatggatgaggctcaggataacagcatagtggctaccttctactgagttttgaggtgctaataagtatgtttgtctgaggctgcacatgtgggtggctctgtgtgtatgatccaagggacaaaatgacgatgtaggaaccagcaagaacggaatctgggctgatgcttcagtctccacctgggtgatggctagcctcccgccctccaccaccgcatcccacacgtgctgcgcactgtccccgtgtctcctggagaaccaaactggagaaaacctttctgagtatctctcatagtaccccttccttaagaagatgtggtttagagcatgtgtgcaatcctgcctctgtaattaggaaacggagcccgaggctttccattgttggttgaacccaggacagctggtgctattcacaggctgaagaactgggcagttcttacttgggtctgtcctaggatgtggaggaagttcaggactaacgctaggcagagagtatgactcggtttacccagcctaggggcctctggatgggaacactccattccaagatctcagcagagcagggcttcctggcttgaggctggaagcctttgggaagaggcccagctgggacattccctgggcacctgtcttccgctgaagggagcaaggtgccctctgggactgacagccatgaccctctgtgccatcctcaatccttgagccatatatcaagagtcctctagagctggatggtcctcaaaagtctgtccaaggaatgccaacgttcaccgggctctgagaaacgacgcaaatctctgagctggggaccacttggagaaccggcttagtaacagtcctgatcttcgcaagccagcttcttctgcatctgaggggctcctggcgcccagaggaggcagacagatgtcttctagctgagtttctaaccgcatgatgagactcagaccttccgctgcactagaaaatctgcaacagtgtccctgagtcacttctcttagtggggcagactcgtgttagatttgtggaacccagctctctgatttactccttttggaaaac

SEQ ID NO: 181826 - DNA, 1352 bp, Homo Sapiens
  misc_feature (775)..(822): n is a, c, g, or t
ttggattttagaaatttctgctttgggccctgtctaggttgtttatatcaagttctttaaaagaaagtaatgcaccaaatttctatcattcatagtatttatggcttaattatgggtcaagattctgttgccaatttataaatcatatttttatggagaagttcaattgactttaacagagcggtgcatgggataaattatgcgaactggttagaatttcatagtctagaagtatatcagccaggcagcagcccaaagcccaaataatagtaactccccactttgccacccattcatgtgtataacactcctcagatattcagagtagattgggaggcagaggtcattgaggaaattctcagtgtttaaggaaccaaaaaagataaagattttaagtgaagatacaaaaattttggaaaaataatataattactctggtgactaatcttaaggggaaaaattaggcaggcactagtaactgttctaaaaactaagctcaccaacatcaaagttgagaaactcaggtcagtttcaggaggctggtcaggacgagggttgaatcacaggagatggtagcaaattgggatctgcacagaaagtagggaggctgggcaaattcctgccttccgtggcactcagtggagataccctccaagtcccacccatctgtggtctttacccactgctgagatcattgaatttatgactatctcttctgctgcatggttagaaagcaagaataggtaaagccagcatggcctcaaaataaggcaannnnnnnnnnnnnnnnnnnnnnnnnnnnnnnnnnnnnnnnnnnnnnnnatcccctacagagaaatggaaaagaaaaaaattgtcttggaacaagaagtcaaaacgctaaatgactccctaaagaaagttgaaaacaaggttagtgctatagtggatgagaaggaaaatgtaataaaggaagttgaaggcaaacgagccttacttgaaatcaaagaacgagaacataaccaattggtcaagctattggaattagccagagagaatgaagcaacttcattaactgaaagagggatcttggatctcaatttacgcaacagtctcattgacaagcagaactaccatgatgaactttctcgtaagcaaagagagaaagaacgagattttcgaaatttaagaaagatggaactgctcttgaaagtgtcctgagatgcacttacgcaaactcaagcactgcatcaaaggcttctattagagatggaagctatccccaaagatgattctacattatctgagagaacgcgagagcttcacaaggaagttgaagtagctaagaggaatttggcccaacagaaaattat

SEQ ID NO: 181827 - DNA, 1559 bp, Homo Sapiens
  misc_feature (150)..(314): n is a, c, g, or t
  misc_feature (316)..(341): n is a, c, g, or t
  misc_feature (459)..(726): n is a, c, g, or t
ttggcaaagataaataaaatactcaatgctttgagatattcatgattaagctgagcaaaccacagaaaattataatgctgtaattgttaaataaatgacatcatcatgcatagagttctgtagggtcacagagaaagaagatcaccaaannnnnnnnnnnnnnnnnnnnnnnnnnnnnnnnnnnnnnnnnnnnnnnnnnnnnnnnnnnnnnnnnnnnnnnnnnnnnnnnnnnnnnnnnnnnnnnnnnnnnnnnnnnnnnnnnnnnnnnnnnnnnnnnnnnnnnnnnnnnnnnnnnnnnnnnnnnnnnnnnnnnngnnnnnnnnnnnnnnnnnnnnnnnnnntggccttaagtgaattgccattgctgacttggctgggccattagtctgactccatatgagatttttgagttcttcagctccgcttcttggttctaaataccactgcccagctgcatannnnnnnnnnnnnnnnnnnnnnnnnnnnnnnnnnnnnnnnnnnnnnnnnnnnnnnnnnnnnnnnnnnnnnnnnnnnnnnnnnnnnnnnnnnnnnnnnnnnnnnnnnnnnnnnnnnnnnnnnnnnnnnnnnnnnnnnnnnnnnnnnnnnnnnnnnnnnnnnnnnnnnnnnnnnnnnnnnnnnnnnnnnnnnnnnnnnnnnnnnnnnnnnnnnnnnnnnnnnnnnnnnnnnnnnnnnnnnnnnnnnnnnnnnnnnnnnnnnnnnnnnnnnttaccactgccactgtgtcataatttagaaggattcatgttctctgcctccaagcagaaaagccagttacctactatcaagactgcatttaagggatatattaggaacttctaagccggaaaaccaatgtatttgaaatgacagtttatttctgcctgaacctacactgtctaggaatctgttcctggaatcctcagggtatacagatttcttctcaaatcagagctgtaaaaactacccattcaccatttgggaaacacctttcttccacttcttattggaagccctggtggtcatgttgatcctctgctatgtttttctcccaaagccaaataatcctctttacagacttggggtttcatggacatcctcatcacccttaggtgattgcatactcggaacatcgttaccgtatctttggggaaaccatcgatattgcagtgggtaattgtctggatcgttttgctcgagtgctgaaggtaagccagtggggctgcagagaacataaaatgtgggtgaatttttgggaagccatggaggtggagggaggaaatagtaaatgagcttcttatgcttcctgcatatctgatttcatcctcttccattccctccttccttatttttttcttctgctagatttctaacgacccaagtccaggatacaacattgaacagatggcaaagcgaggcaagaagctggttgagctgccatacactgtaaaggggatggacgtctcattctcagggatcctgtctttcattgaggatgtagcccatcggatgctggccacaggcgagtgtactcctgaggatctgtgtttctccctgcaaga

SEQ ID NO: 181828 - DNA, 580 bp, Homo Sapiens
tattactaattttggtaattaacttatcaaaactatagtgacatatacacgggcagaaacttataagtagagttgtaatgcagccaaatattcttacaaattccctaacaagaagctcaaatctttctcacaggcaaattgtaaaaattctagttttttgtttaaagagctgtgattttcaaaagtatcccttcagtttaagaaatctggggaattggtaacttttcttatgggaaatgattgccatcatctctactgaaggatgcctcttactgaaaaatgtcttttgaaggagttcttgcctaaagcattctttggatgtaatttcatacactaaacatatagaccagtagttagtgggcccctcctcttaaacagtaacttttgaagtactgatacatgattaaaatgttagatatttttcactggagcctaagacttaaaataagggcatttttgaaaaggggtattctttctgtttcttggttggaatattttggttatctactcctttaaaaaacttaaacgtataaaagggatccttcaaattaacgaagtgttttcatccttccccatcagg

SEQ ID NO: 181829 - DNA, 1259 bp, Homo Sapiens
  misc_feature (1104)..(1115): n is a, c, g, or t
agttggctctgaccctgtattttcaaagagcctgtctttgagctcactgtttctttcttctgcttgatcagtttttctgctgatgccttccattggattttcaaagtgtccattgaactttgctgctccaggatttacatgtgatttttcccattattttgatttctttgttgaatttctctggtacatttctgaattgtgtctctgctttctcagtgttcaggctcttcttaaaacagccattttgaattctttgcctgccagatcattcatctgtatgtctttaagttcagttgctgaaaccttgttttgtccatttggagaggcaacttttcctaagctatcattattatatgtagatatacatctgtgtacacattaatgatttagatatttatttgagtcttctcagtttgggtgtgtttgtgactacttttaagcgggcttattaagaaattttgagcggacttatcatcgtattccattttagcgttagagagagcccaaatcccacgttagacgtaagtcttccaatggctccatcactgatgcaacatttgctggatgggcccatgggtgatccacagggagcccctggctatgggggagaacaagtcaggccgtcaagcctgtagagtctgtgtattatgtttcacatggtggctgttgctggccccacctccgcttatgtccttaacatgcctcaggtggttcatcccttttggcactcatggtgccccctgtgggctgatacaggagtgagtctactgtgaaggcactcagtatagtggaaaaaacaaatatcaacctcctgctttttttcagtgtaaaaactataagctctatgggagtttctgcagatggtaccataatggcctgagggaggagtatcacagtcacagagtattggttctctcactgcataagccatggttttacccaccttcacaggctaaaggtgcttcataaccttgttcatgtattgaggttctgttggctcttgtaatggtaatttcacatgtgggcagttgttcatattgatgtttctataggggtatgatagctggagaggtctgcgccactgtcttgctctgccttgatcannnnnnnnnnnnaacaagaatttgtctcctcctagtttttctttttctcttaaccgacctaggtttagccttttaatccttctccctcctctgcttctaatgtcattgtttctttgtatgcctatcatatctacatgctacatgaccttcagctgg

SEQ ID NO: 181830 - DNA, 1301 bp, Homo Sapiens
  misc_feature (199)..(251): n is a, c, g, or t
ttggcttatgaaatatcaactgcaaacatacattttatacttacagattatgattgagtaaatgcagcaatgcccccaaacttcccttctccatgtatctaacactctttgcagtaagacttcatagttgttcctattaagaagtgaagtctgttttcccagctcttgaatgtgggctggtcttgtgatttgctttagnnnnnnnnnnnnnnnnnnnnnnnnnnnnnnnnnnnnnnnnnnnnnnnnnnnnngaggtcttgcttgcttctgttccctttggaactctgttactgctgtgagcacgtgaacaggctcacttggtggaaggggagcagctaaatggagcagagccaagtcattttacttgagtctggccctctcagaccagccgtcagccagctgaccaaaaatgtgttaagacagaacagccaacatcagcagagccacctacctaacttgtacctgaccacacatgcttgagggaacccagctgagacctgaagatccttccatcttgatccatagactcatgagcaattaatgtttggagccactgagttttagggtagcttatttttgcagcagtagtaaacagataaacagatattagtgccttttccacctagtcactgagaagatgactaagtaaaaaggagcaagttgaagatgttgcttctttatttagcacatcattattattgcggtttagaaagatttgacaaatgcatttgcctgtttctaagaatttgcatagaatggtagagtttggacattttcctattctgatttgttttaaaaaccattataacagaatacaaaatatctttgttttttaactgcagccattggtgctaacatatttatcaccagggaagaaactttatttttcaaacttcagggaaaaaaagacattttgccaaaatgcctgaccactttgtggtttttgaaggaaatgttaagtttatatagaaaaaggacatgacttccatttctggcattatggcagaacaaatattttgaaaaaaatcatctaggatttaaaaatatatgtaatctaaagagctcaatctaattatttaatataattgtaaaacatattgctgacctggaaagatactaagctaaatcttcagaagaagaaataagaaaacatgaatccagaaaaatactggatctgaccaagccctggtcacacaatcctggaaatgtagcattcacagtgaaaggatgtacttggaacaaaactttcccttcagaaggaaggttagtaaatgtggaaaaaatgaagaacacaaagtaag

SEQ ID NO: 181831 - DNA, 1328 bp, Homo Sapiens
  misc_feature (333)..(359): n is a, c, g, or t
  misc_feature (436)..(496): n is a, c, g, or t
cacacattccccacggatagggggagggatggttgtatcactccttaagagcaacaggcagccagggaccccagctcaacacccaccgacacatgatgtctactgtgttctgaacatgcataagcatataatttgaactgcattgttagccttcaggaaaggggcaccaggagctgtgctggccaggtacctagatcatttactgttcaaaaccaacccaggagctgagctactgagctcagcctccctctctcaaggctgggaaaggaaagttcatcttcactcagatgcaagcttcaagtaggcagagcagctgtctcttattcacccctnnnnnnnnnnnnnnnnnnnnnnnnnnnttccagcacagcacgtggctcatgggctgagcctccagaagtattgttagtggatgggagaatggatcttcatatgnnnnnnnnnnnnnnnnnnnnnnnnnnnnnnnnnnnnnnnnnnnnnnnnnnnnnnnnnnnnncactttcaggtccaaactggcaagcctcagcataggtcactgttgctttgcaaactggcaaccctcagcataggtcacacagagggacaactgaacgttgtaggaccaggctctgcctccttctctctcccccgacccacctgccactccttggagctcctggctgaggcggagcttcacccagcctgagctgagcatgggcatccagaggcactccagtcggggtctgtttcacagaagcaggcccttcgtgaatatgcatgaggggcatgagctggcttccacgcatgcttcctgctcacctcatcctaaatcctaaacccgcagggccattgcccccttgacttgagcactagggtaaaatctatttttgtaaaaacctgatggaacttttacttaaaataagagttttaagtgtttatggaaacgaaatctatcttttagaagccactgcataaatacttaactgaagaagagtttggaatggggcaagcctgagtaggaatccgaatgctatggatcaccagaaacatcataacaggcgaattacctaccctcactgagcctcagttttcttgtctctaaaactaggataataacacctagctcactggggtgaatgaagattaagtcattacatttaagtgagatgatgcattgacttaatgtcttgaatactgtctctggcacacagcaatgaataaatatgtgctattactactgattctattaatgatacaatcataaaaatgactgcacaagaagggacctgcagtctcggctactcaggaggctgaggaaggaggatcacctgagcccagggctttgccaa

SEQ ID NO: 181832 - DNA, 1292 bp, Homo Sapiens
ttggctattttcataaaagtaaaacactattaaagtgctgttttatgtgaaataacttgaatgttgttcctataaaaaatagatcataactcatgatatgtttgtaatcatggtaatttagatttttatgaggaatgagtatctggaaatattgtagcaatacttggtttaaaattttggacctgagacactgtggctgtctaatgtaatcctttaaaaattctctgcattgtcagtaaatgtagtatattattgtacagctactcataattttttaaagtttatgaagttatatttatcaaataaaaactttcctatataattaaaagtgttcctttatttaagcattttaagcctgtctctgtttatcacaacctgcactgccaagcttgtttcaagttaagttttactgtatttacccttcattatagcacagggatatcatttatgcctttcactgactgcagttttttaaaatgtagttcttacccagcttttatagatcatcatcagtacaactcctggaaaaggctctgataggaatgtgccagctgtagataccagcatacctcaactagaaattgcatcattcatgaaaagccagccaagagcacttgtgaatttggaaatggcctggttcatagaaaatatgtgcttttttaaaaatataggactgattgattgattgataatagaatgtatacgtccatataaaatattccagcttcctgacaaccagttatttgcactgcttcctcggttgcaagttagaacagacataattgtctaatctacatctgcttaaaaagttaagctgttgtctttgcccagtttttagtatttgcaaaggatgacaatgcatgatttatgtaatgtatttttgagatgtaataagaatacgatcctagacaaatcagtttaggcatctgtttttatatttaaaaaggagtgtttggactatctttagggcgactactgtctttaacttctaatatacaagtagaacatgatgaataatgaataaattatttaggacaaaaaaattttattagaagcatctcactagaaaattaattagtgaattcaaaaacaattcaagttttatattgaagagctgactcaaaggaaaggctattgtaaatggagataagtaagtcaccacacctctctatgaacagccagagagctctgtgataaatcaaatttttaaatactaatttaaggaaaatggtttgtattcagatgtaatttgtacacagtaaaatgtatcgattttaggattatagttactc

SEQ ID NO: 181833 - DNA, 1296 bp, Homo Sapiens
agtggtaaaaggtcagctgggggctactaatcatcatctctgccaccaaatgataaagccaacagaggcaacaagagctgaaagtgggagtgacaaggggtgtggacccctggactgttcatgatccaaaccaatacgttttaaccagctttgatatatcgttcatatacaacttcccctcttaaagtgtataattcaatggatttttatatattcacagatatatacacgggtgcaactatcaccatagtcatattacaatatttctctcacctcataaagagcccccatttcttctgtttactcccctatgttcccatccttcccagccctaagcaatcacaaatctactttgtttaacatttgcctattctgtatacttcatataaacagaataatatggcttgtgtgtccggcttcttttacttagcataatatttccaagtttcatccatgttatggtgtatgtcagtacttcatttctatggctgaataatattctgtcctatggatatatgacattttgttaatccattcatcagttgaatgtttggatgtttccaccttttgtctattaggaatattttgtgttcatttatgtagatatgtttttatttttcatgagtggatttgaatggaacttctcttgactagaattccaccttaagaacgaaatcactgactcatatgaccatgtttaatttttgaggaattgccaggccttattccaaagtggctacattatttacattcccacccacactgtatgaggggctctgatttctcaatatccctgccaatacttattaatatccaactttattcattctagccatcctagtagatgtggtggtatctcactgtggttttgatttgcatttccctgatgaataatgatgtcaagcatctttccatatgtttattgaccattctgtatcttccttggggaaaggtttattcagatcctttgcccattttactttatacattctatatacaaatttcttatcagaacttttcctttgttttgcttgtgctttttatgttaaatgcaagaatttattgccaaatctaaggccatgaagatttgtccttaggttttcttctaatagttttgtagctttagcttctatatttaggtatttaattcattttaaattaatttttgtatatggcatgagataagagttgagcttcattcttttgcttgtggctatccagctgtcccagcaccatgtgttgaaaacactctcctttccctattgaatggccttgacatctttattgaaaatgaaa

SEQ ID NO: 181834 - DNA, 1203 bp, Homo Sapiens
  misc_feature (314)..(325): n is a, c, g, or t
ttggcttaatgaactacttattgtccctataatgggccatgttctttcactttattcttttaaacatgtttgttccttttcatttgcctctggaaaacacctacttatccttcaatgctcagctcaaagatcctctcaagacagtatccggctctgctcctttcatctgaaatgactcacatagttttcgcccgtgaaatccataaagtaaatcagccacaaggtggcggcataatgccaggtaattaacggttcgaagcatgacacctgtggtttcagtttataacctagcattgatctgaaattccatcttnnnnnnnnnnnngatgaaaagattgtggaattattgaataacaagggacaagctctgtagctcatttgtagttttcatcgtggttttcaggaactgcttggtgaatccttgggagttcctaggaactctgtctcctgtttcagccagaaaagctctgagagttgttttaaagccagaacttccagtctgctgtagtcttcaaataggaagctgaagctcagagaggtggctggatgaagatagtaaggctaattgtagagagggagctctgtagtccagacttactgtttctgctttcacagggctgcatatttttcagtgccatcagagacttaccccaggcattgtggtagaaacttgataagcgttggaggcaaagaggattcttatcattttgttactttgcaactactctgttggcaataaactaataataaagaacatgatatgatacattttcatgtatgaaagctctacatctatctaaaataagctctgtaaagctaaggttcatgctttatttttctctatgtatcctccatatcacctaggagtcatcttcatgaaacaattattgaagtcaagtgatgggcacagaggattgatagctcaaataaggcttggtacttgcccttggaaaaagtatgctaggattctggtgggaggggtagacatataaatggataatttataatatgatgtaagtacagagagctgtgggaacataaaggaaggaaaatgaacttgagtctgagactgctcacttctattagagccctcttctgttttgcttcatgttcagccttcacgaagaactcatttctgttgttgacaactgaagttgtctgtcagaagcaatgttgtaaagtgacgtacagctacatattttt

SEQ ID NO: 181835 - DNA, 518 bp, Homo Sapiens
ggattgctgactttaaaattaggaaactgaccagtaatgtgtgtgtgtgtagcatggtttatccttcttgatagatagaaattgtcattttaaaagataatatcagttttccttataaatttatttgtgacaagtatatgcaatttaactatatcataagaaaaattctatattaaagataatacaaatgtggttacttttaagtgggtttttatgtgatgactatgttctgtcagttaattattacatttatagatttgtatttagcatagtgctgtcacaaagcctgaaatagtgtcaagcatgaataaagcattcaattatgtttgctttagtgtaagattattcattatgattccaaaagccatgtaatacgtacgtctacagaaaatcacttctattttttaaataaaacatgaaatatgtcttgagcaagctattttaagaaacaatcatttaacgtccttgttattagaattttgaatctttgaaagagggttattgaaaaccagctagga

SEQ ID NO: 181836 - DNA, 2100 bp, Homo Sapiens
  misc_feature (508)..(516): n is a, c, g, or t
  misc_feature (1113)..(1223): n is a, c, g, or t
  misc_feature (1291)..(1354): n is a, c, g, or t
gttacagaaaaaaataaaactctcattcccaaattgctctaagatggacaaattggttacttctccagaaggtctaatcaaggttaacaaaataggtaagttcgtggagttagaatgcatcttccctggagttcggaggtatttgggatgaccaaaggagtctgctggacagtatgtgtgttttacaaaatggcccccacagtgattaaagaccagagacttatatctctgcatttgtcaagctggaacagtctttagtgaacacagcttacctcttttaaaactgctggtttctactgaaggaaacatggatgacatttagtgttctgtgactggtctggcaccctacttttgttgacaaagatgggaaggggtctaaaagtcatgtcacttataaaagaacttgggaggaacttttttcaaaagatccaaagattttggaaggagagattagagcagaactaagaccacttagaagataggtagatttcagctcaatataaggaannnnnnnnnatatcagtgcagttccaaatggaataagctgtttgaacatggcttagcagaagctgaatgacaacctgttagaaattctagggaattctgcactgagtacaacattggattatttctttgggctgtttccaactcaagattctgttatttcattataagcattttgaggaaggcagttggtataaaggtgaccttagtaataaaagtcagtgtgaagtctaaagaaattccacaatgaatttaaagacaagaattttagggacaaggatacagaaatttgcctagtaacttgcacacagcagatggtaaatatttattgactcaatggagtaatgttaaaaataaggtttcccatggactgtgtgagggccaggcatacttaacatcctttgtgagagagaggatggaaacggagtctactgtgaaagccacaagttttggggaaatacactctgcaaagaagctggaggttaacaaccaaggcaaaggggccagaccacagggagatcttccaggtccaagagcactgcagggcagatgagaagcagggatgattatgttgaaagtgcaagataaggccaggcgcggtgtctcatnnnnnnnnnnnnnnnnnnnnnnnnnnnnnnnnnnnnnnnnnnnnnnnnnnnnnnnnnnnnnnnnnnnnnnnnnnnnnnnnnnnnnnnnnnnnnnnnnnnnnnnnnnnnnnnccaggaatggtggtgggcacctgtaatcccagctcttcaggaggctgagaacaagaatcgcttgaacnnnnnnnnnnnnnnnnnnnnnnnnnnnnnnnnnnnnnnnnnnnnnnnnnnnnnnnnnnnnnnnnagactccatctcaaaaaaaagtgcaagataatgaatttggggtaaataattcacagtcaagagctctgagcacttggattcaaaaagagagcatgagggacattaaatatggttctccctggaaatgttggtccactgtactgatgtgggctgagagagccaaccaaatccaagtggggttttgtcaggaacggtattggaaactctgaactagataaataattcaaaggatattagctaaagtgatcagggaccaggacaggaaggtactgttacaaacggagagaataaaagggcaaactgaaataatagatcctggaatagcacagacactgacctctgaccacagaccaaaagttagggcctagttgtatttcttagaaatacaaagaaaacaagtttagaatcatagaaaacactgttaacacattagcctgggaggtggtactggcactgaatatacacatacccataaagtcggatatgttcattaatcccagagttgactgataaaatgctgattaaagcaaaggtaggctatatgaggcagccacaccctcccaaaacatgtccccagagaccgggtggccttctttcttaaggctgtaatttatgcacagttaggagttactctctcatcctattaatatttaggatggctctcagctggctgattggagctaacacagaataggatcatacagattctgacatggtcccattttgtgttgttgaattatacccaa

SEQ ID NO: 181837 - DNA, 1256 bp, Homo Sapiens
  misc_feature (1077)..(1089): n is a, c, g, or t
ctttgtacaaaaaagttggcataatcatccctgcttctcatctgccctgcagtgctcttggacctggaagatctccctgtggtctggcccctttgccttggttgttaacctccagcttctttgcaggagtgtatttccccaaaacttgtggctttcacagtagactccgtttccatcctctctctcacaaaggatgttaagtatgcctggccctcacacagtccatgggaaaccttatttttaacattactccattgagtcaataaatatttaccatctgctgtgtgcaagttactaggcaaatttctgtatccttgtccctaaaattcttgtctttaaattcattgtggaatttctttagacttcacactgacttttattactaaggtcacctttataccaactgccttcctcaaaatgcttataatgaaataacagaatcttgagttggaaacagcccaaagaaataatccaatgttgtactcagtgcagaattccctagaatttctaacaggttgtcattcagcttctgctaagccatgttcaaacagcttattccatttggaactgcactgatattaaaaaaaattccttatattgagctgaaatctacctatcttctaagtggtcttagttctgctctaatctctccttccaaaatctttggatcttttgaaaaaagttcctcccaagttcttttataagtgacatgacttttagaccccttcccatctttgtcaacaaaagtagggtgccagaccagtcacagaacactaaatgtcatccatgtttccttcagtagaaaccagcagttttaaaagaggtaagctgtgttcactaaagactgttccagcttgacaaatgcagagatataagtctctggtctttaatcactgtgggggccattttgtaaaacacacatactgtccagcagactcctttggtcatcccaaatacctccgaactccagggaagatgcattctaactccacgaacttacctattttgttaaccttgattagaccttctggagaagtaaccaatttgtccatcttaggagcaatttggaatgagagnnnnnnnnnnnnnctgtaacgcccatcctgcctgcagtagaccctttgggcttaagaggtcctacagattctaatagtttcctctttgtagatgtgttaacatatttaaaatacttaggacatggcctggtacgtgacagatggtgtttaacatcattgtcatatgaagaacactctctg

SEQ ID NO: 181838 - DNA, 1034 bp, Homo Sapiens
  misc_feature (216)..(224): n is a, c, g, or t
ttggctgaaattgctttggcaaaagcaaaacaggttatcaatacaccaaggacatcaagtagttttaatgcaactacagtgttgagtgcttttttactgggagaaaaatcctagcagaacctgctactctgggcgcattaggtagttttatgcaactatagtattaagagttttattggaagaaaaaacactgtcagagcttactgctccagaccnnnnnnnnnaatagaagagactggtaaaaatgatgcaggggctgaatgaaagccagctctgctccagtggctctctgagttgagcatgcatcagttaccttaagggcttgttaaaacatcgctaggctccaccctgtttattcaataagtttgttatgggatataagaagatgcattttattaagttccccagtgatgctgctgttctactataggaaccacacttgaagaactagttctacaattcagctgtatgttgtaaaggagtcaagtcaatgaaggagttataaagagttgctgaaaaatggagtaacagtgtatgggacttcacatcagttctccttattgattgttagtttgatccctcttgttcttttgttgtaaacattttctataattaggaaatgccatttaagagtgagagaggtatatatctatgagccattgtgtttggtgttttacaagaactttaccatactggtgtgtagtccattctgtacagtttaaaagtgattcacgatttgcaggctttttatcagatcacaaaaaaatcagtctttaagcatttgcttggtaaggtttcttaagattaggtttataatacaaccatctgtaatgtatctctcgtttgagcttgtgggccatacaattcattaactagatgaatacattgtggacagcatcctcactacccttctctactcactcacaaagaaccatgatacactggaatgtttttctctggaatcctctttctactcttgtattaaaatttttccccacttcatgattatattcaaaataaacaactacatcatt

SEQ ID NO: 181839 - DNA, 985 bp, Homo Sapiens
ttgggtaaatgtgcgtgtgaaagggagcaccccttcccgacttctagaaacaaaattccttttggggcgctttccctgtgtgtccccagagaggcctctagccaggagccttcagttgggatagtttcatttgtgactttaccaataccctcccagttcttgatagacagctgtaggttgctgggttcaagaatatgggtgggatatggaatgctctttcaatgtctagcttcagttttcattcatcctcctgctcagcactgtcagccaagagcttactcagcagacaccacatactgcagcagttcctagtgagaaaatctgtgccactagaaaatgcttcacttccatttcctcacctgggcagttctctgtttaaaattgtgggctgatttggtcttcctctcctcctcccactgttactgccctgcagcccttgttcaggtgtacagacccttattctggcctctagtgtccttgtctgtcatgacacacccttccgcccaaatacctctgaccccaaggctggaatggggctggtaggagataagtttgcttactcatagtcatgtcctttctcttggcacctgcttccctgcggtgtcctcaaatggatttctgtgtggcagtggagtgattgcatgaatttttctgtaacacattaactttgtattattattaagggagtttgagaaagctttgcttataatgtcaaggcaaggaggtaaaaactggagcccaaagaaattcccttagggcaagattatgttataatagaaaattgaatttcctgaggcagtggctgccaccccttttcagatgtttagtcctgcaaatagcatctttcttgtagtctgtgacatggatggggatgctagggcccttaacgggcaaggggactaaactaaatcaagttgagtttttttccagcacgggttagggaggtactcgctgttgatatttgacactagaaagtaatcttttt

SEQ ID NO: 181840 - DNA, 1026 bp, Homo Sapiens
tttggatcagttgtaatcacaattctcattctaatgcagcctttttcttgtgatctacaggaaagaaaaaggaaatggaaaactataacgtcactcttattgtggtaatgagtattttgtaagtatttgttgtgaatgcttattttgcttgtttcagcatttatctttaactagtttccaaaagaatttgaatgtatttgtatattattgtgtagaaattgccactatttgactattgccggcctacaaaaatagcaattttataggtttcagatttttagctttatatatgattttcagaagaattgttaaatttgaggaaatacaaagtactcattcaacagatgtttttattttttagctaatctgattaatttctatcatcataggtttttatgggaagttccataaatttaaagggaatatttatatatacatgctggggaagtgccaataatactattttactctatttgattggacaaatggttcttacgtaactctgctgtgcctaagaatcacttggggtgcttgctaaaatgcagatttcttgacccctgtctcagagattgattcagtaattcttgagtaggcatcaggaatcagtatttttaaacatacaccccaggttattctgatgcaagtgatatgagcattacatggtgaaaaatactgggacaatgtctgaatcccagggtattctataggaatccactcagccagtcatatttagaacactaatatctatatgcctctatatgaatcttgaggcactatgttagatttaattgaattggttctgacttagtgatatattgaaggtgataatttttggattggagcttcaatattagcttttttttgtctaattatagatttcagaacatagaagatgtttgttgttcctttgggctttatggaagatttttatgttctgcttaaatcagttttctacgacagttctgaatagcaaatattatcagtgttcttttgcattactttacagaaaatgtttactcaaaagtt

SEQ ID NO: 181841 - DNA, 312 bp, Homo Sapiens
aaagttggcaaagacgcaccacccctcttcacacacaatgacccctcggccccagggaggctcacaaccagcaacaccctcttctctaggcagacttggggtgggggttccccagagagctgtttccagaacagaacttattaacactgtcaagttttggcggcccagccctgaccttctatcttctcttgcagtgaccccaacctggccccgctccagagtgggactgccgagtgtggcccggagctggcccgggacagccagggcggcagggagggcccctggccgggaaccgcagcgctcattcatttc

SEQ ID NO: 181842 - DNA, 1012 bp, Homo Sapiens
  misc_feature (430)..(461): n is a, c, g, or t
  misc_feature (470)..(731): n is a, c, g, or t
ttggctaatatgagcaagtcatgtaaacattgaagaacttggtaacatattagtaaatggatattaccaaatgttttcatcgttaattactttgcgttccaccaaaatatctttactaaaatgtgcttggtgtagtttgtttattgtctaaattagtaccagtcatcttatttctgcaaaatgagtatcaatgtgaaaaagacacgtgaagattaagcatgtttgaaaataaaatggtcaattacatttcaatttacataggccaacaactgttccatactttgtttgtaaacatttaatttctctactggacaaaattaatatttggctttacattgaattttgagctgtgaagaataaattatgtatcattttagcatattaaacagtagtaagtctagcacatagtctcagccacttaaaacaaaannnnnnnnnnnnnnnnnnnnnnnnnnnnnnnngagatggannnnnnnnnnnnnnnnnnnnnnnnnnnnnnnnnnnnnnnnnnnnnnnnnnnnnnnnnnnnnnnnnnnnnnnnnnnnnnnnnnnnnnnnnnnnnnnnnnnnnnnnnnnnnnnnnnnnnnnnnnnnnnnnnnnnnnnnnnnnnnnnnnnnnnnnnnnnnnnnnnnnnnnnnnnnnnnnnnnnnnnnnnnnnnnnnnnnnnnnnnnnnnnnnnnnnnnnnnnnnnnnnnnnnnnnnnnnnnnnnnnnnnnnnnnnnnnnnnnnnntgcacccggccaaaagttgatttttaattacataaaaatcgtaaaaacttctagtaaaaacttgatttggtgaatacagttatattttaaaaccttaaggtgacaagcattttctatgcctaaatcttcattggtttgcctggaaagagtctctgttaaaagattttccatattcaagtaaaaggaaagatttcttgctttctaattgtcttttggacacatgcctattttctttgaggtataaacctttagatgtgaaaaatgtaatttcattctgctat

SEQ ID NO: 181843 - DNA, 1545 bp, Homo Sapiens
  misc_feature (696)..(708): n is a, c, g, or t
ttgggatcgattgaaatacgaatcccagaaatctaaatccagcagcgtggctgtcggaaacgactttggcttttcctctcctgtcccaggaactggcgacgccaaccccgctgtgtctgaagatgccttattcagggacaagctgaaacacatgggaaagtccacccggaggaaactgtttgaacttgcccgagccttctcagagaagaccaaaatgaggaagtcaaagaggaaacacttgttgaagcatcagtcgctgggggctgccgcgtcaacagccaacctcctggatgatgtggagggccacgcgtgtgatgaagacttccggggcaggcgtcaggaggcacccaaggtggaggaaggcctgcgagaaggacagtaagagatgccagcagctcttccttgccagagatgatctgacccggtgggggcagctggaaagcaacactggcccccagctgaagggcccagctgcagccagacagatggtgcttgagaaccgaggcccggtgatcctccagccacagtccagcccaaccactgccactttccatgggacttagaacttcggagttgctgccttgcaattggaggaaggacctggggcccctataggcagcagccaattacagccccttttgtagccaggcgttcctatggtcaaagagtggaaatgcaggaaccaacctccctttnnnnnnnnnnnnntccagaaagcagataaaagttggaatatggaaaagggcaagatgacccccaccagaggctctttggcctgaaggtggagtctctgcctccgtccgttctctatctctcctgtcacagactctgcctgaccccctttcctcagctcccttctggtcccccttcctcagctccctccgggcacttgtgcccttcccttccatgtcctcctgtatctcagccttcccccggggctgctggcccagcacacgagccctgcacccagcctgggtgggaggtccctggccagtcccccaggaactctgaggagctatgggctactgcaaagcatctgccgactgccctgccccgtctggcctcatcaggctgctgctgttagggatgggctcactcccagcagctcccggtcacccagcagggatggggagggtggccaccctggagctggaggactctggggaggcagggtctttaatttggcagcagacaaaagccagttctggagtcacaccacagtaggggctcacaggggctctgactccccagctggactggaagccctgctgtccgagggtgggcagcggtgggtcctggagtgacccctttgagcaggtgcagggctaaagagcaaggcggaaaggccgccagcctggggtgagcgcctagggcataagggcttgctgggtgcccctgagaagggcgggtgatctgaggaggagaactctgattctaggaacgcttacacggcactgaccactgccacggggagggaggctgcccagcccgtggccccgccctggacttgggagcgcgcagacccttccggagagccgggaagcc

SEQ ID NO: 181844 - DNA, 1292 bp, Homo Sapiens
  misc_feature (790)..(799): n is a, c, g, or t
  misc_feature (988)..(996): n is a, c, g, or t
ttggcctttacaaggaactcaaaatacatttcatttcatttgtacaatgagaaaaaagatgaaaaggcaaggttgttattgcagttgacattgtcagccctgccttttggctttatgtaatttaaaatagaaagggggaaggaggacaagacagaagctcaactttagaaaccatggacatcacctccctctttgagaggagctgcttgtgaaccaggctccagtcttcctgtggcctctcacagtaaccctgcccctttcttacctcacaggggcaagagggactctaaagagggcgtaagcaatagaggcacctgcagccctccttcctcagcaggaaatcaatgtggagccccagagggacattttatctcagagagagcatgctggccacaggacccagtgcagccctgcttcctgcaccgtgggtctttcctgatagctgcaggcttgagattgcagcctcaggataggacacgttcagatgccttccagactacacacactatgcttagattcgagagtctttcctgaccttaaaatttgtcccttgcttactttcacactgcagaagatttatatatatattcatcattatttttgcagcagtacaagtggaaacttcaaaaaaatcattccctttcatgtcctggtctttttaagtcttgatatgtaaccattttcataaatatccaaacagagattgtcattccccttaaaaacagaaacaaaacacaaaactagtgcttgtgaaaacacacagcgcaaagacaattatcctattgcattnnnnnnnnnntcagtctgcctagagacatttcattggctgcattgtcttaattccctaacgaaactgcatcaaaatgtcagttgtaatttagcctctgatcagctgttaaatattatttaaatatttacaggtcctgtggggtatctcccattacccatgtcgccctcaaattacataagcgatcataaaataagaagnnnnnnnnnggtctttagtagatcacagcagagttaccactgataagagtgttggctttgttcagttgtttctaaattaccagccgtcaagcacagtagcccctaaaaccaattttgagcaaggataaattcaactccctcatctgagaaccttgactttccagttgccttgaagtattgggaatagtaactgtacattttcaatttaattatttggtattttatttgactgtcttggccatgtcattttatggaagcatttttaaatagcactttttgttagtggtgtggaatttctgcggtta

SEQ ID NO: 181845 - DNA, 1611 bp, Homo Sapiens
  misc_feature (468)..(478): n is a, c, g, or t
  misc_feature (857)..(870): n is a, c, g, or t
  misc_feature (1118)..(1138): n is a, c, g, or t
ttggatctttcttaaattattacttgtaaatggatcactttcttgttttctttttcttaattggagctttaaataaatatggaacttggaacaaaaagattttcaggaattttatggaaactaacttttttgacctaaatcgaaagggatgaaagtttctgaaaacctaacaaaatgtgtgcacagccaattcttttaggggaggaaataggcagggaatgtgtaattggctattttaaaaacatatgccttcttttgtaacttattgttgtttcaagttacaagatctttgaaggcaagtgtttatctcaaaatatttgaaagcttttatagtgcttaacatattaagacgtcctattagggtttacttagaacaagcttatccaacttgtgggccacatgtggcccaggatggctttgaaagcggcctaacacaaattcataagctttcttaaaacattatgtgannnnnnnnnnnagcttatcagctatcattagtgttaatgcattttatgtgtggcccaagacaattctttttcttccagtgtggcccagggaaaccaaaagattagacacccctgacttagaactttccataggttaggaaaaagttgtactttcttgatgtctataacctagaatttctggtaaaggaattgattggaaatgttattaaaagttgaaaataatttggaaattaaacattttagtgatcagttcttccattgagactgtgttggcctttactagatatgtgccatctttttaaaaacttactgtgttgcttcctttactagaaaattgccatctttttgagccttgtctattgaggaaccaagaacacagaaaaggcagtnnnnnnnnnnnnnnggattgtttgaagattgaatgtgctgtgatgatagcctaggattattgtttttcaatttttgatgagcgtaagcattcttgttgactatatcttttgtaactactgacccatttagaatggcagaattagctggcagagattgtcattcattttaagcttccaatctctgacatcttcatctttatttctcagtcttttttacttatcagtggtttactccattattttctccccttttaaaatgtcnnnnnnnnnnnnnnnnnnnnnaccatggggaaaaaaattaaatgtttccttggcagggcacaataacacaataaggctttcatgacttaacttttgattacctttacaccttcatctcctgctcttccattgcttgtatgactatttgactcagtgtcttgcatgtgcttctgcctggaatctgctccactgcccagcccctctgaatgaacactaaactttctaacctatgtccatcctctcatctctctcttactgttattttagtaagtatgttaacacattttgattacgcaggaatcaggccatattgtaattatctgcatgtatgtttccttatttaacagagtagttgtgtgtcttatttatctttagacccatcagtacttagtattgtatctggaacatggcacgtgtttagtaaatgtttatctgaatcaataaggcagaattataaattttatgtcagtgtttaagctagatacatccaattt

SEQ ID NO: 181846 - DNA, 1299 bp, Homo Sapiens
ttgggtttttcaaaacacatgttcattttaccacaaagtgcccatttttatatacatttaaggattattttttcaatgtcaagttcatgttagtgatttcagaaatatagtcaaaatatatagtcaaatatatcttgacaggcatcttgagatttggtttttcattttactatatttatgactgaaaatggttttgtgttttctttatgttgtttatatattttttaccttagtgtttacactggtaaggcttgttagtccatttttgtagtttttttaaagtaagcttttagatctatttgtgttttaatgtttcccagtttgggttttgttttgttttggaagaatctgctttcattattaaattataaaatgtaaatgctctaaagtaggaatttttaaagagtaaattatttgtgtagcttattaggaggttcaggttagtgaccataaagtgggttacttgtacatgaaaatttgaaatggtaccatgtaaaattcttctattgtcaactttttctgatgtatgccagttcatttactgacaaatgttgttactaagtgcttattaagaagtgtaatacgctataaaaaagttaatactttttgttcagatgtaaggcaaagataattgatgccgtttcagtgtatgattgtatttttaacttttacgttggtgggagtaactatttgaggaaatttgtggtgagaattagtaagagataaaacccccaacagtttattcttaccaagtaaagttttgtggtcatggggcagggaagagtttatttaccagaatactagagccctcacacaaaataaaggtaacttggaggagggctataatgcttgcatctcagtattttcatttcacttcatcctttcataattgccttgattatggtgcagtctaacctattaagcaacttctggctatggtaacattgatatgaaccatattatatcaagtctccaaaacatctagtttgttaacatacactttccctgttctttttagtttgagtccacattactaatacattttaataatatttaattatttcacaattttaagtttaccaaagtaaacaaaaattcatgaagatgagtattgccctctcccaaaaaaagtttaaagattagttgaacttccctcaactacacctaaagcaaaggggaattttagtaagtgtgtgtaccttgtttctttcagacacatctagaatgtttttctttcaccgtacctccaaagaggcaatttagaaagtattaagtagtgacttttgttcagttccattt

SEQ ID NO: 181847 - DNA, 1535 bp, Homo Sapiens
  misc_feature (298)..(313): n is a, c, g, or t
  misc_feature (334)..(342): n is a, c, g, or t
  misc_feature (1365)..(1411): n is a, c, g, or t
ttgggttaggatgttttaatcagttgttttttaattccatgtaatatatgtagccctcatcagatttatatcaccatatttctccttgtgtcctaagagaattgatgacaattcgtaaccataaattgttttatattagctagtatgtatatttatttttacccaatggctttatctgtttcccaaaatttgtttgggatttgttgaaagcattgtgtaacttctataaacggctattttcttgtaactgtcagtgaaatgaatgtgtacattgttttcttgtatttctctgggttgnnnnnnnnnnnnnnnnccaagggttaacatagaatgnnnnnnnnnaaaaattatctttggccaatgactttttcatctagatcttactttcattcaaccttctaaagaagttcgtttctcattgttttgttctgtcaacttgcctgaaaaacagagacttcatctcatcaatgaagaaagcatttcattattcctacagatctttcctgcgagcacagaattcttcataaggaccagatctcttccatgtctgtgtcaatcacataaagctaaaatgtaaaggacattgaagcctttatttaattgtactaatatgatggtgttatatactacatcattagctagttaaggttttctgacctgacttctctttgtcttcctaggtatttatttgttatcttttaatcttgtgtatctaaattaacttagttaatagttacccaccgaataactatgccaagcaactagtaaagaatgtttattttatttccccttataggggaagagtggactgggaacaaaaatgtatgggccaaaaggccttagggttgtcattcattgactttcttattcctctcatgagctataattgagtatagtatttttttagtgctgatgtcattacttctcatgtcttcccctgagttgaaagcctacgacaaacatgtataaaatacatttaagaattttcagaatatgaaccacaaaactcagtatcttatatttaaatgctacttaagttattattggaatccaagtctcactaactagggtacatttttataaaatgtttctctgtatcttgaattgaaattacttgcccagaggcaagagttctggggatataacatgatttgagatcttttttaaaaaagggtggggcggcgggggagagagcgacaagtttatactagtttatgcttttgatattagtattttaagatacatcagttgatcccgaaacctgaccattagaattactctgaggagcttttaaaatagattcctggagcctacccctggaaaattgtctcgctggatctcgagaggggcctgagagttctggcnnnnnnnnnnnnnnnnnnnnnnnnnnnnnnnnnnnnnnnnnnnnnnnctttaaagctctcctggtgattctaatagccagtattgggtaatcaatgttttagctaaatgtgacactggtttgagagtaggcaacaaaattaaagttcaccagacatctctttgtggtagag

SEQ ID NO: 181848 - DNA, 570 bp, Homo Sapiens
  misc_feature (104)..(120): n is a, c, g, or t
caagtatcttttgtgtgttttgggctgtttaaaaaaattatttaaaatggtctcttctgttccataatactgctgtaaaacaaacttttctaagttctaatatnnnnnnnnnnnnnnnnncccatgtggttaggtcaagaacctaggacacataaacaaacagaaaacagatgaaaactcacaaaaattaaatatgaaagaaagatgtcagctagaaccttagttgtcattaagctttgtcttccttatcccagatattgaaggcagtttacaaggggatgataacaaagtaactaactaactgtagcaaaagacaagtatgggacagactgggacctggagtaacactggatcacagactgcaaaggcccacgcttggaacaagttgccaacttgtttcactctgcttgcttcagactgtgcacagctgggatgggatctggggatgtggacccctattctttcaaaaagtcattcaggtgatttggatgggcaaatagaactatttctctaatggccaatgttttttaagagtcataacctggaattaattacattaagtgctcagct

SEQ ID NO: 181849 - DNA, 907 bp, Homo Sapiens
ttggcttcatctcacataaggttgagttgctttcttagaatgttaatttcagaaagctagaatatatatccccagaatgcctaatttattgtttgaagaacagaacctatagtaacatcagacctcagaaacttactgtcttgcctttgacttttgaatctttagacagtacacccttttctgtggacctgttgaccccctcctgcagtgtatgctttagttagccatgctgtgccctcttatagtaactagttttctatttccccataactgtagtgagagtcaccctcagtcaaccacacaggctttaaaggtttacagctgtaaccatttcagtgtgtccatgtcacttgttttcattcatttggcaaggatgggtcaaagaaatgacatctaaggtgctagatctgcacttggctctggggagacaaagatgagtaagacacagcccctcccctcatgggctcttgaagatttcactttctggactggtagggggtcagggcacgcatacagacatgacatggccaaagaggcctgtttgaagtgctgcccgtaggagcacagaggaggggtcacgtgccctgctgccaggtagaagttggaaggtggggcaagtgcatttgagagggcagttgagctgggtgttgcattatccatcagacacaccaaagtgttgaggctaatgctgtgtctgtggagtgaacagacagggttggaggttggcaatagttaagttggcagatatttagtaaaaagttggagctaggctggcaggagtttgggtattgtgatgtcacagccacaggatttgttgcttggtgtgtcagagtagggatgggagggcgttacgttactggtgagcagagggcagttctagaacacaggtggagcaggctgtgggggg

SEQ ID NO: 181850 - DNA, 2132 bp, Homo Sapiens
  misc_feature (137)..(167): n is a, c, g, or t
  misc_feature (289)..(315): n is a, c, g, or t
  misc_feature (580)..(661): n is a, c, g, or t
ttgggtactgtaggattacagatggcatcacattgactgaaacattggagcaaggggaaaatggctaaaaactttgatttttgggaaatgaagggtgggaaaaatatacacagaggtctgggaaggatatttcaggnnnnnnnnnnnnnnnnnnnnnnnnnnnnnnntcctgttcaaggattgaagaataattcagactgagtcacaattctcataaagtaagaaatttcatcaaattctatgtagctttaaaatggcttcaggtgtttttcagatttagctacttaannnnnnnnnnnnnnnnnnnnnnnnnnnacattctaacatttaaaatccaactacagaaaaatttttaactgaaagatgccttaatagaatgatctatatcccttagagaaaagattaggacagtcctttatccccttgaattactttttaaatttttaattttctgattttaattgcaataactgattatcatatataagtactaggattctggaaaaagtatttcatctcaaatttcctctaagtagctaatcttcgagaatggtaacttatgggaacccccttgattccnnnnnnnnnnnnnnnnnnnnnnnnnnnnnnnnnnnnnnnnnnnnnnnnnnnnnnnnnnnnnnnnnnnnnnnnnnnnnnnnnntatattgatttatgttaccaaatgattttgaggtctaaatgatataatgcagtgttttacctcatctcagaaaaaaatacatttatatcacagtctgtgagcatgaatttgtatctcaaaaatttcttaaaacagtacttactctaagggctactatattttctgttctgttactttttatttttaaaagatttttaaggattgccagccatggccaatagtttgataagcattgtaatgtgtgtgagcatgtacttcaaacttgccatttactttaccattttagccaagaatttcaagtacagagaattaaaattctgctggtataaaacattgtactgttataataacagactgtaggtaaaagtaatacagtaattagtattctgtatagtaattactatactgtaatagtacagtatagtattgtaattataattactatatataatcatgataaattgtgtttatattttaagtttaccaaaccagtatattcattacttaattacttagcacattttggcaacttttggaggcccatagactatcctttaactgctatagcattagtttataataatttcttagaggagtgtttgccagcactgggaaacaacattgagtaagtcatggttcttgccctggataaacccaaaagagaattatgcatttcacagataattataatgtgattaaatgttgttataggcatatgttcaaagtaatctggggataagcatgcttaattttgtctagatttgaggtagacttcaccaggaggtaccatttagctattaatagtaactcttttataggttgaaactgatttctcaactccaacaccaagaaggaaaaccccatttaacacaggtaatacacttacagctttcttttgtggctcagttctattataaggtaggttctttatttaaatggtattaaaattaattgctctcaagtggacagacttagcattttattccttatagttgttttcagttttattgaaagtacttttagaaatttattatctttttattaaacttctctttacagacttaggagaaaactctggtattggaaaacttttcactaatgctgtggaatctttagatgaagaagagaaagattattatttttcgaactctgattctgcatagtaaaatgagaaaatatgattcctgggatttttaccataaagcagacagtgtttgtattttcaactggagtacatgtattttctttgtaaagtagcttcctatgaaaatgtggacttttttgaaggtttcatatgtttgtgttcaaagtaaaatatcctcattgctgcagcttactaaaaatgtaaagaaaattgtttttgctcgtgtagatatctgtaaatttgtttttgcatattaaaatatatatagataattttttaataggcatccaagtctgtttactttaagaaaaccatttctcaaacaga

SEQ ID NO: 181851 - DNA, 1407 bp, Homo Sapiens
  misc_feature (504)..(803): n is a, c, g, or t
  misc_feature (960)..(1073): n is a, c, g, or t
tttgtacaaaaaagttggatgtttcttgcctttccctttaggagctgcctctagggccagtggataataattacagggcaaaaggtttcaagtcaaaattaaaagggaatttctaacaaagagcctctaagaacaatgtggctattttatgaggtagtgagtagctcaccacatcagatatgcaaaggggtgacccaccctccaagatgctgtgtatagctgacactgacatgccaggcaggcccccagcctaggtaagcacaggctagcctttgactgtgatctgaagcacatattcttggctctctctttcggtgagggtcagtaagctattttatatgcaaggaccacattctgctcttctgattcatacgtgacagacacatttggataaaagcagaaatataacaggactgaaagattaaaacttgctgtcttagcatacttaatattcactgatgcttacacataatgtaaatatctctttgtttaaaatgagtatannnnnnnnnnnnnnnnnnnnnnnnnnnnnnnnnnnnnnnnnnnnnnnnnnnnnnnnnnnnnnnnnnnnnnnnnnnnnnnnnnnnnnnnnnnnnnnnnnnnnnnnnnnnnnnnnnnnnnnnnnnnnnnnnnnnnnnnnnnnnnnnnnnnnnnnnnnnnnnnnnnnnnnnnnnnnnnnnnnnnnnnnnnnnnnnnnnnnnnnnnnnnnnnnnnnnnnnnnnnnnnnnnnnnnnnnnnnnnnnnnnnnnnnnnnnnnnnnnnnnnnnnnnnnnnnnnnnnnnnnnnnnnnnnnnnnnnnnnnntaaacaaataaaacaagtattatcttgactttaaagaaagagactttcttgtgacatataagcaaaatatggtcaaaacaatttgaccaaggttgaaaatggactggaatcacttctaaggagccagcctaggtctgtcgaatcaagtttgctcacnnnnnnnnnnnnnnnnnnnnnnnnnnnnnnnnnnnnnnnnnnnnnnnnnnnnnnnnnnnnnnnnnnnnnnnnnnnnnnnnnnnnnnnnnnnnnnnnnnnnnnnnnnnnnnnnnnaaataacaaacaaaaccacatcctttgctcctgagccctgttcgccccagacattatgtgatgaactcactccgttctttaagatccagctctgcagagcatctcagattccctgtcctgaggcaggtactcctgtatgagctcttaaatacttctgcatttacctaccacctactggtatggttttctgactatatttcatcttcttcgcctcacgtggagtttcttttagaatggaaagttttcttcctttcctctttgaatcctagcaccaaggccacactcggcactgaatacctgtctcgaatgaatgaataaaatcaatcttgtttga

SEQ ID NO: 181852 - DNA, 1138 bp, Homo Sapiens
  misc_feature (85)..(112): n is a, c, g, or t
ttggagttgcttctgtggaccatcatgccgctcggcacgtcctgagacagatattgctgcatgaatgagcttctggataggtccnnnnnnnnnnnnnnnnnnnnnnnnnnnnatgtttccttcttgaacagacattccaactttagatgtgtttataaaagtgacctttttactaattcaatatcttgatatatgttggaaactacttaatatgcttttcctgcacaccttatcaataactgtaggggtctctgctagagttgtttgtatgtacagcaattttgaacaaattgttttaaatgtaatataagagaattagtttaaggaagtaaagagaatcatttgcttgtgttacattttcagtgaggattcagtttaagagtcattcttaggacttccatttcctaatatttattcatgggtaatgaagaaatggtttgcattttgtggccagtcctaatttattttccagctgagccctaacttccggctcccacctacctccacggacttcctaacagagacttatgaataccaggatgtgtttttgttaagtcaggttcaattcgttgcccctgtcagttttatagagtgtgagggtcactccattaaagatctctcctgggtggatcctacttggatgttcaggtgattttgaaaactgctaacatttttaaaaggctagaacatcctttgacttcttgaaaatctgcatgtctggcttgggttttattaccacatgcctgagttcttcaagaatggaaggctcaagtattctcatcttccatttgccaaacttccttcctgatttgagtcacatgttccacttggaaagaaagggaacagagagcctcctccatggacagtgtatgaatttcattgggaatcttgctctctcccgcctctatgcctttctctctttttaaccttactttacataatattatagatgggccaagaaaagaaaagatgacataacattttgatgaatttcacctattccattcttcacgtttcagaattggtcgactttgttagaagataattgaagtagccttgggtcaaaagcaaccttttcaattgtgatcatacctaaaacatataaaaaccctgccgtagattaaaagcaattataaaa

SEQ ID NO: 181853 - DNA, 1200 bp, Homo Sapiens
tgtaataactgaagcaactaattaaaaatcttagaagaacaatatttattcttataacagccaactatggtgagttattataaggtaaattgccataatccagcgctgctcacatctaaaaaactttgaggtgtaaaggtaaatcgtaccaatctctgggctgccctagtgacttttttgatacctcagagtcctattgaagaaccaggtggaatgattgtggtaagggctatagtgctggagccaaacaccccagcaagaaaactctaaaaggacaaaagataaggtagtgcctccaaggtggcacctgaaccctctcaggctactttttggtttctactaacaaacctgagggaaggaactgcctcccaaagtgcagaaccagattcttaactgccacagactcttgtattatgtaatttatatacagaacacaaagcacttgatttgcttaactgatgtacttgatgatactataaaacctatattatgagaaagcattgctccttcaaaggaatcaagtgatagcaaacactcggtcctgtttccaggttttcctcactgttcattttgcctttgttcttgcaggcggagaatgaaaggggcgagagctaaagtgtgttgtcaatgcaagtcatcattaaccaacaataatttacaaaagaactttatatttgctgtaatcattaaatttagttactaatcccaggaaaagggttagtccttcctcctagtttgtagatttgcaaatggagatgaataattgaatcctattttaatcttttatctgcagtaatctgggcttcttattaccggatatatttgcattttacctccaggccatgttagttcttagaagattattttcctcatgaaccctgttttgttttgcttcctttctgcttcaattctaatgtcacattgcatacctggatgtaaacagcagtcagtttctcagatcaaatagagccctgtagcaacttggaagacacagaagacacacgggacataaaactgtatttattatccagggaatgtcactacggattaatttatgttaatgagggccatcaaaaatctatggtaatctttcaggcctttgttgtttgataccagatacagccaatgagataataatgtgtctaattgtggcctagccagtattgggtattttataaaactttgtcattgaatctttac

SEQ ID NO: 181854 - DNA, 1125 bp, Homo Sapiens
ccagaaataggcagatagctgcagaaaaagcccatcaactttaaggctagctacctctttgtattagaggtttcttgtcaattttagcatctcagaacctgtacccacatttctaacctgaaaatacgtgtaaacagatatcttacactcattcagcttttaaacattttatatcagaaaggttttgaagtatttcttgttgctgtatcttgtaaacagaaaccttttatattattttaatcccaacgtcaatacacaatgacccactgacttttctccttctccattatcatcacttatttgttcttagccttattcaggcaacctgaaattcaactaattaactagagatgctatataataatgtacagtgtctactgaaaagtcatttttagcttagttttgtaaatatatcctatgatgtgaattttatgccgcttttcaaatcctaggtcgaaagttttaaacatgatatttgtgtcccttcttttccaaatcgtatgaatgtgtatatatttctattttttctacaaaagggtgcatacttttcagcagattctaaaagaactatgtagctgtaaccttttaaaaaaaggttaagaattgcttatcttaggagaatatcaacaattaaacaggttcacatttataggagaattctggaaactatgcctgggaaaagggaatgaaaaaatatctcatgagaaacagtatatatagctgtatctatatatgtctgtctatctaactgtagattgatctatttacatataatcaaacacacatggccacactctcatacatacaggcacatgctgctgtgctacaacataatagtaaacagggtgagagactaggattattatcaatattaaatttgttttaattatgtgtatttttccacagcaagcttaaagataataaactgctttatcttcacggagaaccaaaccaatcattgctgagaaacctctgacagcgctcctatctaaaatgggtaattctaaactaacattacccatcttgacctcccggccagacttggctccaagtgatttggctgtttccataaatcacatcttcctttcaaaggcaaagacatttcagatatttagaagaatccaa

SEQ ID NO: 181855 - DNA, 1074 bp, Homo Sapiens
  misc_feature (930)..(943): n is a, c, g, or t
tgtacaaaaaagttgggttgtctgcctttaaaaaatggaggattgtgcacagctgccgggccacaatttcctgcctttagtccaatagctggtttggaggcactctttccgcagctcaaccctacatcaccagagtcatgcacagcctccagacctgtgtgcatccacccctggcctgatagccagcccagcagtaaccctgctgccattcaggagagacagtcgtacaacctttctggcctgctgcatcagcatgtgcctgaccagcaaccagcttggtgccaactccagaaaaaccatgccaccacagtcatgggcttctgcatactaagtcactgagataatcacggacatcgcaggtgaggattccagctgaataatctgtttggacaccacaatactgagtccaccctgaaccaaagccaccacacgccatttccaatcagcaccctaggacccatcaacaggaaaaaacctcttcctatgaaagctgctcgttaaaattggaaaaagcaattgtccattacatgcacaggtaccaacatagagacagaagaatcatgaaaaagcaaggaaacatgtcacccccaaacctggcaccacaatgcatctttagtaatggaatccaaagaaaagaatatttatgaaatgcatgaaaaataattcaaaataatgacattaaagaaacttttgagttgtaagagaatacaacaatttaacgaaattaataaattcattagctgagtgagaaattgaacaaagatagatattatggaaaggaacaaaacaggaatcttggagcttgaggaattaagtgaatgaaattaaaaaaaatacaattgagagccacagtaacagactagaacatgcagaataatacatttctgaacttgaagacagatcgtttgaaataacccattcagaggaagnnnnnnnnnnnnnngaataacaaagtatgaagaaagcccataggacttatcagacaccattaagcaaacctatattcatattatgggagtgccagagaaagaataagtgaagagaggcatagaccacccatttggttaaatagat

SEQ ID NO: 181856 - DNA, 371 bp, Homo Sapiens
  misc_feature (129)..(222): n is a, c, g, or t
ttgggtatagctagcactggcatttagctataccactataacaataatagtgttaatacacataacctattattaacactattattgttatagtggtatagctaaatgccagtgctagctatacccaannnnnnnnnnnnnnnnnnnnnnnnnnnnnnnnnnnnnnnnnnnnnnnnnnnnnnnnnnnnnnnnnnnnnnnnnnnnnnnnnnnnnnnnnnnnnngggcccgagcttaagactggccgtcgttttacaccctacccccaagacattctctctgtcggccaggctggagtgcagcctcaacctcctgggcccaagtgatcctcccacctcagcacacaacaccatgcccagctaattttaagtgc

SEQ ID NO: 181857 - DNA, 1827 bp, Homo Sapiens
  misc_feature (1657)..(1666): n is a, c, g, or t
tttggactgaatcacatctgtagtacttagccaaagacaatttggaggagaatatcagcttctggaagtagctacttcgtgaacaatgtaaagtgtcgcagatattcaataaaatggcaacctgttataatttgtgaaatttattgaaatggtgtaagatgaaaacaattgcatatcaaacccaatttatgttttctaaatatagtgtatgtattctgccatgtaagtaattgaacagtcttaaaataaccaaatggtagagggctgttccatgatgggacagctttggatttgttttcataaaatctctacattcaataaaaattggaattatgtgcctgaagtttggaggcacattttgaagtattctttgtagacatatagtatgtttctgaatgtgtttgttacttatttggtcattggtacttaatttgaaattttaattttttaagagaagaaatagaatggttctttgtactcagtctgcaatgatctatttttggcttatgtcttttaatactactctctttctctgaattttgaaatatgaagtaaaatctagcccatttgttttatgcagctattcaacaaactttgtgtgttcgtatacttgctacatgcagagcactttaccaggtttctaagcaaaaatttctaaaaatgattaattgttctgacagaattaggcgtagttctttatcaacatttatggattccatgccacaagtagtatgcgcttaagtgcagagcatgccaagagaaagagtaggatttggccctgtaggagcaagattcaattgtgggaaactacttgtttctgaaaattgcatgctaggatatttacatcatgttcctgttgaaaacaattcctgattaaaatacaagaataatcttaaaacatcaaagagattttccagacaataaggaatgccaagtccaaaagtaaagagaataagagaagcaagcatgtacccttactctgacaaccttatgagtgagggggacagaaattaaagttcagggcccatataaggtgatgaacctaacaggagaccctccacacaataggctgagactcccaaatactttcacctttaggatgataatgaatcagaggtggaagaaccaatgtaaaagaacaggcaagtttagaattgccccagtgatctaaagaatcttaagcactgagcttcctttaaggtgttcccacactagtaatgcctccaggtgacagagaaaataaaatgtaaatacttttcatggaaaagtaatttcattgtaggcctcaaattacttttcaaatatgtctagtaacacatagtaaaaagtagtcatataaggaaactagattccagaggcaagaattacttgaagcaatgaaaacaaactcacagatataggtattagatttgttttctttgtttaaggaaataaggtgtgtgaatgtacttgcaggaaatgggaaactatacgataaaaagttgtggagctaatctggaaaagaactgaatataaacattacaagaatatacataaaaactgcactttaaaactcagtaaatagatgtaatagaatgtagccaattggggtagtttataaactggaagataactcaggagacactattcacagtgcaccatgggagaaacagctggnnnnnnnnnncagaagacctgtagagaatacagtgaaaaatcctaagtgcttcattagctgtgagaggagaggcaagaataggacagagcaaatacttagatagaatgcagaattttaaaaactgatgaaagacatgaccccacacattctagaagccagacaaatcccaa

SEQ ID NO: 181858 - DNA, 565 bp, Homo Sapiens
tggcttatgggccagtataacaatttcaagagttatattgaaaagataggacgcaggaaaagcaaaaggagtaaaaaatacgtataccaggtaaatgttaaccaaaagaaagctgatgtggctgtattaataccagacaaaatactctttaggccaaaagtattaggaaacataaggactattgttacataatactgaaagtcacaattctctggaaatatatactaattgtaacaatgtagcctcacattaaataatgtaaacatttacctaattataagaagaatttacctccaatcagtttgggagatgttaacatccctccctcaattgatagttggagcagaccaaaaatcagcaaaaatatgtttggaatgacacaatcaactaactagatttagtcactagctataatacatttagtgaacaaatgtagtcttgcactaaaattagagaatacctatccttttcaagaatacataaaataatgaccatatatataccacagagtaagctgcaaccaattctagataacttaaatacagaccatgtttggaaatttaag

SEQ ID NO: 181859 - DNA, 1405 bp, Homo Sapiens
  misc_feature (1026)..(1061): n is a, c, g, or t
taaataattactgtcagctacctgaatacgccccagaaacatgactttatcacttttaatatagaatacatagatatgaaaagattgttttgaaaattcgtatccattctgctgaagtattctcacataaagcaagtattatccagttgacatgatttaaaacttttcagtctaaggtgagatggggaggggcatttcagacttggcggagggggtgagatgtgtatctttagcagggcttgtggccagcagatttagaagtgaaggcgggctcctggacgaccatcttggcaagcccacctgcaccagctgggagatcgctgccctggtattttaggtcagggttaggtagaccccagagagaagggggagaaagaaaaatctttgttctgctcattcccctgctgcatctcttctttctgattctccctaagacagttgttgaaccaattcatactgtgaaatccatgtgcctcccttttgctagctttctctaggacgctcagctggaccagtatgcctcagggagaactcagccgtgagatgcttcacctaagggagtaggtgactgctggttcccctttgaacttctaatccagatccttgggaactgcatggatggaagctatctcagcatgcaggtgagggaggaagagctgggggaaagaactctgtgtctgtgtttactcacattggccccagagaggaaaggacacagtaagatgggtccgtattggagaggaagcaaagggatggttttcatcctccccatctgctagtcacaaagttggaatttcaggaattgatggctactccctcacggaccctttgtctaacttatactaaggtgacctggagtccaactgctctacctggagttatttgtacagagaatctgcaggtgagcagggctggaaaggactgaatggccccttctgaagataccgcttatttatttaggaagccatttgagctagagaagacttgcccccttacatagcctatttacaaggtccactaccaccnnnnnnnnnnnnnnnnnnnnnnnnnnnnnnnnnnnnctgcattgacggtggaaactgcagaatggtagaaaaagattttgagatctgactgcccctcgtgcagaacagggttatagagaaaatgagactgagaagaacacatggctgctcttcaaacggctgaccaggccaccctgagctgccagttcttccaaactccaaatcctactctaacaactgccacggaccttcctaccacttcatcctagctaaacctatggcttttatcagaatgagaaattagctcaaatttgaatgggagtggaccaagaaaaggagactgcaggggtgtgtcctacttcctgactcccaccctccaggcgtcttggaatgtcacccaa

SEQ ID NO: 181860 - DNA, 1037 bp, Homo Sapiens
ttggagttctttcttttttggcaaaaatacttcataattggatttcatgtcccctaccccttaattttttaaagtgagcctcgaaaatgttaagtaattcgcccatggtcacgtatctagaaacagagctgggatttgcacccagggggtctggctgcaaaatttatgctcttagttacgatgccgtcatggaataaaaatctcctatggctcagtgtgttacatctcatgatgagatttatactcaggagatataagagtgggatgatgctaagtaaacagactttgtagatcatttattaaagtccctagaattacgccttacaaaatatgtgcttgtaatagctgctctgtgttggatttctccatcttaaaatatagaatcctgaggtatggttccatatctgtttccttcttactgtgttctgccctaatcatgccttttttccattcttcctccacctttctttatgttcttcactatattttcgactggatgacatttctattttgcctctctaggactggttcgttgtaaacccaacaacaaccaaaagctttgaaaagctgatgaagataaagcagcggcagcaagaagaagaaaagcggaggcagcagcacaggagcagaaggtctctaagaaggcggcagcagcctggcattgagcttcccgagacagagctgagtcttagagtagggaaggatcagaggaggaataatgaggaactggtagtgtcagcctcctgtaaggaaccagagcaggagccagtgccagcacagttccagaaagtaaagcccccaagactaatcataaacgaggaaggaaataggcagtcagtgtaaaagtgctcctaggaaagcagatgtgatgctgttgtcacggggacctgtgctgggaggactgagtgaagattctttcagctgtttgtgtaagctgtgactttctcagctccttcctcctgtgtaaatttcactgtcttcccttcttacattttgattccccctcccttttagtagttttctgctattcctcgtca

SEQ ID NO: 181861 - DNA, 968 bp, Homo Sapiens
aactttgtacaaaaaagttgggtttattgagcacctggggactgcaggcacgaggtgaactcagagaagtgctaggctcctcagagctctctgggaagataatcaaatacaaacagggcaatggataattaagatgttttcaaatagtactaagtgtcatgaagaaaataacctggggcagagtggtgggtagggctgggaggtgctcctttaggcaggactggtagagaaggtgtcactgcagtgccggcatttgagccggggtgagatgggcgggccaagctgtgcagagatctggggtagtgcatcccaggcagagtgggcagtcttgaggctgttccacacaccctggccaattgcatttccatagctcgttgttgtgtttgagcttaaaaagaaaaattgatttaacattgttttgtatgtatttttggcttaacaaggatgatatatttgctacggaagcaattaaaccctctcagaaaaccagagagaaggagaaaacattggaatctaatttatttgatgataacattgatatctttgctgacttaactgtaaaaccaaaagaaaagtccaaaaagaaagtggaagccaagtctatatttgatgatgatatgggtaagtttggttttctacatctgacctagagaattcttacctttctgtcacttggtatttttcttgctaccttttcttggcccttttctggaaaatgcaccccagcgggttcacttcagtgtaatcctgagttaggctgaagataggtaagagatggactaattattttagtgaagtaactctttcctatgatagtcatcaaagaatttgaaggcacccagagtttgacgtttaagtataatttaactttgatctcagtgcacctcaccaatcatctgtgacacaccccggtgttatgaaaggagtttgatcagaaatgacctcacgtgctaagtaggctgagggga

SEQ ID NO: 181862 - DNA, 1447 bp, Homo Sapiens
  misc_feature (304)..(316): n is a, c, g, or t
ttggatttgcatgcacagtgataggtgtgaagtacaaccttgtaccgttgtacactgtcaactagaaaataaaacagcacacttgaaacacccttgccttctagcaaagatcccatcttcccacacagaatgatggcaagaaaatgaggtctaaaatgtgtagaagtagtagaagaaataatctctttttctgtttgggttttgttccccagatggggtctagaaggagaggcagcctggaggactgggtctgctctccaggcattatggaggtgggttttcttttgcagcaaattcaggtgcnnnnnnnnnnnnngtagcaaattgcagcaaaatcaaaggctttttctatttggaaccagagttggggctttcggtcaagtggtgccctggattttcctccccagatacctgtcaactcccagtcacttgctctcacctgcctcatattcccccagtcctagggctctcaggccaggcttctagcagcatcacttaaaaagttagcaccgggagaggaagcagaaccaaattcacggtgaatcacggccatagtgacattttcatcatgagtgtgggaacaaaaggccctcatcccgattctttcatctgtgcattcagaatgtgaagaatacacttgcccgtgtggctgccgttggtagaggtcagtttttggcctgtttgattgatggggaaagctgtgcagccacctgttttggacccggctggagacatcccacttgaagactcaaagtcaggtgtccttgtactgattttctgattccttcttctcaggtcacagaagatgtgaattcaagtatcaagacatttttttgtcccaatgatacctacaatgacatggccacactcttcttcaacccgcaggagtctgccatcctccagctcttccaccaggatggtactttcagccccgtcactctggccttgttcttcgttctctatttcttgcttgcatgttggacttacggcatttctgttccaagtggcctttttgtgccttctctgctgtgtggagctgcttttggacgtttagttgccaatgtcctaaaaagctacattggattgggccacatctattcggggacctttgccctgattggtgcagcggctttcttgggcggggtggtccgcatgaccatcagcctcacggtcatcctgatcgagtccaccaatgagatcacctacgggctccccatcatggtcacactgatggtggccaaatggacaggggactttttcaataagggcatttatgatatccacgtgggcctgcgaggcgtgccgcttctggaatgggagacagaggtggaaatggacaagctgagagccagcgacatcatggagcccaacctgacctacgtctacccgcacacccgcatccagtctctggtgagcatcctgcgcaccacggtccaccatgccttcc

SEQ ID NO: 181863 - DNA, 1322 bp, Homo Sapiens
actttgtacaaaaaagttggctggatgttcccgagtatcctgatgttccacccagaagccgccagggccatcctggagtaccgcatccgcacgctggacggggccctggagaacgcccagaacctgggctaccagggagccaagtttgcctgggagagtgcagactccggcctagaggtttgccctgaggacatttacggagtccaggaggtccacgtcaacggggccgtggtgttggccttcgagctgtactaccataccacccaggacctgcagctatttcgagaggctggtggctgggacgtggtcagggctgtggccgagttttggtgcagtcgtgttgagtggagccccagggaggaaaagtaccacctgaggggtgagggccatggtggggaggggctcggggaggaagggtggatgctcccagactcagcagatgattttcagacacctcacgtgtgccagccccacgctgaccaccggcgtggagggaaggcctctgagactctgcactgagcaccatcttggacttgtgtgtccaggagtcatgtcccccgacgagtaccactcaggggtcaacaactctgtgtacaccaacgtcctggtccagaacaggtcagacacaagatcccctcacctcaccccacccccgccccagctggagacctgccccggtgcccccactaggcaggcagcagctggaagtgtaggggttgcagcctcccccacctacctccacctccagcctgcgctttgctgctgccctggcccaggacctgggtcttcccatccccagccagtggctggcggtggctgacaagatcaaggtaccctttgacgtggagcagaacttccacccggagttcgatgggtatgagcctggagaggtggtgaagcaggcagacgtcgtgctcctgggatacccagtccccttctccctgagtcctgatgttcgcaggaaaaatctggagatttacgaggctgtgacgtccccccagggccccgccatgacctggagcatgtttgctgtgggctggatggagctgaaggacgcagtgcgggcccggggcctcctggacaggagctttgccaacatggctgaacccttcaaggtgtggacggagaatgcagacgggtcaggcgctgtgaacttcctgacaggcatggggggcttcctgcaggcggtggtcttcggggtgcacggggttcagagtgagcgtctccggcatcttctaccaggggaacaagctcaacttctctttttccgaggactccgtgaccgtggaggtcacagctcgagcaaggcccttgggctcctc

SEQ ID NO: 181864 - DNA, 1307 bp, Homo Sapiens
ttggggtttatcactgccatcccacttctgggatgggaggtagcaagggcttctgtattttcttgtgttcattctagcaacccagacatttccggatcagatcctgctggtctccactcactggaaagtctgccagatgccgatttgagagctgcctgtccctgctttcaggaggagcggggagaaaaactccaatggtctttaatggtttctgcagctggccacggccaattcatatgacattgtgagtttgctttcttatagagctgctctggggagaggtttgctattgagatgtaacagtggagctgttgggtcttcatgactcctttgcgtgtgttccatgggactctctttctgggttccccatgcttatagttgcctcgtgtcacaagacagatactaatgtcaggtttgtggcttcctgatggtttgggtggggccccagtgtcctggtaatttataggactgcctcatctgggagcattgccttcttccttagtcccacgtggagtgaccagtcttcctccttgtagctgaacagggaggaaacttgcaccattacctgactgtggaagggtggcccacaagatgagctgtgcaccataaacacagcccacctctgatttgtcatgtggtacctcttctttccttggcttccatggtagtattatcaactaagcaagattgtgatcccagaaattggcttagcatgtgagtgttgcctcgtgagagtacaagtaatataactcgccatcttgcaggaagtgccaccccaatatagagcctgaagttggaatctgttgagatccttgggtggctgatatacagcctgggatctttcttttttttgttccttttcaaccacccataattttaatattattttttagtgtgtgtgtgcctggctttgcgctagatattgtagaaaacaaaaaaggtaaaagacgtaatatgtggcctaagggagcttttaggtgactgctgcacatcaagcagaaaatcaaggactatctaaagacgtttatagtagataagatcagggtagaccagatggtctgggaaagttctgtgcctctgaggctttgggttgtagtcaatggcaggacagacagtgagatgaaaaacacatgagcaaaagcaaggaagcagaaatctgcatggcatgtactgaacagtgcacagccctgttagagcaacatggttaaagaatcctttccagtgcggttttctagatggaagcttcccagccaccaggcagacctgagtgccaaggggttatgatggtgaggtggagcccaaagccc

SEQ ID NO: 181865 - DNA, 1526 bp, Homo Sapiens
  misc_feature (1231)..(1240): n is a, c, g, or t
ttgggtgtgtttggcactccagatagaaggcaaaatgctcagattcgggcctgtgcacttgtatgcaacctgtcggtcgatacctagcatttatttttccctgacaatgaacgacctttccctcacccaccctaagctcaaagagtttagcaaaattctcttttaaataaacagaatgccagtaagaggttgacccctaccatggaacttctgggatgctaaatacttcctcatgaacaaaataagttccttattataagttccttatactagcagcttcacctaaagaattttctctccagcaatattgacttcactggggaaaagccaagagtgtgtggtgagtgatttgttctcactcgacctggctaggactggctaggagctgttttttgtacatgagggaatttgggctttcctcagttatctgaatgttttacccaagtgccttcctgctattgtagcaaagtagctcagcttccttgtccacagggtgaaaaaggactaatgcattttccatcagttttctaactatgttagcaaaaacggcctcctggtagctcaacctcctgtacgcgtgtgtgtgtgtaatacacacacaaataaacccctctgtttttctaagacatcttagctggatattataggaagcactttcataaacaactgtaacaaatcgcaaaggaaagagaaacaaaagcattagatttgagacataaacaggcaagagaaagtgtattaggaactgacagctatcaaggaagttttgtcagttacaaatgctaggaggaaattttgccaagaaggatggctcatgaaatatttccagtacgggaagaggcaataagatcctctaagagaatgagaaagtaggggtgtctaaatggtaaagatgggtgtgttgcacgtgtgttagaaggatctcagttgagtgaaggtttgcactgctacatctaagttaatgtaaatatgtagcactctgacaggtctaccgtgttgctgaatgtagtatatttccaaagtttgcaagtcttcctgtattgtacaaagatgctgctgcttgataatatgtatagcaatccagattagtatgttattaaattttattttcttacctgtatttttatgctttttacctgtcctcaaaatattacacccctgttggaattagatttatatttataaatggtcagaaatctttttaaatgtctctttttacacataggttgannnnnnnnnncttaagagaaatgatgtattcttgaaacattttgttactcattccaggaaacaaaaaacccatataataaaaccccccactcagagcctgttagtcacctctctagaagatggcatctcaggagaaggaatggctttgtggaagaaggaatccctttttcttgctccagaattatgctgacttcagccctgaccctgatctggtcactgagaatatcaagtgtcagatctcccccccaaatactaattagtaggtgattttgattttaaaaattgacacaaaaccc

SEQ ID NO: 181866 - DNA, 938 bp, Homo Sapiens
atgagccaccgcgcccggccgagttcttggtctatttttaaattgttttcttattgttgagttttaagtgttctttttatccttactgttgagtttgaagtattctttgatcctttatcagagctatcttttgcaaatatactctcctgatctgtggcttgtctttttattctcttacagggtctttcacagagcagagatttttaagtttaatgaagtcctgcttatcaattttctctttcacggattatacctttggtgtattttaaaagtcactgccaaatccaagatcacctggattttaccctatgttatcttctgggagtttcatagttttgcattttatgtttaagtctgtgaaccattttgagtttatttttgtgaaaagtataagatctgtctagattcattgggtcctcaattttttgctggctattggccagaggctgttcttagttacttgtctcttgggccttcctgacatgactgcttgcttcctcaaagccagcaagggagtgtgtctcctagtaagacagaccttatagtcttaggtaatatacttatgaagtgacaacctgtcacattttctgtagtattctagtcacaggtcctgcccacgtgcaaggggatagggagttacacaagggtgtatgtaccaggagacgataatttgtggttgtcttagagtctattcttcatgctctggattacttgaaaaatgggattatatttcttaaaaacctttggaaaacatgtcacttgttaagacaaatactcagttcttttggtggtataaagttagtggtttgagagtattcttccagactttttttctatgcatttagtaacataacttattgttttctgtgcctcattgtgtatcctgattgcttcttaaactgggttctaaatgataaaataacatccctatatagcat

SEQ ID NO: 181867 - DNA, 1210 bp, Homo Sapiens
gagccatcacacctggcagaatattgttttaaatgtctttgcttatacaagtgatattacagatctttgttgctatacaaaatgcattggattttttattggaattgtatcatctcgataatttgaggattgtggccatctttacaatgtttcatctgcttatctagaatatgaaataggggtttatatagttttatttaaggttttatacatcatttattgattctattgaaatacttgtttttcattgtaactagaaattcttttaaaaatgtttaaataaacatatgttttgctggtatacaagaatgtttgttgatatttacttagtacgtggcgacttaatccttttagttataagattcatgacatagaatcttagtttttagaggatttactgacttagatatttttagaaaaggccagcatataatcatagcatgaaagaactgaccagaaatagttttgtgacctgtgtaggccacttggagactgacccagccacacagagtgcacagagggtcatgtctaattgtggtctctggtgctcgtaatactttaattcaaaagaaatgttttgatggcctacactggagtgtgttaagccaccagattccggtgctttcgtgggggtgatatcagggcaaggctcatttaaacacttcagtatttgtctccaaagcatgaggataattgcccaggcatccaagatgacaagtttgcatttaaaaaagtaacagggattctgtaacagtatctgttactacagtgcctatcaggacttagccaccctcccaataacaacaggtcaggattcagttggttggtaacgtatctgtaattactttttgctttagaacagacccccttttcaccctcaatattgacttttttggagagtgctagagcattgtcttataagaatccccacactgtctatgtggttgtttcctcttgctatcctataactagtttctctataatatatagtttctgtaaacagaagttaggcctagggcctgaatatattcaggttagcatctttgcaggaatattcataaagtagatgtacttcatggcacatcacattaggggtccgtatgtcaagatatttcattttattgtaagcatttctatgtatttttatagtatgtataggaatgattaaatatgagctaaatagtagccaattctttgaatattctcattt

SEQ ID NO: 181868 - DNA, 1618 bp, Homo Sapiens
tcccgtcctccctgctgctggcccgcctggcccggctcctctcccgcttgtgccggtcagcaagcccgtctccggtggcccggccccggcccttgctgggctcccggttgcacttgtcctgttctgaccgggtgtcctttctggagacattctgctcgcaggcagagatgcccttgggctgttggttgttgtcaggaatgcaggagaggacgccgcccgggcacctcttctctggagagccatcctcggggaccacacgacaggagctctgaacctccttgcatggggcctcctcggccacgctcccgttcacgcttttgggagcgccgtcggcctctgggtgggccgggctctccttgggggcaccggccgggggctggcccccgagggggtgcagcgtggtggcgctcacacagccggacgacacggtctgcaggatgtccaggacgggctgcagcaggtcggcgtgtgccacgcccagctcgtcgtgtgtgtggctgtcgtccggcttcttgctcagcaggatgctcagcagccgctcgcgcagctcccgctctttccgctgcaggcccagcgcgcgctccttctcctcctccacgcgccgcagctcggcctcctgcagccgccgccgctcctcctgctgctggagcctcagcttctcctccttctgctcctgttcccgtagcttcacagcctgcggggaagaggaaagtgcagctgagcccggttcctgagcctggccggacacgtgggacaggagctgggaaggtgtttggaggccccatggtctggggatgcaggatcagcggcctggctggactccagcccaggggtggggggcgtctcctacggcgagccaggtccagcccgtccatccctcggctcccgcggccacacctggggccatcatgcgtctgagtgagaaggaaaccccttggcaaagcggctcggcgcagccccagggcgggcctcttgggcagagccgagccctgccgggagccccaccacgttgcacacaggcgcctgcggttaggtcacaagcggccgccagcaacagggagctgagatgacgccgcagacgcatgccaccgccgtagctgcggggcgagcctggcctagcctgggttagtgtcttcaatattcaccatgaggtaaggactgggctgccacatgtctcagcctcttgtcatgctccttcccggggacttatcacaactgtaatcagacaacaggttatggggtcgccccgcgttggactccagggggacgcagccctcctgaggacaaggagcgtgccggggacgtctgtcctggggaggtctgtctgtctgtgggccctggccccgggctcatgggagttaccagtcgcgcctgcaggaggagcagggaggctcttggtgctgagggggtcgtcagtaccggcgctggtgagacctgtcaggttcacgctgcggaggagggacccgggcccacggcaggccccctctgtgcgctcagccctccccccagcccaccttgcccctctgctctgggccactggtgaggtcacagccaggccagctgaccacacacagaggcgcgggccagagggagcggccccctgcactctctgccccaa

SEQ ID NO: 181869 - DNA, 1249 bp, Homo Sapiens
  misc_feature (62)..(70): n is a, c, g, or t
  misc_feature (352)..(360): n is a, c, g, or t
ttggactgacattagttacaacctagttttaattcttaaaacaattttgattagcaaagctnnnnnnnnntggatgtttcagttaaatgttttaaagaggtacagatttttacaaggacataatataagttattgttctgtagaaatatcctattaaatattgtatgtccctccctctgtacactttgtaaagaaagtaaaatacataaaaagaaaatcatatagggatgtgtgacattattgtaattgtgtacttgagaataacgtgcaaaaataaaaatcagaatattttcctgttattgaatgtttagtctatttgataccagtactaagttaatgctttttctcaagnnnnnnnnntgtacagtttttgtaaacctaataaacatcaaaagcagtggattattttcatccccccatttcttaatttctttttcacagcagtggaatgcaaagtgcttgattgctttgaattttgtgactcggatgcaaatactggtaatatttcagttctgtgaatttgcaagtaatatttcagagaagttaagaggtgattggtgagtcctttgatgagcatgtccttggaattcattttttcttttatcttcataaaggatttgttttattagcatctccaattcccctgagataaattactcatgcataaagtggtttttgagagcacttaaagttcatttcagtattaatttacagcatatttaatcagtggggactgttaccacctccacaacagaaatcatgccctcgagttaccccactgcgcccagtttagaggactagtagatgctaacatactagggaatggtcattgccacagttaaaaatcggcagttaagtaaatgtcaggagtcaaaagagagagagttgtgccatctttgattttatagacaagattctgcagttcttccaactgtatgaacaaacgtttgcctaatagttgaaacaataaattaaaattttaggtaaatgacgaagggaatgtggtgaatgtcactgtccagagccataaatcagacaaaaccatacatagcatgctgaaaaacttttgtaatggaacacccaacaaatgacacctaacctgtctgtgatccaacaagtccgataacatgctgctgtatttgtattctctgggaatctcagtattaataatttcatttcccacaaattctagcattcatgtaaggaaaaacatggctaatcaatatcttaaaggggcaatctttcagag

SEQ ID NO: 181870 - DNA, 2064 bp, Homo Sapiens
ttggctttagccacctactctgggggatcaactagatcttcaactctttccataagtcgtgttcctcatcctaaattatgtactagaaaaaattgtaatcctcttactataactgtccatgaccctaatgcagctcaatggtattatggcatgtcatggggattaagactttatatcccaggatttgatgttgggactatgttcaccatccaaaagaaaatcttggtctcatggagctcccccaagccaatcgggcctttaactgatctaggtgaccctatattccagaaacaccctgacaaagttgatttaactgttcctctgccattcttagttcctagaccccagctacaacaacaacatcttcaacccagcctaatgtctatactaggtggagtacaccatctccttaacctcacccagcctaaactagcccaagattgttggctatgtttaaaagcaaaacccccttattatgtaggattaggagtagaagccacacttaaacgtggccctctatcttgtcatacacgaccctgtgctctcacaataggagatgtgtctggaaatgcttcctgtctgattagtaccgggtataacttatctgcttctccttttcaggctacttgtaatcagtccctgcttacttccataagcacctcagtctcttaccaagcggccaacaatacctggttggcctgcacctcaggtctcactcgctgcattaatggaactgaaccaggacctctcctgtgcgtgttagttcatgtacttccccaggtatatgtgtacagtggaccagaaggacgacaactcatcgctccccctgagttacatcccaggttgcaccaagctgtcccacttctggttcccctattggctggtcttagcatagctggatcagcagccattggtacggctgccctggttcaaggagaaactggactaatatccctgtctcaacaggtggatgctgattttagtaacctccagtctgccatagatatactacattcccaggtagagtctctggctgaagtagttcttcaaaactgccgatgcttagatctgctattcctctctcaaggaggtttatgtgcagctctaggagaaagttgttgcttctatgccaatcaatctggagtcataaaaggtacagtaaaaaaagttcgagaaaatctagataggcaccaacaagaacgagaaaataacatcccctggtatcaaagcatgtttaactggaacccatggctaactactttaatcactgggttagctggacctctcctcatcctactattaagtttaatttttgggccttgtatattaaattcgtttcttaattttataaaacaacgcatagcttctgtcaaacttacgtatcttaagactcaatatgacacccttgttaataactgaggaatcaacaatttgattccccgaaaacatgggtggtgaatgtaatgcccaacattgtttttactaaccctgtttttagactctcccttttgctctcttaatcacctagccttgtttccacatgactaaaactctcgcttagctgagaaagccggacgaactccatctggcccccttgatttgtaagacattaaggactccttacccacccccttcttcaaggagttaacttgtgtaaacagattctcaacatatcaaaagagtccaattaactgataaggtactgaaacaaacaatgtacgaagttcccaggattttgctcaaaagataacaccacaaagccttgagtctgtgtccggcatagcacccatatctaacatcttatgaaggatttagagcccccgcacctgctaccgttgcttttctgtaaacatttgtcttttaaattgtctgtttctctgtaatcatttgtccttttaatttttgcatgtttttacttctgtagaattgttgcgtttgagctcccctccccttcctaaaccaaagtataaaagaaaatcaagccccctcctcatggccgagagaattttgagcgttagcggtctctttggccaccggctaaataaaggactcttaattcatctc

SEQ ID NO: 181871 - DNA, 2497 bp, Homo Sapiens
  misc_feature (108)..(121): n is a, c, g, or t
  misc_feature (1421)..(1430): n is a, c, g, or t
ttggcaagaattagaaaaatcttcaaaaatatagttggtggtttttttagttatgatttaagtttagtttcattttgtccatgtgacagtcatgaaggagtgaaattnnnnnnnnnnnnnnctcatttgtgaaaattccagaaaaaggatcctaatatctactttgggttttagcattaactttatgcaaagtgcacaaaaacaaaatagctgactcctccaatatcccaagtttcttgtgaaagttaataaaattcttagctgtggtatttctaccagtgaaaaaaggagtttaattttagcctagtttaaaactttctaataattgctaataagaactggctgctgaactgtctttagtcactggagaaaataagggtcagatatcctgaagatggcatcttcgtaaatatgttacgtggtaataagctgtgtgacggtctttattcccatctggcttctgcactattaaaatttgtttaaattaatggatacacatgaaatacttaaacaatataactgaaattatgtgcataatgagtaacctaaagtaggacattcatacattatgtagaactacttttctgcaacacaaaccttgtaaaatacatatataaatcactataacttttaactgtccatatcccctgtagagaattatgaggagcaatagatctgcaaataatgaggactgatgtaaaaatcaatagaaagcattttgaatatgatttaagagcatgtgaatgcttttagatggaatgctgttcccttgaagttatggctgagctgttcttagaactggtctactcaattcacagaaaacataggtcatgccttatctatgggggaacaccctcccagaatttacctgtgattacctgtgctgcatattactttgcaatggcctcatctcagagaatgaaagagggtcacattgttctgaaactctctgcagtcttccaaccaccacaaggccatggatgtgggggtctattccagacagacttaagggctcaagtggaacctgccatctcccattccactgaaggactgtccaagagatttagtgcaaggtacactgcagtagtgaattcccaggcacttgaaagtgactgcctaatccctacaattactagccttgttggagattatgcagcccacaagtacagactagtataaagcaaaaggacaaaggaacccccaccctccaccccacccattaatgacttgagtgggcaagaagaagtgatggccttccttgcctaaaacagtagctttgtttttagggggtgggaaggtaggatgtggagtgacatggttctatcctttacttatgagactcagaaatatatctacaaagccagatgctctgtcttcatatttgcagacatctagaccccttgctaaaaacccactgaagnnnnnnnnnnatgttctttgacccacaccatcaacactaccctcaaatctaattgccctacagcatattctatcatgtggactaggttcctggaaagccggaactcatgattctttttcaaactgccagaatagaagggagagagaaaacatttctaccctttgatcaccagtgtgaacagaatccggaatgcagtttcagcgtgacctgcagtcattcatgttcattggatttgacagatggaaacccaaggttatcgaagattggaaggttatcattgtgaagaagtagctcaaaggactccggtttctgtctacaagtgtgatgtctccatgaagaagacttagtatggatttgggtgggtaagaaagcatttaaacgcccaggaaaggacatgattaaagttgaccttttaatactgtagtaccttgctgttaagtaaccccactattgtatctgcatttatcttttgttcatctactttcacttacatacagtattatataagtagagaaaaatgggaaaatgcaagcaaattcaactttattttatacattgtatatatgtacaccctacactattcatttgggttttattaaagagatagtcacaaagggcttacgaaaatcatttttgaattgataattagaatattgaataagcaatcctatgatccactaatttgttttatcagttaataatattaatcaaagacatttactgtatattctagtcattttgatttgagttaaccccaaatataaaattacctgtagtgatgtctctctcccagcccttatatgtggatattttttaagtggacttgtatgctgataattctagaccaaagtaaatatggcagaatatttatacatgaaaaaataattttgcaaatattttctataattgtattcatttaaaatgttgatagcttgtgttagtttcagggaggggtgtatattttgataaaaaaatacttgactttgtaattctgtatattctatacaatttatagcagagccgttttaagacagccttgtcacatttttttgttaattgtgaaaattttattgagtg

SEQ ID NO: 181872 - DNA, 824 bp, Homo Sapiens
ttggctcaaactactccattggagcatctggcttaggacccagggagagtgtcctggaacggcttgcctttgtcagctctccagccacgggcagcatttggtcagctctgccctttctagtgttgggaggaggtcaaggcccaccctgggcctctcagctcactcgtgactcagcccagcgaggccagcagggcaggggtgaatctgcccgcttctcaggtgaggaggctgaggatgcccagggctgctgtgaccaggactaggactggaaacttgaaggttttctgatcccaagtggaaataggaagctggggatgtcccatgtccacatcacaatggctgccccatcccctgcttccgagtcagctgattggaaaccactagggggcagaatcttctccttccctgatgcccgggtgtttgtggagccggcggtctgcaatgggtcagcctaactgctgatatggtattaatatttctttcttgttttacagccaagaaagggaagggaaaggactagacgccaagcctggatgccaaggagcccctggtgtcacatggggcctggcccacgccctccctctcccaggcccgagatgtgacccaccagtgccttctgtctgctcgttagctttaatcaatcatgccctgccttgtccctctcactccccagccccacccctaagtgcccaaagtggggagggacaagggattctgggaagcttgagcctcctccaaagcaatgtgagtcccagagcccgcttttgttcttccccacaattccattactaagaaacacatcaaataaactgactttttccccc

SEQ ID NO: 181873 - DNA, 1276 bp, Homo Sapiens
ctatgaaaagaaattgggtctagataatttctacatgaaaataataattggtcttctaataacagtcaagtgaaatacattccaacaaactgcatgcttctttttaacaaagctaggatgaaaagccacttaaacaaatagaatgctgtaaactgtgacgtctatgaatatctgacattctgtggagcaaagctgatattttaaaagtcatattgattaccatgtcaaaaatttatttccagcattcattttagccccatgtctctgttacatttttgaatgaacaaatttgatttttaatgttttatctaaagtaggtatcataaacgtttgcatagaagtgatattgttgtgtacaattgtatcaatatacatttctgtatattccataaagctgtgaagtttaagcgtctccgtatgcaaggttgtgaaatccaagaggcatattgtatagaagagatcaaaacagaattctaggcagactgactttgagtcagatgacagctccttgaagtattaattacgcactgacagacatgttggttgttcacggaaccaggaaaatatttggtccttagctcttccagcaaagctttgcaggactggaccctgtgtccagtcaatacagggaagtcattctgtttggttgtgcaatagaaaagaacttttccacacgaagttaccatatttatttagagcccttcagtgaggtggcacaatctcttcgtgtcaagaatccaatagctgtaggaagtttcccgtgggtgtgttcacagaacactgggcccctttccatagttcacagacgtggacaatgagcagatgaggctttctccctctggtcctgaagtagcatcatttcatctgaaatggccacaagcaattttggtttatttttcataacagaatcaaagacatcaccaaaaactccatcccacttcttgcaggggaggaatttgttattttcccttggatcctgttgaacacatgtggcatcctgcctgaacccctcccgcagctgccatgcgatccagagctccatccacttgcccacctaagtggaaagggccttcgagggccatcagtttgcagacgacactgtgcattcctttttctctttcggacgctggctccacaatccgggctccaggaggtggaatcgctgttcacttactgccccctagtggtccgcatttctgaaagttctttatccctgtttcctttgagatttttctccgtagatttataggtgtttagatggggttagtaatgtggc

SEQ ID NO: 181874 - DNA, 1144 bp, Homo Sapiens
ttggctcattcccttaatgttacttcttgttatgtatgcgggggaaccactatcggagaccgatggccttgggaagcccgagagttggtgcctactgatccagctcctgatgtaattccagttcagaaggcccaagctagcaacttctgggtcctaaaaacctcaattattggacaatactgtatagctagagaagggaaagtctttatcatccctgtaagaaagcttaattgtataggacagaagttgtacaacagcacaacaaagacaattacttggtggggcctaaaccacactgaaaagaacccatttagtaaattttctaaattaaaaactgcctgggctcatccagaatctcatcaggactgggcagctcccgctggactatactggatatgtgggcacggagcctacattcggttacctaataaatgggcaggcagttgtgttattggcactattaagccgtcctttttcttattacccataaaaacgggtgagctcctaggtttccctgtctatgcctcccaagagaggcatagttataggaaactggaaagataatgagtggccccctgaaaggatcatacagtattatgggcctgccgcatgggcacaagacagctcatggggatactgaatccccatctacatgctcaatcagatcatatggttgcaggccatcttagaaataattactaatgaaactttgactgttttagcttggcacgaaacccaaatgaggaatgctatctctcagaatagctggccttggactacttgctagcagctgaagaggagtttgtggaaaatttaacttaaccaattgctgcctacaaataaatgatcaaggacaggtggttgaaaacatagtcaggacatgacaaaggtggcacatgtgcctgtacaggtttggcacgagtttaatcctgagtctttatttgaaaaatggtttccagctataggaggatttaaaaccctcattgtaggtggactgctagtgataggagcttgcttgctgctcccctgtgtattacccttgctttttcaaatgataaaaggttttgtacctactttggttcttcataaaacttcaacacacgtgtgttatataaatcacctctccctctaactcaccaataga

SEQ ID NO: 181875 - DNA, 739 bp, Homo Sapiens
  misc_feature (160)..(210): n is a, c, g, or t
  misc_feature (350)..(358): n is a, c, g, or t
ttgggtccccagacggctgatggtggatcctctggccatctcctgtggggtcttactgctcctctgccatttctctatgcctgaagacacgaagatgatatcaaggcagagctaccatatcgcagccagtctctaggctactgctgtgcagtggctcccnnnnnnnnnnnnnnnnnnnnnnnnnnnnnnnnnnnnnnnnnnnnnnnnnnncaaaatgaattccaacccctgctagcttccttccccgcctccatactgttttaggcagcaccgtttatgtgacagagtccgtgtttctcaaatgcatggtgttcctcaggtggagagtgggcagaagtttttgcaacacnnnnnnnnnaagttattgggtgcaaaatcccaaaccaggatatgtgtatgtctgtgtgtttatgttttttatttgaccctcccctctttcaacctacccccttttatatctaatgtagaaaaagcgaaattgaatctggaaagcaaactgttgtatatagttgcggtaacaatcatgaagagagagccgggctgtcccctcagtaattcattttaaataacaaattatttaaaaataaaattcatgccagagccagctgaagaggccttccttcatcaccactgaggccacccccaatctgggccctctgtccatctggcatgtctcctcccagcaagattcatctgttcaatgccatttgcgttcaataaagttatctcctgtactgtc

SEQ ID NO: 181876 - DNA, 950 bp, Homo Sapiens
gaatgccatgccaggagaagacagctggtttcaaatccctgcccccaggcaagtaaaaccctgacttgctcaagacagaagatcttttctcctgtttttcaaaataaacatatatagggatggaccctgtgcattgtggcctgccttggtgtcctagaattggagccagtctttagcttaatgtctgaagtatttatacggccaatatgtgttttcttatgtcagaccaaactgtctttttgaatatcagttcatttcctctcaccgagtgcttttcggtgagaggcaaagagaaagaatgaacaatcaagtattgacagactggcattagcaggacagagccatactagtgacaagggcatcccaaggcacttgcccagagctgcagagttgtgtgtgccatacctgcggctcaaagggaaggccttctatcccctgagtttctatcagctgaaaatggcaactgctgtctcagtaaaagctctgtcttgactgcagaggctccaaaagcattcacagttgagggggagaaagacagaaagaagaagccaaagataacctgatccctgcctgtctgttggcacctgtcatcctctggcttctgctcccaaaagcaagtctggatgactgagttttgtggacatggcactcccggagacagcagtggccaccatggcacccagagtttgcccaagtactgaatgttttgtgagcaaccatgttccccaagtaggtagccagcgctgcagaaaccaaacagcctcttagctacctgactttaaaaggaatgacctaggtgttctgccaaaggagttatctatcatctctggcaaacttgacaatcatcacttacctcgacaaccctgccccacatcactttataaagtcagcaggatgtcctctcacccaccctgtgctggtgtctaacaaatttatcttgtcatgctcaa

SEQ ID NO: 181877 - DNA, 193 bp, Homo Sapiens
ttgggtgtgaattagaaattctaagctgagaaagctacttaaaattggtcaagaaaaagatacacattaagtataagaaagttggcatggctatagtagtatcagataataggcctcaaaacaatgtatatggcaggagataggtaacagtcataaaagagcaggtcattaggaatttgcatatacatttgtc

SEQ ID NO: 181878 - DNA, 987 bp, Homo Sapiens
  misc_feature (702)..(718): n is a, c, g, or t
ttggatgaaatttatcccggaaccgctaacctttctttgaaacccttgttgctacctataccagtgaacctatcatgctgtgttacagtcatgtctttactgataggtctcctgcactagcctagggaagggttctttgcttcttattccttatatttctaggatctgagccattataggccctcaatacattagctgaatgcagtaacaaatcaggaagtagagttgtttttacagccttactgttaggttgactcaggtttaacatgatgtgacatttttaagcatcttggacttactgcgtgcacatctgtagtttcttttccttatggttttctttgatgtagatatgcaaggtaagagaatactttacttttttgatattatgttggagaggttgttttaaaaagtacgactttagatttagaagaactgagttcaaactatagatctataacctcttactggctcagtagtcattaacaagttatttacattttctgaatctcagattaattgtcagtgaaataggagttgtcttcttgtctctcagtattttttaatattacaatagaaaatactaaattagaatattagaaaacatatggtatctagcacagagtatgttctcagtaattttttattctaaatattggtcacagaaaaatgaatgcatctcagaagatacatttggaagctcannnnnnnnnnnnnnnnnctgaaattgagaatttgaccctcactctccactctcagaaattactcatagtcatttgggtagttggattgtctttccattggctttcatatataaagcaaaaaatgtccaaaaatactgagaagcaccaaatggtgctagtaatgcaattcatgaacattttccaaatttgctagcaagatagtcggtaaaatgtgccattttcacatcttgttcatagagcaaacaaatatacttaactatgcaataatatacagtattaaatcccc

SEQ ID NO: 181879 - DNA, 1195 bp, Homo Sapiens
  misc_feature (1039)..(1048): n is a, c, g, or t
taaaagcaattaaacataatttgagagacagatactagagctaaactgggtattaactgagaagggaatggaatggatatcacagtgaagatataacagaaaaactctttcacactgaaaaattatcggaatctaaaaatcaatagggttcaccaagtactaagcaaaaatcaatgaaaagtgaacacctggtttaaaaaacagtttaattttcgatatcaagatataatttaacaagcaagcaggaagaaaataaagcaaaacgaaacaacatcttacctacaaaggaagaagaaacattttagtctgtgacccctcctcttgaaaaagtgagatgtagaagactttggaaacaatattcacagacttttgaaagtgaaaaattgtaagctgattgtactactcttacagttgaatgagctgggcctattactcatggcaagagagaactcacaccatagggaaccactggtgtctccataagaatgtaagaaagaacccactatacgatttgggatttggtttacatgatttggaagagggtctaagtaaacagggattcactctagattgagtgctgcaagaagtcctatgaggcaattctatgggtatgtatctcaataaatcttatctatacggaggccagactagagcaaatctaaaaccgtaattggtaaagaagcagtagtcactcattttaactgagagatggagatgtttgatattttgcgggtagcatagtgatcctgtatgtactgtacctaggcaaaattatggatcccttgttttgtctcactttattatggtctcaagtagccttgtctaaagttggtattctgtaatattatgtctaatagggagaataacacgggctagctgtgagtgccagacaacctctggatgtcaaaagttgctctttttaccttttttcatcaacaaatctatatacccagtaaatctggtcatgtataaaggcaaatgaaagatttttcagaaaagcaaaggtttaggaattacattacccacataccttctcctnnnnnnnnnnttgtttagagacatacatcagccaaccattccaggatgaagtgttcaaagtgggtagagaaaggcattggaatcattcaaacacagaattaaacctaaatatctgtggcaaatattattctaaacagaaggtaacataaaattccaa

SEQ ID NO: 181880 - DNA, 1060 bp, Homo Sapiens
  misc_feature (587)..(599): n is a, c, g, or t
tgtatatgatcctcagtgactggcttttcctaggtgtctcctccctctcccctgcctcctaacagtgatgttctatccatgcagaaccatctttgtatattctaaaatatagtcccttgcttttatgtgtgctgttccttctaccttttcccctcttgtccagttagtgatgtacttctcacttttataatgctttcttttactccctcttctatgacattaccattgcttctgtttatctctgttaaaacctcattgcattttaattgcagtttatctctttgtctctttccctgagttaaaaactgagtatcttgatgaaaagaactttgttgtatccatccatttattccccatacatagcacattgtctgaagatgctttgtaaatgtttgtggagtgcaggaatagtattatacatatgaaaacacaaaagtctgaaggtgatatacatatcaatgatgatgctgctctaggtatcataatcaattgtgcttctggttagactgggccccatgtttcctggctcgctcagtccaatgctctgccactaaagggaattaattttggttcttaacaaaacatcnnnnnnnnnnnnnctttacagatattgatgatgttaagaagttcaaaccgggttacctggaagctactcttaattggtttagattatataaggtaccagatggaaaaccagaaaaccagtttgcttttaatggagaattcaaaaacaaggcttttgctcttgaagttattaaatccactcatcaatgttggaaagcattgcttatgaagaactgtaatggaggagctataaattgcacaaacgtgcagatatctgatagctctttccgttgcactcaagaggaagcaagatcattagttgaatcggtatcatcttcaccaaataaagaaagtaatgaagaagagcaagtgtggcacttccttggcaagtgattgaaacatctgaaattctgctgtcaagattcccatctctaacgactccaagtgctagagacagggggtctatgagcatttactgacttcctgttaaaacttc

SEQ ID NO: 181881 - DNA, 1515 bp, Homo Sapiens
  misc_feature (147)..(176): n is a, c, g, or t
  misc_feature (742)..(752): n is a, c, g, or t
  misc_feature (866)..(944): n is a, c, g, or t
  misc_feature (997)..(1033): n is a, c, g, or t
gcaagaatgcttatctgttcactagtaaaaatgaagaaagaacatttttaaaaatacttaatttggattataatttgagtcttttcctactgtaactgagtactccatttttctaagagaaagagaatgagttacttaaaaaacaannnnnnnnnnnnnnnnnnnnnnnnnnnnnnctgttctctacttcctgcttagctctttagaaatggaatcataacttttaccttcccttttaccagacactccctgcatggcaagcttatgtatgtgctcacttcaatgcttgagagctgggactctctcccaccaggagaacgccttaagagacaacagtcaatttacaacctcagttaggcccatgagggaactgtccaagtgtcttgaaacaatggccattttacaatctagctctgcccacaatggcgtcagcttgaccatcgggtagataaggcacccaagaagtcacatagaccgtgcacctgcttgctccctcttctgcatgccatttatgccaagtccccctgtaaaagcccttgttttttgtcccagaagggaaacagtaccttaaaggcaggagcctatacttcttcccctaagctagctttggaataaagtcactttcttcgtaccagacctcactcttgtgaattggattctgcaagcagcaagtgattaaacttgtattttcgttacattaccaggtttctattaagaatactaaagaatacaaaaaagcaannnnnnnnnnnaccaaaaaagtttagactcccctttgcctacattgatggagatttttaccagccgtgaaatggccagtaggtgaagtctggagggaagatacaggctggacatggtggctcatnnnnnnnnnnnnnnnnnnnnnnnnnnnnnnnnnnnnnnnnnnnnnnnnnnnnnnnnnnnnnnnnnnnnnnnnnnnnnnnttattattttttaatagagaccacctcgtctttatttaaaaaataataataannnnnnnnnnnnnnnnnnnnnnnnnnnnnnnnnnnnnaattggttttacttatacacttaaaatgtttttttgagaacaatgccttattctgcgtttgaaaatggcatttccttccccagagggcctggataaatcagaaatcaactgcattttctatgattcttcttggcaatagtcagtaggtttccctcgtctctcacagtgtacccacgaatgttcaaagcaaacatctgaggcacaagctggaaagtcagagaattcatgagagaaaattcagtgtctctttcttaagggaacagttactggaggttccagtgatcagtctggcattgtcgctttgagggtgtgtttagccttgttagaccttcatttggtggctgtcttgaccttggaaggacatgattatctatcccaagatgtcccacaccagctggatatttgtctcagacttttgtgctgtctgcactatttttcaagtcttgactgtttaccatgtatttttataatttaaaaaccaa

SEQ ID NO: 181882 - DNA, 1877 bp, Homo Sapiens
ttggggatatgagaaatggaaatgcaaaaataactaatcctttagtaaaaatgtcaacatgttaaagggggaatgttaactaatgtaggttattgctatttgtgatttgtttatgggttcttggctttgacagcttcaaagaatggacagtgataagttaaaagaaattttgtatattgtcaaggaaagggtcttaaatccgagtcaagtcccttccttggggtaaaaaatgtattcttaaagcattctgatgttaaaaagaaaacttaagttatctaaccaaaacagacgcaagattttgtttctgcagactacttggcaatcaaaagtgatcataaatttaggttatcagttttcagaaagttgctttgtgagaaaattttgttagatatattctcccaagcatgctttttgtggaaggttttcagccattgccactgaatcagatgttaaaaatgaagggaaaattgagtgtgcacacacacaactgttgtacactcatgattgcagtttttagcttaagaaacttttctaccagttactgtgaatctgacttaaaatgtaaagtttcctcatgataaaataggaacaacatagaaatggattgatggggtgatctgagttattgtatataaaagtttttaaagaatagaatgaacatcaagctagataggcaaaaattgacacattcagaacagcttttttgactgcgaagccaaaagttgtcagaaacagcaaaagatcccttattattacagagtattttacgtagtctctattttaaggagagaaattaaatagaagggcttcatgcatttaggggagggtgctaaaacttctcaagttcgtcaaacttacaggaatacccaccatgatcattttctctctaattatgtataccacaaaattttcatctggccataggaattcactggtgggtgtaaaattaatgactaaagaaattaagtgacaaatacataaaagaaacagacttgtggggatattgttttaaggtgtattaattactcagtgatgataccactcaatagggcatgccactacttttcttaagatgctaattatgaagcagtgctcacaggcattttttaactagcaaattagtagatggacttttggggtctgtcactttttaaaagtatttaagacttaaattctattagcaccacagtctgccttcagtaatacacctaaaatatttttcaggaccagaagcattcagtttgaaaatttgcagatgcaaaccagtattattactaacgctctgggtcaaagattaggtttttaatattaacagtagtctggtaaatatttagaagtctggcattgagaaacaaaagcttgtacctgactagtatttttatttaaaaaaattagttctgttagcttatttaaattgtgttttatttatccgtagaatttatatttatttcattcctttcatctcactgaaaactgtctgcaggccctttgatttggattagatgtgtgaagtactgtcttttgccaaaaacctcaaattacctgttcttttcaacgtagtgggtttgtgcttgtttggagatcagttcaaaaactatctgtactatctgtactgcctctgatgttaagattttatgtatagcataaggaagctagctctgactatattttcctaagaataaagacctatttttgtagcatgtcttaagatctccaggagtccaagaattattgtgggtgtcctccaattcatcactcttcacttaacagcttttagtagacacttgggaatctttagaggtctgtcgccctttgattatccatacattcaaataaactacccaatggtgaaaaatttctcaagatatcctcattgc

SEQ ID NO: 181883 - DNA, 1126 bp, Homo Sapiens
tgagccaccatgcttagctgatttgccctaatcctctgctgacattctgatatcagacaactaaaattataacattgggcagctattttgtatgatatatagggtagtggttcttaagcttattggtgagtaaccttcacttgggaagcttatttttaaaaatgtagaccttgcattactttcctcctgagattttgaatcagtacctttgagagagggtccagtaaatctttgttttgaatgaactgatggttttgaagcaggtgacctggaggactgcatgtagaacacagtgatgtcaaggagtaaaggagagaacagaagtgagattagcactaatcacctctaatgccttatttccagtaaagtttagagaagaggaaaagctacttggcttgctcctttgaaggttttgtttccctcttaacacagaaattaaaaggtagaggagagatgctgaatgatgctttttttcttcttaatcttggggggtcattatgattaagttattgaatccatatcaccgtatgacagcacatgatgaaagaaaatcagatgtttgtttcaatcaaagtgaaacaaaatgagaataactatttgggcaaaacacttttatcactgctaagatactactagaactgagcagagaaatactcagagagagccatggcatagtactaattaataatggggtaccatttagcaactggaatattctctgatgatgcctgtttaattactcataggtgctaagtgaatgttaaaaattacggtgctggttgaataggccgagtagaatttgtgttagggcacatcccatggagatcttttttactgcttaattttttggagttacctcagtaacttaacaggcaggaatatggttttaatggaaaggaaaccatttgcctttaacagcattagtcccgctaagagaaagtttttgcttgtctagtttattacagggtctttgactttgtcagtatatggcaaatttagtataaaagatgattaattatcaacgctgatgaaatataggcagctgaaaagaaaattcttagcattcataccttagaagaaccctgaagacaggacgccatagaaatcctgttttttaaaagtaatt

SEQ ID NO: 181884 - DNA, 1398 bp, Homo Sapiens
  misc_feature (577)..(695): n is a, c, g, or t
  misc_feature (768)..(961): n is a, c, g, or t
ttttcagatattttacaattttatacttgctgtatatactaaattttattgagaatattttattctatatgttgtgcataaatgtaataccctctgttataaaggtggcacacaaatatatgcgcaagacagaatattctataatatacaacttaggtaatgcattgactaatttgaggataatattgttttagagtatactaaatgtctctttagcatttctgggtgaaatctgatcaaatttcagaatgttcagtaaataaataatggttatatagaaattattttgcagtggtggactgtgattgagattcttcaaaatactttaaaggagaaaattatgatatctaaatgaaacaatgggagaaaaatctcagttaaataccatttcctaaactaatcacttttttattcttttgtacaaaatcaatcttttctaaaccaatcacaacgagcattaagaatggttttcagagtattcaggacccatcatctaatggtataaattggtcctaatttcatccccttaaacctcaagctttttggagtaaagtcaaaattcaacaaaactgaggannnnnnnnnnnnnnnnnnnnnnnnnnnnnnnnnnnnnnnnnnnnnnnnnnnnnnnnnnnnnnnnnnnnnnnnnnnnnnnnnnnnnnnnnnnnnnnnnnnnnnnnnnnnnnnnnnnnnnntttcttttataggtcttgctttattgctcaggctgaagagaattggctcaatctcagctaacggcaacatcannnnnnnnnnnnnnnnnnnnnnnnnnnnnnnnnnnnnnnnnnnnnnnnnnnnnnnnnnnnnnnnnnnnnnnnnnnnnnnnnnnnnnnnnnnnnnnnnnnnnnnnnnnnnnnnnnnnnnnnnnnnnnnnnnnnnnnnnnnnnnnnnnnnnnnnnnnnnnnnnnnnnnnnnnnnnnnnnnnnnnnnnnnnnnnnnntctctgaggttcattcttctatgcaaaagaaaagggtagtatgtagtgccctgtgagttatgcatgaacccaacaattttacctacagatctgagagctctctttgtacctcaggttctatttttgtcttatacaaaataaagcttattctactctagacagaagtttatcattgagttacaacctgagtcaaattttgctttggtctgtgtttctccagggcataagatgaagaagtttgaatgatacctttcctaatttccttccttcaggaaaatggtctcagagatcacacaagccttccagaaagagcccatctgtctcttctgtctgaactaactcgtagatcccatcaccacaggctgtgtccccagcttctgtagaccctgtctctgcctttcctgggaagaagccaaaattcgtacctgctgccccaa

SEQ ID NO: 181885 - DNA, 937 bp, Homo Sapiens
catgaggcatgttttcaccagtgagaaggagatgtggaggtgacaaaagtgactaacaggattgagctccatggtggggttctgcgatttgttctattcactatggtcatggagcaataaagaactggtcctgaataagcattttaaatgcagcacaccagaccatcgcacagggccaaaagtccagaattgtatctatgttttttagtctgcagttgccaatcacatacttttggaacaactttaggcctctgatgttactttagccctgggtggtaggtacagaaaagcctccagaaaccctacaattcagtgacattcttacttctctccagtgttcggcaccattttggaaatctggtcccaaagtttcaaaagaatactaatgcaacaaaaagaaataacctctctgtataaagtgattatagagatgtgtgttgaggtaaacagcttcataaaaaccgttgagcagggaagcacagccactgctatagaaatttttaggtaagtctggtgctagcattattctacaaaactgtttacacccattataaataggggacagttcttattgctcctggagcttgtagctccaatctgttccagctccactgaaaaatgatttttctcaacaattggtagcaaagatttccaaatttacaaaaagtcattaccaatgcatcactttttgattaatttctgattgccatatagatatggactacagtatgcatgtccttgacaccaagtacagaaaaaaaagcttagaaaagtcgttttatcaaagttcagttcaatgagaaacatgaaaaagtgcaaaatatgtacaattcctggcagttctcacacgggatttttttgactacagaccataaaagtttacatttgtgtaatgaaatgacaatggatttcacatcactgttaatatacaagccaa

SEQ ID NO: 181886 - DNA, 1459 bp, Homo Sapiens
  misc_feature (284)..(347): n is a, c, g, or t
  misc_feature (610)..(665): n is a, c, g, or t
ttggagcattctatggtttaaaaggcaggtattccaaagcaatcttgaattgtaacaaggctattaaaatttaccctgaaagcgtacgtgcctatctctacagaggagttctgaaatactacaacaaggtagggccatttcctgcctggtttaccgaaattttagggtgggcagattctcttatgctaggcaggggactcacttactttttttctatgtggttgggaatcactatgatatgaagggcagaactacatagaaaactttacactttcccaattcannnnnnnnnnnnnnnnnnnnnnnnnnnnnnnnnnnnnnnnnnnnnnnnnnnnnnnnnnnnnnnntatttttattaagaatgtagcatatattcattgtagacagtttggaaaaatatggaagggaataaaggattattatctcaccatcaatgataattcctgggtgcatttagcatatttgtattcagtcttttattttcctcataatatatgatatatattttccaaaatttggactatggtatttatataacttgtgtggtgccctgctttttacacttaatctttgaagataatattttgctgactgcataatattccatgannnnnnnnnnnnnnnnnnnnnnnnnnnnnnnnnnnnnnnnnnnnnnnnnnnnnnnnctattatactatttaatatagttatatacaactgagaacaaaattgctgcttgggtttatgattggttcttaaacagaagttactgggttaaaaggtgtgactggcaccattgatatgtgatactgcactgaatactttatttctctctacttttcttttctgatctttctttgtagctattttatatgaaatattttgcaaataataccttaaagcaaaggtaagaccttgcattatgtgttaattctatgaaaattactatctatagaaatgggtgatataaggtatcagagaagaatcaaagaggaagcaaaagagaacgtgggtagaaaacatgacgattatgtgatatggtagtcagagtgacagaagcaagcaagcactggtgaatgtttgctgcattaatatgggtggctttattttattttacctagaagtatgattttctccttgccatataccaacattggtaataagatatttgcctaaattaaagttgttgatatatttaattttgtttgcaggtaagagaaactataatgataatttctaccaggagattttcttaattaactctgtgaaagattagcttcaatgtcttaatttcacagatgatacaaagaatggttaaatgagtgtttcaaaaactctgatagaaacaagaatttattttatgattaaatttcagtccattatgattttcctttctcacataattacttttttctttttagacttataagctagcaattacagatttaactacagctatcagcatggacaaaaatagtta

SEQ ID NO: 181887 - DNA, 973 bp, Homo Sapiens
ttggcagactacgtttgtggtgactgggtcctgcttcagccctgttgaatatgcccagcctgtggcatgctggtggtcatcctggcagctggtgggtggcctggtatgctgcccactcagcttgagactcaccctcatgcattcagccagtaggtctggccaagcctgaactgaaggaccatggtcctatcccagcttcatcagagcaatccattgtgacctgagaatccatttaacctctcggtctagaacctccttctggaaagtgaggtattaatacttgactcatgttatcgccaccccacattctaagtcatggttgagtagtaatttggacagtaccttgtaaattgtgtgagattaccttaatataaggtataacttaaaatattcatgaatcccaggaggttaaaggttataacttttaggtatggtatcgtaatgtactgtcccccagcaaacatttaaaaagccaattttaaaaaatgtatttctgactaagttacattaaggtctctgcctctgtatcttatgtttcttccaggtgcaccctgaagaccacaaattaaataaatatcatgactggctttgggaaaatcatgaaaaattaagtctatcttaaactctgcagctttcaagctcatctgttatgcatagctttgcacttcaaaaaagcttaattaagtacaaccaaccacctttccagccatagagattttaattagcccaactagaagcctagtgtgtgtgctttcttaatgtgtgtgccaatggtggatctttgctactgaatgtgtttgaacatgttttgagatttttttaaaataaattattatttgacaacaatccaaaaaaatacggcttttccaatgatgaaatataatcagaagatgaaaaatagttctaaactatcaataatacaaagcaaatttctatcagccttgctaaagctaggggcccactaaatattttt

SEQ ID NO: 181888 - DNA, 966 bp, Homo Sapiens
ttggcccttacctacttcatttccagctttcacaaagagcaagagacacttagaactattcaactagccctagatcttctctggaatcttttgacacacatacacttttgaggtcttctctacccttgataatagggataagaaagaagtttcaaaacaaataaattctctactctgccctaagtagaaagctagagaaaatttaagttgtaattgatggaagaatttatgagaaacaaccacaggcacacaaaattttatcaaaatcaaaataaactattttgagttgaaaattcagttgaaaaatcataataatcctaactatactataatgaagtctgactattaagagtacaaagctatagccaaggtaccacatttgtttacagtttaattctaagaatacagtttaaaaaaaagatctaagagaaaatgttcttgagggagacacatgtcaaattaagtctatagcggtaaactaagtagtttattctgcctttcttcttatcctcgttttctttttctgtgggtgtctgaaagcattttgagtatatttactgtaaactgacacttgtagtctccttacatagcgatattggaagcaacaaaaactagatgggaatggctaaggagaaattttggtgaataaaagcagataatacagaaattataattatataaaatgtttgtggtcacatgaaaattttcataaccagttatgaaagtaatgttcagttgtcaataattgagaaataggcataagaagaaaataaagatcaactgtaattacatcatgcagtaaaaatcacttgaaattttaatgttttttatttatttttctgtgtaagtaaatgtaagttttttgacacaattttgatgtcattcttctatatcctgattttccttttacctgacattagatcatcagtatattctcatgtcactaaatattcttcgaacatttta

SEQ ID NO: 181889 - DNA, 1477 bp, Homo Sapiens
  misc_feature (129)..(146): n is a, c, g, or t
  misc_feature (847)..(904): n is a, c, g, or t
  misc_feature (938)..(953): n is a, c, g, or t
ttgggtaatgtcatttattaagttgaggaaattgtcttctatttgcaattagcagtttttaaatcatggatgagtgctgaaattttataagattttgtttgattgtatctattgacattatcatgtagnnnnnnnnnnnnnnnnnncagtttgttaatacagcaaattaaattgattgctttttgaatgtcaagccaatcttgaattcctaatataaaccccctttggtcatgatatatattagcttttatatattgctggacctgatttgctaataatttgttaaggattttgtgtatatattcacaaaaaatattagtttgtggtgccttttatgcgatgtttgtgtctggttttggtatcagggcaatgctggcctcatataaattaggatatggttctgcatcttctcttttctagaaaaatttgtgcaaaattagtatttcttcttaattgtttgtttgaattaattagtaagtcctaaaattttctttatgagtagaattttaactataaagtaaattaattttatttttgttttcctttgagactatagaggttatgtcttgttatctattttttgagtgccttgtctataaataccaaatcatttatctgttttatcaaaagtgttgaattcattagcataaagctgttcataatactctttattattattttaatatctataggctctgcactgatgcctcatttctgctattggtaatttatatcttttttcttttggttcatgactaacctctaactaggttagtcataaacctgtaactagagctttattaattttattgtcctttacaaataactagatatttaacttgctggnnnnnnnnnnnnnnnnnnnnnnnnnnnnnnnnnnnnnnnnnnnnnnnnnnnnnnnnnnactattttctacttctaattattcagtgtttaannnnnnnnnnnnnnnncaaatttcttaaggtaggaggttaggctattgattttagacatttattgttttctaatataagcgttaatgctaaaaaatttcctctatgcaccgctttagtttcatgtcacaaactttgacatgttccaatgttcattctgtttaatgtatttaaatattcccattttgatttctttgatcccatcactaccctctggtgttttacctaatttccaaatatttgaggattttcttgatattttctagttttggtttctgattccactgcagttaaagaacatactctatattatttcagtcctattatttggaaataatgtgtctcttgttgaatttttctctttactattatgtatttttggcaatagttattgctctaaaagttatattttctgatattaatataaccaaataaagctttcttttcagtgttagcacagtatatcgtttttcatacatttacttttaagctgtatgttttgtttgttcaaagtgagtttcttctagacaacattagttgga

SEQ ID NO: 181890 - DNA, 1248 bp, Homo Sapiens
  misc_feature (444)..(493): n is a, c, g, or t
ttggattcaaaacacgacttcatgtaaatatggtttttgcctgcattacattactaggagttctgaacacatctggagcgaaggcggcctcagggacattaaagtgtgctgttttggttggcacagtgacataatagtatatgccaatttgtaatggcttttggaaacaggcagttttaaactctccctgaacgattcccctgagaaattattcaattaagtacaactaaaattaatgtttagcattttttgtttaaataaaataggcggcgtcagaggtgctgggtgacagagccatgagccagccattttataagcactctgatttctaaaagttaaaaaaaatatatgaaatctctgtagcctttagttatcagtacagatttattaaatttcggcccttaacccagccttttccagtgtgtaacccagtttgaaatcttnnnnnnnnnnnnnnnnnnnnnnnnnnnnnnnnnnnnnnnnnnnnnnnnnncagtttgaacacaaaggctctatggaagaaatgcctctatgtaggtgaagtgttctctctgcatgcaacagtaaaaattaatataatattttccccacaaaagaaacacttaacagaggcaagtgcaatttataaatttatatctaaaggggaatcatgattataagtccttcagcccttggactctaaattgaggggattaaaaagaatttaaaataattttgaacgaatttattttcccctcagtttttgagggcattaaaaaggcattaaatcaagacaaatcatgtgcttgagaaaaataaaattaatgaaaacacagcacttatgttggtttagctgcagcctccttggaggtagaatttatttatttaaaattactggttgcatcaagaacccatagggtgtacaaaaggttctataaaatctgcattatagagacaaagaggcaggcaaatccatgtcacaagggtaaagcttacagtttacaaactgggaacgccagggtgtaggatataaaaacgcactcttgagaaaacaaatgtaatcagggtgctgaaaacttgcatggtgctttcagacattagccttgttcaacaaatttcttgtattgacagatccatagtgtgcatgggcagacacattttgcctctatgtctcttaaaattttaattaaaaatactctttccagtaatcctaatttgcacgaagatataatgtccacattacgtgccttgccttgaaatctaaaaacc

SEQ ID NO: 181891 - DNA, 1361 bp, Homo Sapiens
  misc_feature (313)..(327): n is a, c, g, or t
ttggctaagactatttaaatgtcttatgagaaaatttcataaagccattctcttgtcattcaggtccagaaacaaattttaaactgagtgagagtctatagaatccatactgcagatgggtcatgaaatgtgaccaaatgtgtttcaaaaattgatggtgtattacctgctattgtaattgcttagtgcttggctaatttccaaattattgcataatatgttctaccttaagaaaacaggtttatgtaacaaagtaatggtgttgaatggatgatgtcagttcatgggcctttagcatagttttaagcatccnnnnnnnnnnnnnnngaaagtgtgttagcatcttgttactcaaaggataagacagacaataatacttcactgaatattaataatctttactagtttacctcctctgctctttgccacccgataactggatatcttttccttcaaaggaccctaaactgattgaaatttaagatatgtatcaaaaacattatttcatttaatgcacatctgttttgctgtttttgagcagtgtgcagtttagggttcatgataaatcattgaaccacatgtgtaacaactgaatgccagatcttaaactcattagaaaaataacaaattaggttttgacacgcattcttaattggaataatggatcaaaaatagtggttcatgaccttaccaaacacccttgctactaataaaatcaaataacacttagaagggtatgtatttttagttagggtttcttgatcttggaggatgtttgaaagttaaaaattgaatttggtaaccaaaggactgatttatgggtctttcctatcttaaccaacgttttcttagttacctagatggccaagtacagtgcctggtatgtagtaagactcagtaaaaaagtggatttttaaaaataactcccaaagtgaatagtcaaaaatcctgttagcaaactgttatatattgctaagtttgttcttttaacagctggaatttattaagatgcattattttgattttattcactgcctaaaacactttgggtggtattgatggagttggtggattttcctccaagtgattaaatgaaatttgacgtatcttttcatccaaagttttgtacatcatgttttctaacggaaaaaaatgttaatatggcttttttgtattactaaaaatagctttgagattaaggaaaaataaataactcttgtacagttcagtattgtctattaaatctgtattggcagtatgtataatggcatttgctgtggttacaaaatacttcctctgggtataataatcatttgatccaattcctattgcttgtaaaataaagttttaccagttgatat

SEQ ID NO: 181892 - DNA, 1036 bp, Homo Sapiens
  misc_feature (676)..(694): n is a, c, g, or t
ttggggtgttctaattttctgtgagcacactaaaagcgaaaaataaatgtgaataaaatgtacaaatttgttgtgtttttttatgttctaataatactgagacttctaggtcttaggttaatttttaggaagatcttgcatgccatcaggagtaaattttattgtggttcttaatctgaagttttcaagctctgaaattcataatccgcagtgtcagattacgtagaggaagatcttacaacattccatgtcaaatctgttaccatttattggcatttagttttcatttaagaattgaacataattatttttattgtagctatatagcatgtcagattaaatcatttacaacaaaaggggtgtgaacctaagactatttaaatgtcttatgagaaaatttcataaagccattctcttgtcattcaggtccagaaacaaattttaaactgagtgagagtctatagaatccatactgcagatgggtcatgaaatgtgaccaaatgtgtttcaaaaattgatggtgtattacctgctattgtaattgcttagtgcttggctaatttccaaattattgcataatatgttctaccttaagaaaacaggtttatgtaacaaagtaatggtgttgaatggatgatgtcagttcatgggcctttagcatagttttaagcatccnnnnnnnnnnnnnnnnnnngaaagtgtgttagcatcttgttactcaaaggataagacagacaataatacttcactgaatattaataatctttactagtttacctcctctgctctttgccacccgataactggatatcttttccttcaaaggaccctaaactgattgaaatttaagatatgtatcaaaaacattatttctttaatgcacatctgttttgctgttttgaacagtgtgcatttagggttcatgataaatcattgaaccacatgtgtaacactgaatgccgatctttaaactcataagaaaaataacaaattaagtttttgacacgcattcttaattggaataatggatcaaaaa

SEQ ID NO: 181893 - DNA, 1266 bp, Homo Sapiens
ttgggtctaatacacatatatttcttccctccaaaacagtttattttgattgtttattttattttgattgtaactccgtcataacttgacatggaaaatgctatatactatgaaaacttagctgaaagggaagaattgttttagaaagacaatatttaaaacaccgcactgccaatatattgatcctttatagttatttcctaaaatgctgttttcgaaacattcctttttcaccctgttgtgtggcttagacccatctcgtaatctgttaattggaaagaggctacagacaccagcagtgtgcgttctgcaggtacacgctgccaaagtaattcctgctcatccatgccctgtctctgtctcttttagagtcataccttatttgagtataggttgcttaattttgctagacttcctgaaaacactaaggtggagtatcagaagtgattttagtcacagttctgcgggagagcttagaataacatcctcctttgggaggtggtctcgggtgcgtggatgttggtatacagtctttattgtaagtctgatacaaaatgctaataaatttaatgtttttcttccttaatttattggcatagttcttcaggtagcacctcatttttattaatgatattgggattaactatgaacaagctatatgtagacatttgcatttaaggacattgcggtgtttcaaagatcccatcattgcagcttgtatcctttagatccaatcggaaacttctggagtcttacattaatgctcatttgagctaattagtaatctgtttaaacagatttggcaatactttaaagatactgtagactatttatgtatagatagatcatattacccattaaagtctgggggaaaaaattttttaattttactcttcttatgtactgaaaactttttttaaaaaaggtgatgatgaagtgcattctgtagcagcagcgcagctatgctttaaaccacacaaaaggctgtgtccaggtgcagcctccttcacccttcctgcccacggtgaggattgaataaccaggacttggggatattgtttgttgtcagggttattctgtgtggtaggaatatttgtttcacatttatacattttctttttccactcacgtaaagtttctatcttgagagcatagtccaaagtgcaaaacttgggtgtttacaaggaaaattgtctcccagaactccactgtcatcactttcaccaaagtggaagtttgcatgaatatgctcagaatctaatattc

SEQ ID NO: 181894 - DNA, 1011 bp, Homo Sapiens
gaagtcactgttgctcaaatgttccagcccacagcagcagctttgccatatgccaagtgaccacagaggactttgtctcaggacagggtggggctcaaagtgtttttattttgcaccagcagaaaagtgcaatgctgagaagtgggaacatcttgctgattatgctgagaaaggcagaaacacgtgtttgtggagaggcggctgggccactcaccttgcaagaaacaaaatgtgctgtgaagcaggaaagtacatagcatcctgtactttcataccgctcaatgcatctctgcaagcttatcccaagtgctgcctcatctgatctcaccacaggaatcacagcaacatttcagataaggaaaaggaggtcaagggcttgggtcaaagtcaccacagcagttagtgggggtcaaagattgcaatgagcatttctcttcttcctgccccagatgattggacttaacaaggccaaggaaagcttaagtgggtcatcatccctggctttccttaaacatcagcagggtgggaatggctaacaggaggagaaacacagagtgtgaacttgtatcaccccccacctgcctacccagagactgtctatgtgagtgagatgaacacaaaccccagtacagtgaaacacttttatgaaggctgcctgagaggtaatctactgacttggagagtatgttcaagggatcatataggaaagtcatgggctcttccccacgcaaccatctccagagacctaaataaaaagcaaatttaatacgaataagtggacagatgagctgcccagtaggcaggcactgagagactgatcagtgggatactcaagcagagtgagacagagcggaaccttccaagtggtattagtgttgacctggattacatcccataatgagttctggatccagaattacctgagggaaggggtctgttagcagtgccataaagggtcagtggctctgatctcccaggcgtcagggtcccttgcagagatgactgagccaa

SEQ ID NO: 181895 - DNA, 1597 bp, Homo Sapiens
actttgtacaaaaaagttggctcctggcctccttggatttatcgcaaaaactgaaggtttgcgcaagagacgaggacagcggaaagtggacctgccaggccgggagtgtgtccctcaccaactatgcacacagcactcgctcttagctcctctgtccgggctactaggagtgagaccagcttctggcaactgccccagctccaggccatcccatagcccctcctcttctggctgcccccaatgccccgaggcctggggagcccccagctcacccatctgtagctccctcaaagtcagggcccaccccatctgaggcagagaagactcgagtccagcccccaggaagcctgctcccctctctggcccatggtcctgcttcatgctttgggtcaggaggccaaagctgatgttcaggccccacccactccctacagtcctcagaccaaggaggggtttgggtagtaggcccgagctgcattgccggccttcctcgggccaactggcagcccaggagtggggaggctttggccagggatgctgccacttgtgcgtgagtccgcggctggcccttggaggtgaccatccaggcaggcctggctcagactggaagggctggggaccgagggctcccctgcctctgttctcctttctgacccactgggatttgctagcaggctgccccagccccatcaccgaaacacatactcaagagctcaaataccactgctcccaccagcgtacggattaagttcatcaggcttccatcggctggagcatgggaccatagcccctgcccaggagccgtaccctcggaccacagtggctctgtatggccaggaactgggactcgagctttcagattctcaactagccttggcaaaacagctgtaggtggcctccctgacaacagacactcagccctccccaccctggctctccttgcatttccccatgctccccaccccctggcaaaaggctggccatgctctgttcccagcagccgcgcaggtttccccactggctgcaatggccctaccaaaagccatgttgcatatccgttgtaagcacgtgccctgtgccctgtccccattccttatgccctaggaggccaagctggtgtctctaggagggcccacacaggcaccctggatcccccagagagtagattggtgtgctcaggccgcaggctgactcagaggtagggcagtgggctctgcaggccacctggctggggttggtgggggtcctctctcctgccccagcttccactcagccaccacagttgccacaccatggggtggagacgtgggtcaccacgggcttgggagcaagcgccttctgcagcacaggaagccgaagctggggtcaggtgaggtcgctacccctggaggtctggcataagggccccaccctcaggtctcctacactggccccattttactttggggtccaaggacaggatggtcaacagggcagggtggacagcgtgccagcgccgcgcaggccacctccctgggtggatgcatcacactaagaagtgagtgccaagggatttagtggtgtggttctttcaaaggaagtcaggtcaatgggaatc

SEQ ID NO: 181896 - DNA, 1004 bp, Homo Sapiens
  misc_feature (44)..(66): n is a, c, g, or t
ttggccccaattgtcaagtgtttagatatgtagactattgccannnnnnnnnnnnnnnnnnnnnnnctttgtgtctgaagctgaattgatttcttttttttgaatgtgaaagttgaatttcaaacgtagtcatttcttacagatggccaagacagaaaattgtggctaggttgactgagaactgttgtcttccatgtattaacacaattaagctttttatattccactctctgtgctgaccctggctgaggcattttgggagacaaggactctgaatcttctgcttccattaaagaagaactgtgatattcaacattggatttctgagaataaagataggatgattcctttgaactttgacttacttgtataaaatgtccagctaggttaggtttttgccatttcctatatactttgggtaaagctacatttgatgagcaatgtgaatgtttctgagaatgttcattcctgttttctcttaagagaatgtgctgtgtactaaatacaggccacatagtgtctgcctgttgaagatctggaaactgcctccccagatctgtattgtatttggtaggtaagggggtcagtttctttttctcattgtgtgttgataatctacacaccatctgttggaaccagggtgttattatggggaactcctcctgtgtactaggaggaggaccttagggagaccaagaggagagaagcatttcctttgatgaagtcacatcctgtctatgagcccactaatgctgtaacattggcctgaaagagagtgttctttaaaagcctttctcggctgttagtataaaaacatgatggtatcagctcttagcatgtttgcttgacccttatggaaggtataaatccacagaacttccttcccagagaactgggaaattgtcctagaaataaaccttgtacagttgagtggacatggataagcaacttttttttactttgcaggatttgttccttggtaattgcctggtgtgtcatcctgt

SEQ ID NO: 181897 - DNA, 2000 bp, Homo Sapiens
  misc_feature (1453)..(1510): n is a, c, g, or t
ttgggttaagtaatataaactgtgttcattacactgctgatacaactacagatgggacagtaaatgttcagcattcttggatcagaagaaaacggactaattagatgcttcctttgtcgtggtggttgctttgaaaactatactttaatgggagaaatcatggaaagaaattctcaacagaataactgaaaactgccttttctgtaccgattgctttttgtgtgtgtggtataataaaatctttattcaattttacagaagcattgatggcagtcgaaatgtctctagctcatataacttaatagtaataactaaaaaacttttagaatttacttttgaaaggagggaagccagttctgaaatgagtataggttgatttcatagtcttcttaattaagagtttagctctttgtaaactcaaaatacataaactttttaagtgtagtttcatttactgaaggataaaaatggtaacagtgcagcaatattcacaaaaaaatattgtctaacggacatattttgttaatctgttaggttgggtttttgtttccagggacaaattaaatttgtatgattacccaaaaaagggtctcagtttacagatgctaactctatataaaggaatgtggaaaaactcagttcttaagttacaagattaaaaattcacatttggtctttaagaaacaattgactgacatctatgaatttattttgtatcatgctagtaaacacgaagtattaatgtatgggtattttcccagctagttttgctttctttttctggagcaaaacattaagtgattgcagagtttttcaagcaagagaaaaaggtttgcaaaaaaacccaggaaatgttcccttttttccccaccattcatcttcattagatcaaattctgtgaaacttgtctggtctctcaaagggagcagcctctgtagtgttaaatggctaattaaaataggaagatctttatagccagaaacaacttagtcatcaaatagcaagtgaaaccaaaacgtcagagggattactgtacttggaagtatgttgtgtgtcccaaatgtgaacgaagtattgttagaatttattagatcagcttctttggagatcaaagattggaaatcctagtcatagatattcactggactggctttggactgaaatgctcctttgtaattcttttcctattgtcttttccttctagtgtcccaaaatattttctttaaagtcagcacagtactgtatatgaatctttaatgtggtatcatatatgtctacttttgtctgattcatcgatgtattatatctttataattgaatattttagctccgggtcctgttgccccttcaagcagtacatgccaaattataaataggtgctactggccttgagcatatcactgtgggacagttccccaattgtcaagtgtttagatatgtagactattgccannnnnnnnnnnnnnnnnnnnnnnnnnnnnnnnnnnnnnnnnnnnnnnnnnnnnnnnnngaatgtgaaagttgaatttcaaacgtagtcatttcttacagatggccaagacagaaaattgtggctaggttgactgagaactgttgtcttccatgtattaacacaattaagctttttatattccactctctgtgctgaccctggctgaggcattttgggagacaaggactctgaatcttctgcttccattaaagaagaactgtgatattcaacattggatttctgagaataaagataggatgattcctttgaactttgacttacttgtataaaatgtccagctaggttaggtttttgccatttcctatatactttgggtaaagctacatttgatgagcaatgtgaatgtttctgagaatgttcattcctgttttctcttaagagaatgtgctgtgtactaaatacaggccacatagtgtctgcctgttgaagatctggaaactgcctccccagatctgtattgtatttggtagtaaagggggtcagtttc

SEQ ID NO: 181898 - DNA, 1056 bp, Homo Sapiens
  misc_feature (215)..(567): n is a, c, g, or t
  misc_feature (570)..(584): n is a, c, g, or t
ttgggtgccagattctagaaagagttaccttttggtaagagcactgcttgttaactatggttggttgctttagatgtctagtgtgtacacaaaagcatgaattttattccttataaccaaagtagaaacctactctgagcaatttgacaaaaggtttacattatttattttagtgtagtttaagattacagtaagatgcaattcccaaagagtgnnnnnnnnnnnnnnnnnnnnnnnnnnnnnnnnnnnnnnnnnnnnnnnnnnnnnnnnnnnnnnnnnnnnnnnnnnnnnnnnnnnnnnnnnnnnnnnnnnnnnnnnnnnnnnnnnnnnnnnnnnnnnnnnnnnnnnnnnnnnnnnnnnnnnnnnnnnnnnnnnnnnnnnnnnnnnnnnnnnnnnnnnnnnnnnnnnnnnnnnnnnnnnnnnnnnnnnnnnnnnnnnnnnnnnnnnnnnnnnnnnnnnnnnnnnnnnnnnnnnnnnnnnnnnnnnnnnnnnnnnnnnnnnnnnnnnnnnnnnnnnnnnnnnnnnnnnnnnnnnnnnnnnnnnnnnnnnnnnnnnnnnnnnnnnnnnagnnnnnnnnnnnnnnntcaggttaattctgggatctgagcaaagttttgctcctttccgagaggtgaacacgttacgcaattattaataatatccctgtgggaaggggctttacaacaaattattttacaggtgaagggcagaaatgaaaacattttctagagccactcctgcccttcacactcaggaatgtcgcagtagtcatatctctgttctggatcagtagtatagcaccagggcccctgcgcatcgttgtctggattcctccagtccctctgaggggtgtgtagcaggtgagaatctggggaggatggaagagaagcacttagactatattctaaaaatcagcttgctattagcaaggcagaaagagatgctctcgattcccatctgagattgtcatccaaatgcatttcagctgggtgctgcagcatttgtgtggtcagattttcaatttctctattgataggctgcttctggcacagtagc

SEQ ID NO: 181899 - DNA, 1285 bp, Homo Sapiens
tgtacaaaaagttgggttgcttttgttaaatatattggtaagcttcctgatttttttcacctgaattctcaatttgttattgaatagttcagttttatttagggtttcaattttatttaggaaacaatatctctaccttacaaagaatctgcaagtagcactgactataatacctttatacccaaaggaagagctgggatagagctccctaagacttttctgcctgcaaaagatatgggtggggttgccatttgaatacagttaccaatgaaaaactatcagcttatctaggctttaacaataaagttcatgggggtaaagagaaaagatttaactttgaagtccccatatatcaaaaagaatattttacaggtaacttgacaaagatgtttcagtggtctcggaatgcaagacagaatcctgacggtagaaatttctaggcaagggtctaaattaggcaaactggtaagattgtgaatgtcccagcctttatttctgaatcttgacctctgaactctgctgcctctctctaaacatgtttctgcctacaggtacttcaggactgattttggtgtaagaagacagcaggtgtacacttgatgatgctacttccttacctctcattcattcctcaacccattgtaaaataatgtcaattaatataggttcctttgctgaacacctgtgaaccaaagcatagttttaaatgcttgttgtaaactatctgagttaatcttcataataacagtcacaggtggctgcaccatgttttatagtaagaaaatagagttagaaagagtaaatatctagactaatacaacagtactaaatggcagaactggaattcaagccatcttcattgactctgttctccaagaccttagcccctggtttattgcctcctgatgcccatttcccaggtgtctgaagagcatttttcaaagtcacagttaaccttaattttactaaacttaggtttagtaacactttccagtcattacctagctgtatctgtcagcagtattagacatcttaaaaccttggcaggtgactttgttccaggctttgttaataccaaatacccttgatttttctcttacttctttgatttttcatactcagacttttctacagtctccttttcaatgtggtcttcttttacttatcttctaaagttgatgttcatggagaaatctgttccaaacctagatgttctcatgccatggtacacatgcccctcagctgatccactacttctgtgtttcaatgctaatgatttcacctg

SEQ ID NO: 181900 - DNA, 1402 bp, Homo Sapiens
atcagcagtgttgaagcctgtgaggtggggtccctgtggctgactctgccctctcctggggccattggcagtgcaggggtccttgtgtgtggaggaaataaggagatgatcaaagtatgattccacgaatcacacggtttattgtcaaagaagatttgttctcgggttcacagtgctcagaggggaggagaggggaggaggtgaagacacctggcagggaagcagggcctccatggatggggtgcattcacggcagggaggtgagtggcagaacggccagggtccggttgctctgctgggatggagcgggcccctggagagtgagatctggtgagagttcgaggtttgccttggtagcagtggagagcgtgagagcgggagctctctgagaagctgggaccgaggtccagctcccaggccagcagcgtatagcttgcctcaaagcatctgcacaaccttcaagctgatgtctgtttttgcagtccagcagtcagggtcagtaactcacataagggagtgtctgacaaggtttaagtggcattcccaaggttgcggagttcactcaagtcctcacatatgtggtctgataagacatcacactcttgcaggggggtcaggtcaccccaaaacatcagactatgtaagtgctgtgaatcacttcaaagctacacagcaggtcccagggcccaaggcagaggagtgagtccacctcggaaggctcagagcagctccaggcagtaaccacggcatttccagagtctggtgtgtgagcctaacagctctggtgtgaccgtccgtactcacctagcagcacgtgacatcagctctccccctgaagtcattgctcagctcgggtgctgcaggaagacatacaggtctgtcttgggccagccccttgcctgctgtgggctgctccctgtgtgtggccttcaccccggtgtagagagatgggctggtcacacccctgcccctcacagcggcgagaggacagaggcatgtgccgggctgtctgtggagctcccaggccagtgtctgggatgcggcaggtgcttggtgttaaagggaaaatattccaggatatctgtgaaagcacgttaggcagagaccaggctttcattcagaacctttgagagatgtgggaaccaccacactgcggtcttgcagtgggagagaggctgggctcagctctgaacaggccatgggctggtggcggcttacagctccagagctgggcaggggcagaggatggaaggttgctaagaggaacccccacgggcgaaggggatgcaattcaactgacctgccagatcaagccgcccgggggacagtggaagatgaggcgcctaatcagctgtcaagggtgatgggacacgggaggaggtcgtcgctaaacagactttga

SEQ ID NO: 181901 - DNA, 801 bp, Homo Sapiens
ccagtttcaaatagggttgctgtgaacatccttgtacatgtctcttggaatatatgtttgagagtttccctggggttgtatttctgacaatataatttctagatcattagggtaggcacaacttcacctttactagataataccaaattgttatgcaaaatgtttgtaccaatttgcagttccataaatgtgtaagttgttccacaggatccttggctacacctgagagtgttctgtttggagttttggagagattagcatagatcctgctttgctttatgagtgacagatgagaaaaccaagacttagagaaaggaggagacattcaaatttagtagagtttgggagtcctgtgttttaagagcttttccttggccattagcccactgtctcacattcataacaaggccaatccttaatctctcttccaccttgcaaggcattatagcaaagtatctaagcccatggacttggcaatcagactgcctgggttcagatcctctccttgctacttactaattatgtaattttgggcaagttattctctgtgacttcgttcagtcagatgagaatgatgatattcctttgacatagggttattatgaatattggtatataaggtgcctagaagactccctggccgttaattagttgtcttccttgtctttcttcacaaaggtacatgctttcaggaatcctcaactttgaagactggccacatcaggccagctgtgggccttcgctttgaggtggggcctggagcagctgttcattcccccctggcctcacaaaatggcccaa

SEQ ID NO: 181902 - DNA, 1266 bp, Homo Sapiens
ttgggttcttgtctgtcttagctccctgtctttcctgtatatgccatctgtctccatgaagcacagaaatgcctctgtaagatgtttatgattttaatatttactccctccaaacccgactccataccattttttgctatttggagcagcctctctgctttgtgtataaattaatgatgctctgtagactacctaagttaatcggcactgtgaatctttttgataagcagggtttaagcagcaatttcaccattgcacttggttgcctgctgcagtgtcagtttctactacctagcaaccagcattcattactacactccaacaaaatccttagggagtcatattcagtctgagtggaagaaagtctatttatgcattcctatgaattcaacagcaatagcgtgtctcatgtattgagcatgtgagggaagaaaaagaccgtaatataaatagagggataaataatatcactaaggcatttgggagccttgagactgctgattaattcctatttctcatgtttattttttgttaggaagacaattgtcacttttattattggccacgaaacatgtattactctatatccccaagtcctagagcatgacctgcatgttggagatgttgtacagcaatgtatttatccagacatacatatatgatatttagagacacagtgattcttttgataacaccacacatagaacattataattacacacaaatttatggtaaaagaattaatatgctgtctggtgctgctgttattgactacagtgttgtacagaatttatcatggattattgactgctgagaaagggacagtggaatttagccataccaaggactatactggaaacagacttctgctgctgaatgtgccctgatgtgaccaggttgcacttggaagagatcctcgcgtcttcatgaggcacttaaagcttataaaagaactgcggctggaactcatctggtgctccccatgagagtgctctgcttgtagactggccagtgtccatgaaacaactgtaaataccaacatgtgtgcatgggtcaacagtcttggccatttctcatcaaaagaagccaaattcatgatcaacatctctgaagtttcaggtaaggcccacacttctttgaattactcttcatgggcccacattacgttgtgctgtgaattacttaacgcagtgatactgatgtagtatagttttgtcttaatttcccttatttctacttctttggttgaatctatgaacttgattg

SEQ ID NO: 181903 - DNA, 1192 bp, Homo Sapiens
ttggccaagatgtcgttcccaaagtataagccgtcgagcctgcgcactctgcctgagaccctcgacccagccgaatacaacatatctccggaaacccggcgggcgcaagccgagcggttggccataagagcccagctgaaacgagagtacctgcttcagtacaacgatcccaaccgccgagggctcatcgaaaatcctgccttgcttcgttgggcctatgcaagaacaataaatgtctatcctaatttcagacccactcctaaaaactcactcatgggagctctgtgtggatttgggcccctcatcttcatttattatattatcaaaactgagagggtaagtattcagaccagatgtttagtatttgagtgataggttcactttctagggaccagctgcagctccttctcttgaagattgccaccagtgcccctcccaccttggggctgtcctctgccttcccttcctctcttcttttatctttattcctttccagcaggagttaaaacagaaagttttcagtcacctttgtctatttttgttagttcatttgttttttaaaaagatgatgtttattgggttaagtattagcagaatacataaatcatttagtacgtttcctgtttgcgtgaattctatttatgttggtcacattttgcaaattaatgttaaaacctattaatactctacggacagagaagcacaagctgcctgtgtggggaatagctgccgtcagcagcctgggtatatgattggagagaaagtcaagctgatctttggcaccaaaccattccacatctggtactaaaccctgagctgcagcccccaggcttgtgttgccactggagcccactcgtctagctttgtctttaactggcccatctgcattcccattagagttcgtgtattttgattatctggtgaatgatctacttaacagaaaggtagtccacattttcccagaaagtgtttgcattttgctttcaatgtatggttttatgggataatatatttctaatgactaaaatgtgagtaagatgtttttgaataggagcattttcttactgtgtctttagttcctcggattactgtttcttcgcacactccctgggctttagacagtgggattgcaattagtttggagtgtttcattctgtttgtcagttgtacggtgggttgtgccaaaatgcag

SEQ ID NO: 181904 - DNA, 1929 bp, Homo Sapiens
  misc_feature (590)..(606): n is a, c, g, or t
ttttttctattttataaaacacgattaaaagtaattgcacccatcagtaattagaatgcactgtaaaattgtgaaaacaaataactatgattgcacttccaataaagtgtctcttaaaatacagcaccgctgttgctaatcaactgtattttaatattaaaataaactgtttttaacagcagcattaggtttagttaacttaagctacaggctacatttatataaatgcagtctccatggcaacaaaaacccatttaattctggaatatcattgctaccaagtggcaccttttactcccgagaacgctgacactgccctggagcactctaggatgctgcacacctaaatgccttgttagtcagcacacaagtaagagtttggcacaattggactgtaaatagacatgaaaggaaacctttgattcatgtgaaaattaaaactaattacactatggtagatgtggtactaaagagacttcaattcacattgctcagacaaaaaggaagtaagttatggaagagcacaaagagattgaggacatatatgttatcggatttatccaaaataaatttctagaatgaagaaaacnnnnnnnnnnnnnnnnnaaaggaaagccacccaaagattagggagtaagcctttagtttaaatgttcaatttaagtattgtcaagcctaggctaaatagaggactgcattttcttagagtgtggaatacaacttatttatttcatttttgtttctctttctcttgctcttctttttgtcagcaaaaaggggaaaagctattcaattaagtacaaaggaaattccctgtaaggttaaaataaaaaatgaagctaccattcaagggaacttctctgtattcaaccctaatgtcagtggtttatcactgagttggaattaagtgaatcaaagtctctatcaagcatactccacctagcataccatctgtacctgtaattcatttagagcccagatgtgtgcagttcacactaaatgtacttgttcaagccagtcacttgaggtttgaggtgtttgacttgaaacatctgaaccatctcctctgttggctgcctcgttaccactgtcaccagcttgagatgctgcttcccccgccagaatattttcttccaaaggattttcttctatctgggttcctctaccttcactgacactggcatcttcaaacattgaatcttctggcagcaccagttccacatccttcacaccttctgacccatctttgatacaggggagctgggaatctgcactgatttctgtagttgctggaggaatcagggcaatactctgagggttcatgtcatgaaaccaagccatgatgttgccgagaagattgtcattgatgttggggtcctggccagctgagtcaggatcactagatgagggacagaaatcacttcttgcctcactgagagggtgtgagctcagggtgtcagttgaaaatgggtcattctctgctcctagtctcatgaggctgtcaccaagttccaaaagctcagagctgctcaatgcagcccgagggctatctgtatttctggggacagagtccagcctggaaggtaaagaagtgcctatcgcacctaaggatgcttcattactgaggaagtctctagtttcttcatcgagggccagcccagactcttgcagtgatccaactgtattgcaagaagtatattgggatcgtcttcatccaaggaactcagagcctgaagagagtcctggttttcagagcgactggcaggggtgtagtcacgcagggaagagctgtgcagcacactcatagatgcagaacttaccacggatgtgccaggcctgcggctgctgctgccgccttctggaatatctaaagtgctttcacttggctcatcagggtctggaggattactgagtagactgtgaacccaa

SEQ ID NO: 181905 - DNA, 1199 bp, Homo Sapiens
  misc_feature (393)..(507): n is a, c, g, or t
ttggcgactattgacttgggcattgagagagatgatatatacatctttggaaagtgaagtcaatgttcaagaggtgatagaagctttactttttagtgatcagaaatatttagtgcatcttttcagacaggaagaattttatcatcaagtattcccttataaaaccaagtaacacttctttatcagtaacttttagaacttaaaagaaagcaaaaagtaaatggaattgtaggcaatttatgaatcctagtagattttacaatatgtaatttatgttgtttacagtatataaacactaagttttgtgttaaatgtgatcaggaataaaagtatcccacaggcatctgacacaaattccagaattagccaaagaattgtttatttgaggccagnnnnnnnnnnnnnnnnnnnnnnnnnnnnnnnnnnnnnnnnnnnnnnnnnnnnnnnnnnnnnnnnnnnnnnnnnnnnnnnnnnnnnnnnnnnnnnnnnnnnnnnnnnnnnnnnnnncagcgaaaagttttgtttgaataaacaatatccgaaagacaattagtttcttcagatgtattttgaaattctcctaaagagctagtgtttctattcattttcacaatttaaaaacagctcttaacattgctgaagttgggagaactttccatctcttcttaataacagtgcaagattttgtaaattcttttttgtgtttaatgtttaataaaacgagtattaagcttaaattactgaagtacctgggagaagtaatgatgtgtactttcaaaaaaatggaaaatgcttttattttattttctataatttgttaacatgatatgtaaaattaaacttcggagcacaatgaaatgccgattatttttaccttgtttgggcttaaagtaagtatttaaggtttatgtgttcaaatgccttggtaaattggatgacctctaactttactgtccatatggagtttgtcattctttatggataagagaacttaaggaaaaattactgtttttcttcagtctttttatatctatctgatttaaaatctgttactttattaaaaggcttcaacaacaggttgttaggatgtagtcttacatccaggttcacataaaaaccccaattgaatccaaatttgtgtatattttcttatgccagcagtatttgtatccaattttaacttacgtttgttttcttga

SEQ ID NO: 181906 - DNA, 887 bp, Homo Sapiens
ttggcagctttcctggagtcatggatcctctgtctgagacatgcactctgcctggccctggcgcaggcagcctaccttgcaggctctgcatggcgttaccttgcctctcacccagggtgcccatggcaatgctcctgacttgcatctctcacctactttccatgtcccccactggggacgtacaggaacttctgaaactgtcccctcaggttcaaaccatggggaaccagcagggtggggaccctcagaccctctgtctcaccaccttgtgtcacatggtcatctctaccacccctcaacccccacagctgctaacttctggcctgaaacaagtgttctcctcccataaggtcccaaatgggacacaagttttattgctctgggattcttccaaacttaactgactctgaccctgacctgttcaggattttgagaggagccaaaacacgtgcctggcccctgtaggcatttgacattgcaactcctgtgccaacacatgcattcactaacaaagctattaaaaaaataaaacagacttttgagatcaaagaaatgaatgtatccaaaatacatgtttgttcaacagtcattttcaaacattttgttctgggaaggatataaagttaaagtttagaaagcaaatgaatggtaactgactttgaaaacctgagaaagttaaaactcaaagtagcaatggagaaaaccataaaccaacccaatttactctctagaatcttaaaaaggcatggcaatgggcagcacctggcatttccggaccccaggataaaggtacgactaccataaggaaagctgagtagaagctgtttcagaagcacttaatccctagagcacgggtccccagcccccactgtggcctgataccagtc

SEQ ID NO: 181907 - DNA, 949 bp, Homo Sapiens
ttggggaatgaatagcacatggctcctgtggtggatctgatagtggcatagcaccaagtgatgcaggcctgccaggggccacagacacagaagatgctcccggggtcccccatgtactccagacacactgcaggccacctctcccagcaggttgccagtcatgggccccatcatcatgacttctgtccaaggtgtgctcggaaatctcttccttaactgtgactttctgacaggtggaggatgtggtcaggagtgggaaaaggattcgagacgggaagagggaggggttcaggatgaagagagataatctgtgccacagatgctggccctgcagttagctcccacctagtccgtgcacacacattctaatcccctcccattcctttacatgctgcggccagagaggcctttctcaaagtggaagtctcatcctcacttctctggttacagtgctgggccatgggtaacttacaaggcttagcaggaactgtctgcgcactcccccttcctgcccactaccttgtttccctccagttgcgagagaaaacattgattgagcattaactatgtgccaggcttgtcctaagtcctttgcatgtattcactcaaacaatcctcacaacattcctatcacatctcccatttcacagtgagggttctaaagcacgtagtgggtgaggaacttgtccagggtcacacaactaagtgggggtggagaaacatcaaatctaggtggtccaggtggtggccagaacccatcagcacctcactacagctgcctccagtttctcgctctaggaaatactcttccctgtcaactcctgttgtcctctgggctcagttgacatgtcatctccttgaggaggacatcctgagatgctccccgactagggtgggcacccacttccacactccaaatgcctatttgacctgtgtatcgctgcatccc

SEQ ID NO: 181908 - DNA, 1987 bp, Homo Sapiens
ttggcacagactcatccgccactttcactatacggtgtggccagaccatggagtcccagaaaccacccagtctctgatccagtttgtgagaactgtcagggactacatcaacagaagcccgggtgctgggcccactgtggtgcactgcactgctggtgtgggtaggactggaacctttattgcattggaccgaatcctccagcagttagactccaaagactctgtggacatttatggagcagtgcacgacctaagacttcccagggttcacatggtccggactgactgtccttatgtctacctacatctgtgtgtaacagatgtcctcagagcaagaaagctacggagtgaacaagaaaaccccttgtttccaatctatgaaaatgtgaatccagagtatcacagagatccagtctattcaaggcattgagaatgtacctgaagagctcctggataaaaattattcactgtgtgatttgtttttaaaaacttgcttcatgccctacagaggtgccagctatttctgttgatactatgtataatttattaatctggagaatgtttaaaattttatataatttaaaggtaacagatattattgtacatagttgtattttgtagtttcttctgtaaatatgtatttttcataatgtttaatattaagctttatataatactatttttccacactaaagtgttcatgacttgttctacataaaactaattcaacctgtatgacaggactactggtaaaatgcatatggaggtggtggcagagacaatccttcaggccatgttttctacctgttttgatattcactggacaggaaaaagggcagggctagagagagcaaatactatggctagatttgctgcattgctgtcccatgaatctcgagagccaacagacatgtcctaacttgctattaggacaaatgtgacagtcaaaaaaaggattagagggagggagaaaaaagaattaagcagtaccaaagctgaactagatgcttgtgtctgaactagttgctctctctctcctttctccttccagggattcaagccaaagtggtcagctcagggatcatgtaacttgcagtgcaagcccaggatggtaggatgcagggttgagggttctgatagagaatgattccaaacagaagtgatgaattccttttgttaataagatgccagctatacccagactggaaacataacatgcaaagcactatctacagtgattagagatcctttcattgcattcatggtgtggagtgtgaacatccacacccatactgtaatgtatttatacacactagtttctgtctcattttcagtggtctccattcctagaaaagtcacaattatccattcctacttgatttcccattaaaagaatattatggtagcagattgtgcccctcattaaaaggcttaatgccaacattttcatagaaatgactacaaacatcatatatagtaaatttaaaaacaatagcaaaaacaaaaacagtggtcttcagtaaaattttcaaaacttcttttagtaaatcaatgaagtcaaaatgtcaagtaatcacccaaagttgcatttaataacaaaaggcactacatactgtaccaagtttatcttcaatatttgtgccttacttactttgactataacaaattccaatgagtcagaaagtatttccttcatcaaggtccagttccgacagcattcctgggaaaaatttgaaaggagtttgtacggaatcttcatagatacctgagaagatgagctggagatgtttgcctttttcacactacaaatttttctgtaataaacttgggaattagaggtcaagtttgttgatggcatagcttcctttgcataaagagtatatttcttttcaaagtatatatttttgtaacctaccataaagtccgtaagtgaatacacgaatgtaattgacataataattgaaaatcattgactatacctaaaata

SEQ ID NO: 181909 - DNA, 1420 bp, Homo Sapiens
  misc_feature (1148)..(1208): n is a, c, g, or t
ttgggttgcttctttggtctttgcttaaacaaaacaataaagcttaatagttggggagaatgctgttaccagtgtcctctaggaaggctgttagcatatggctctactgagcagcagtgccatctggtgcctgagatcatgtgcttcaggcagttgtcacactgcatctacagccaagcatcacagaaacacttcactcatgtggtcagggaaggtgggactgattcacatgttagagacaggtcagatgggaaaattaaggcccaacttgtggttggggaataaccatactctggtctttcaagtgtagtagctgatgattcccaagaaactgatgaattttctgagtccagacaaaatttccccaagcctgctctctctgttggatatacataatagagaaagtcaaatcagccctttggggtttgtggtaaaaattcactcacccattgaagcctaaggtggctttgtaccttccagatctctcagcaaatcccctgggcagaaatgtcacctgcttgccatgtctttgaggggttcaggtcagcctggagaacaggctccttaggtcaaaaaccttgttttaagagccactgtggtacagtcaatgtaacccacttgtgcagaagccatgcttccaaggaaggtctcaggttgacaactagacatcaaatctgagaagccaactgtggagtaatgtgtttttttctctgtggacaagagtgatcagaaaggtgcttgatcttgaacaattgatccatgatgaaaaaatgaccattagctctcccccagaagcgtctgtgtttgctgaatggagctgagattttgatccgctatcagactccagaaagatccaggagttccaagaacatggcaaagagtcaaaatcttaggacaaggaattaaaatgccagaatgcaaatgtccaacaggcctggtagctcacagctatcaacaccctagaattccacactgcctcactgcagttgctcaaggatgggtatgtttctgtctctgaaattcgggaaaaagccttaagtgccagagaaggtgcttccaagactgtctgcagaattcctttcctagggtctgtctctggtacccaaaagggcagagaaggaaccctaagattagcatagagccactcnnnnnnnnnnnnnnnnnnnnnnnnnnnnnnnnnnnnnnnnnnnnnnnnnnnnnnnnnnnnngactgtgaaacacttcctctccagcagtgttgggaaagttctggacctctactggatctagccataaatggtggtcttcagaaaaatggagattgtggctgccagcacccacaagacagcagcctcatgccatgcaagcagcagccatcctgaacagcgttcctcccagagtctgtttcctcactgctgttcactggtgagaggaaaaggga

SEQ ID NO: 181910 - DNA, 1036 bp, Homo Sapiens
ttggatttgctccccctcgtgcagcaacccccacacccagcaccaggagcctgttcctctcacgccctcacctggctgagccgcagtagttcttcagtggcaagctttatgtcctgacccagctaaagctgccagttgaagaactgttgccctctgcccctggcttcgaggaggaggaggagctgctttccccatcatctggaaggtgacagaaatgggctgggaaggtccgaacagcagggtggatgatacgttttgggcaagttggagagcctttgcccagattggcccagcaaggagcggttttagattagagacactggctggattgaggagtagaaggctcaaacaacccaaggttagttggtctttgtgtgacagtgggaagaagtggagagaacactctgtctccccgacttccttcttgaccctccttccgtatctttcattcttccccactggcctttccagatgaggtccaaaagtaagctcactcttcagggaaaagtgatactaaacccaggcgtgaggagtcatccttctgctcttacttttccctgcatttccttaggctggcccagactctagattcctgggcacttacctgtatctgagacccttagacctcctgtctcagtttctccacctgtgagatgggcagtcacacagatgagtgtgcatgagggaatcagaagcccatctgggttgactcagaacccgggctctccccctgctgtgggtggaaacaaaacaccttttcacagaagctgttgtccctcccccatccctgataccatcacccagaagctgggtggggaatgggaagctggaggagggggttagagttagaccaatgcgaggagctagtaagagctcgcctctccgtgacttccccccatgcaagggtggcccaaggcttcccctgatatccaaagcaggacagcagccccttggtgggattctaactgctgctactctgtttctttcctcactttgctttccaaggtggtatgtgatccccagctcaggcctgtgc

SEQ ID NO: 181911 - DNA, 1180 bp, Homo Sapiens
  misc_feature (163)..(185): n is a, c, g, or t
tgtacaaaagagttgaagtatgctattataagaccttccttaattgatgaaatgatgcaaagccaataatattgctccacttcctgaagtatagagatgaacagaaacctttttctttattccatgttctatataagtcgagaactagagctcaagattaagnnnnnnnnnnnnnnnnnnnnnnnccatttccctgggaacagagcaacagtctctctgggtctaaaacatccttttttcggtacatcccacagcatcctatagaaatatgttgcaatcagttgccaagtcacgtcctagcgtaatgtcagcaattttctttctgaaccaattttgcactcagcattaagaggaaatattgaagggagacataccttttatgtttgtaaaatttatacttcttaagataaaaaggcaactatatccattgtcgtgagatcttgataagaaataagaaaatgaaatattatagaaaatattatattatttaattgtcctgttctaaaacactttctaagcctgcctgtttttttgccaaattaaattaatatttggatgtagacagcttttcagagtggcagtatcatagtcaatgaagatgacctgaggcacagttattgctaattggacatagaaaccaccttcactcatatataaaaattattatgtgctacactagatatttcaggagaattgataaaagaaagactgttgtattcatatgcttgtcttcctggctagaggatctgttttaattaatcagctcatggagtttggaaaatatttatagtatacatagctgagtgttcatgtaaattttgaatacgttcatcttttttttaaaaaaagattgaacttcaaaaccattttcttacatactcagtagaagttgttatgagccaacattttttgtgagctatactattttaaacatctaaagtaaattatttgacatataaaaagacttcttcatttaaaaatatatcttttaaaaataattttacaagtgatggcatctcattttagaagaagaggcatcaatgacagcagttacagtaactcgatgctgaatatgtttttaaatacaagatgctgtgttcagcattgtacatacattatcaaattttattctgataatatgctgcatgatgtattaggctgggttctctcagacagaacc

SEQ ID NO: 181912 - DNA, 697 bp, Homo Sapiens
ttggttttaagaagaatgaaacttttttttatttagctttgacaaccagcttattctgtctttttcgtaaatcttaagaattcctataggcttcaaagattaaatgtcaattgctggagataatagacaaagacatttaataagatgaaatacagatatagccaaacagttttaccttctcagttggtgattacaaacagcaagtggttggtgatagaatgaaatgaaaaatatctagatggtgtccttttaataacatggagcccgtcatacacaggcaatacatctttaactgtcatcgcacttatttgttctcatttgtggtgttactgcttttcgaggttgattggtctccccgtagtccctccctgtgttacagctccattcaaaaaggctttgtatttttcattgctggtgtctctttagggagaggagagtaggggatatttaaaatgttttaaatctttaaaggcagaaatgtaaaatatatgaggaatcaagtccgcacgctttgaattacgcattactacaaaatcaagtaaacaatttttgaagagaggactcttccttcttaatgtttttggaacaataatagattatgtgtatattaggtaaatgggaaaaactttatctgttgactgataaaaacaaattattatgggtgcatttttgtatatatgaagataatttgtgtgac

SEQ ID NO: 181913 - DNA, 1324 bp, Homo Sapiens
  misc_feature (241)..(250): n is a, c, g, or t
  misc_feature (348)..(357): n is a, c, g, or t
  misc_feature (1072)..(1084): n is a, c, g, or t
ttggctttcttttctctacacacatcagtaacagtccttttggcccccttagttcattcccagcagaccagataatttagaattctgataatttattatgatgaaattgatggggctcttagacttgataaattggtttaaatcagcctttgcaagttagttcagagataaattagtgctaaagaacatattctgagaaaagcagaacttgtggttaacattgcaagattattatttctgnnnnnnnnnnatctttgaatcctgtgggtgttcattactgtccaatgcaaaatcatcataccagtttttgcattttataccagtgttagcatggaacacagataagcnnnnnnnnnngtcattatttcaccactcaggaataaccactgttaatatgttacatatattctttttcacctgtgtgtgcatttgactatacatttacaaaatgtaatcctaaaggaaatactattttgtatcttgcctttttcaattaataaattgatttttaaaatttcttctcattttcagtatgccactgtctagattctggttacttctgctattcttgccttctcatatctctgtcctctctctcatcagatacccttctgtcaaggaatattgatgcttcagtgtagtcatctatgatcttctcattctgtcttttctttcttggtctttgacactagatactcaacatcccacccctaatttgcctgcctcacccttgatgaaactctgttctatagagctagaagcacagcaagagagatgcttttttcctcgatacttttcagaaatgcattgcacctaatacctgggagaagctattctttagccaagtttgttgaatgaaaccattcattcaaagtactgtcagctgtagcagtactttgtaagcttgactgattttcctggaactccatagtctctcaagtcgaaatttgaaattgcattaagatgtattaagcatgtatcttctatgtattgttaaattcctaaacagaatactgattaacaaaatgttaattttcagtcgcatacaactaaggagttatactagataagnnnnnnnnnnnnnaatgctcctagttgaatactactggttttctgatagaagtatgaccttctggaagtgtttatacttttatgtattgttaaattcctaaacagaatactgattaacaaaatgttaattttcagtcgcatacaactaagagttatactagataagtttttcttttttaatgctcctagttgaatactactggttttctgatagaagtatgaccttctggaagtgtttatacttttaaaaatt

SEQ ID NO: 181914 - DNA, 918 bp, Homo Sapiens
ttggatgttataagaccgtgtagtattgacataagggtacacaaacaaaactaatgaagagaatggggattctaaaaattgactatccatagatagaaacctgatatatgagagaggcagcattgtagaccagtgaagaaagggtgtactctctgataaaagagtgctaggacaattagatattcattcacaaaataaattccaagaggattcaagacctaaatataaaaaaatctttttaacaaatttagaaaatatgagaaaattcttatgatattggagtagaagaaggattttcaaattaagacaatataaaaaaagatttattaatccatgtattaatccattctggttcattgcagttaagaaacgtctctgttctgaaagccctcagatagtgaaaaggtgagtcacatagcaggaagagaggtttgtgaatcattgtatcagccaaggtagagtaagaaatcagaaactacactcagcatttcaacagaaagaattgattataaagtattggttaaataggcattcatgaaatggaaaggcaaagagaaccccaaggtgatgcagagataataacgtctggaagcagctttctcctgctagttttgagagaaaaagtgaagaggctgcagttatcagaatagagaattgtggagcaggggctctgaggaattggacctcacacttgtgaggatggggtgctgcccagctggtgccagtaactcaggagctcagaaggtgggtcttccaaggtagagcgctgccaatgagggtggttccaggagtgccataagaaagctggcacaagacccagtgcttccagcattagggtcattgctggggctgcgctgatgggaacaacaaatggaacaaaagcatgtcccattcttctctttctgccgtcccatcctc

SEQ ID NO: 181915 - DNA, 1407 bp, Homo Sapiens
  misc_feature (416)..(710): n is a, c, g, or t
  misc_feature (960)..(968): n is a, c, g, or t
  misc_feature (1073)..(1121): n is a, c, g, or t
ttggctgcttttgttcacatgtttcttttaaatagggagaaaacttggaagcttgcagtaatcttcctgtaacattttattggctggattacaccacatgcccatatctaaaccagtcactaggaaagcaaatgtaattactgtgattagcttagaataatgatttctctttttgagatgggattggggtaatggaatactgaatatctaaagaaacttgtgtttctgcagcaagaaagaaaaaataatgcttatgcataggaagccagcaatgttttctgcagggattcattggaaaattttgagcaggggagtcacaagattagatttgagtatcagggcatactggttatggtataaggcagagattggcaaacttttcctgtaaagtgacagatggggaatatgttaggccnnnnnnnnnnnnnnnnnnnnnnnnnnnnnnnnnnnnnnnnnnnnnnnnnnnnnnnnnnnnnnnnnnnnnnnnnnnnnnnnnnnnnnnnnnnnnnnnnnnnnnnnnnnnnnnnnnnnnnnnnnnnnnnnnnnnnnnnnnnnnnnnnnnnnnnnnnnnnnnnnnnnnnnnnnnnnnnnnnnnnnnnnnnnnnnnnnnnnnnnnnnnnnnnnnnnnnnnnnnnnnnnnnnnnnnnnnnnnnnnnnnnnnnnnnnnnnnnnnnnnnnnnnnnnnnnnnnnnnnnnnnnnnnnnnnnnnntgttaggccatgtgtctctataacagctattgaactctgcattgtagagtgaaagcagccatagataatgtgtgagcaaataggcatgattgcactccaagaaaactatgtataaaaaaccatttggtaagctgaatttggcctgtgatacacagtttgctggcccttcacatagaagatagatggagggtaattacataaaaagatttaaagacaaagtaagcttttgtagtagttcatgctatagtcnnnnnnnnngtcaccaatctgtggcctagtatcagtctattatgaaaatttgacccttccagggtaaaaggaatcaagttcagaagctcaatttacagatttaaacctgtatgnnnnnnnnnnnnnnnnnnnnnnnnnnnnnnnnnnnnnnnnnnnnnnnnnaacttaaaaaataacgatagtaattggtagggtttctttttcactgtgaaagccatcagttaaggggccatgtctaagtaggaaatataaatataaaataataagtttgtattcccagtgtcactggaaagataaagcaagggcagaaaagaggtacagttaatatggtttagttattattgagtttaaaaagctaggggacagagaaaatctcaatcttaagtttacagactgtgcatgagcatttacaatgctcatggggaaggagtagaaaattgtcagtcag

SEQ ID NO: 181916 - DNA, 1815 bp, Homo Sapiens
  misc_feature (215)..(248): n is a, c, g, or t
  misc_feature (629)..(637): n is a, c, g, or t
ttggatttgtttgttaagaccacttatctgcagaaggttgccttttaaccccagtggttctaaggtgtggaattgagtgaccctaatatttacataagagacttgttttagtggagcataagggaggggcataagttacaccgttttgtgctgcttgagaactgtcttttaaaattgatcacaacgagggaaaacaaaataaaattagggggcannnnnnnnnnnnnnnnnnnnnnnnnnnnnnnnnnctatcgaatatatcttagaattttgctcagaaatcactgctgcctctcaagtgttgcattgtccctgcctaaaccaagaaggctaaacaaagcccctcctgtttgaattcttaaggtaagaaatttctaagctaagaaaacactattgcctaaaaccaatgatagtggagctcatttacaaataggcatgcctcacacacacagtccaaaggcaagacactggctttgaaattaggctcatgatgtgattcctattatatgtacctgatttttttaggccccaggtatgtggaccagagttaatgtcatgactcttcaaagatatgatgaaaagttgccctagaaatctagagatgcatgtttatttaattccatagtttnnnnnnnnntttaagcaggtagttgtggcttatctgggggcaaaataatatatgtgaaattgcttccagaggacaaagtatattttctaaagtcctgaaataggatcatgaacccttctgaagttttggtttgaaatattatagtatatgatattaccaaagagcccttaattcagagtttaaggggctctcttcctgaactctcttcatcactcagggttgaatgtgtaatgttccttgctattgattgttattgttgattcttaggatcaggccaaaatcatctggaaaacattatcttaattccgtctctcatatcctaaacagtacattttactaagaaattccatatgaaaaactccactcatgtctcctgagattatcctgtaagtgaagtagctttcatttaaccaagctaaattatttccatttagccatgttaaagagaagccaagtctagagaaagcaatcctgtaacccatgaatctggtgtacccattttcccttaacgtaacgggaagtgttttgaaattcccagaagagagctgttttgtaatcaaagtgatggattataagaaagccagactttggaaaaggataattggaataaagggaggtgcttgaagattttccaaactactttatgtcatttagcttctattttctgaagggctttctttggtgccatgtactcagatcagtcagttgactgaaagatgatcatgttttcttcgtaaagatttaagcaattggcaactacaaagacattattttcttactgttctatatcatgtactgttgctgacattacaaaaagggtctggaagggaaaccgtgtcactgttttatcttttttctttaaaatacaaaagtatcccaactaatcatttattatggtcagcttgttttacatgtcccctatcatgagaaatgctatcaacatctgtgatttctaagagtcttaccaaattgttactttaattcttgtgtcctgctgagtggtttttcttttaaaataccatttttatcaccctgtggcactgggtgtgttactgcgattacactgatgattctgagctgtgcttcttcaagtagctcagttcttggcgttttatattaggtaacagttttgtgatgcttttgtgcattctttgtcatctcttctgagttttcgaatctgtcctaaa

SEQ ID NO: 181917 - DNA, 1266 bp, Homo Sapiens
  misc_feature (202)..(233): n is a, c, g, or t
  misc_feature (238)..(345): n is a, c, g, or t
agaccaccctgggcaacatggtgagacctcgtctctacaagtaaatttaaaaattagctggacatggtggcatgcacctgtagtcccagctacctgtgagtctgagggaggaggatcgcttgaacccaggtgtccaaggctgcagtgagctaggatcatgccactgactccaacccaggtggcagaccaagatcctatctcnnnnnnnnnnnnnnnnnnnnnnnnnnnnnnnnttcannnnnnnnnnnnnnnnnnnnnnnnnnnnnnnnnnnnnnnnnnnnnnnnnnnnnnnnnnnnnnnnnnnnnnnnnnnnnnnnnnnnnnnnnnnnnnnnnnnnnnnnnnnnaacaaattacacccttgtcatagtgacttaaagcctacatggttggtcaggcctttggtcttcaaatctaaagaattgtgctagtcttcatttcctgggtttggggccttgaagtctcatagggctacttatctttctctcccacagtatgaaaaggctttctcatcccaagtatctgcagaactggtctctcactaagccaacaaaagaggtattccatgttcagtgcacctacaagatagcctcatgctctccctgtcaattaactccttttagcattctctaaactcccatatccttctctgaccaagctccccaaatacttccctttttcccctcacaaacctttatctctcccacttgtaccccagagcatctcttctcatgaaggctacactcaaattattgccaacgatcgtggtcatctactgccttctgtgccccgttccaaggtgagatactatcttcactcctatcaagaaagtcaaataattaaggcacagaactgggagatgtgcagtctctcacagccattatcgggaaaattaaagtttaatctaattcatgttgtaatgtgagagcccctgaacttccggccagcttacccagcaggatagagttgtgtttagcacccttcagaagttcttaaattgatcaatgatctgtataaatgaaagccttcaggtgatgacatttgtgcagtgggtactcctttgccacactcggcctaaggatgtggaatttaagttggcagagtaaaggggatgaaaaaattaggcctgcaaagcctaaatgagggagggggataaggaagggtgggaagattatgctttcagtcttgtttcataaccatgcattcctaaaggtaaagaaaggaaataatacagaggtctaagtcagttactgggagtgagaagccaa

SEQ ID NO: 181918 - DNA, 1338 bp, Homo Sapiens
ttgggtggtattaaggagacaatctgaggcattcccaccagtcaatttgacatgcggttggcaaggttcctcttcccttcccactttagatcgtgccctgtcccaggtcagacccgaaagattcataggcacacttacagccttcatagtctcagccatagtcatcctagcaactgctagtgtggctgtagcatctattactgaatcagtacaaacagctgcttttgtagataatttggccagaaatgtttctaatgaacttctcttacagcaaggtatagatcaaaagattcttgcacatctgcaagccctcgaggctgcctttggaatatgtgggggagcgacaagatgcactggcattccaacagcaattaaactgtgactgggagcataaacatatctgtgtcacttctctaccatggaatcagtcaatgcatagttgggatgaggtgaaacaacacctctggggaacctttcatgacaatttaacagcagacataaggcaacttaaaaatacaattttagaatcccttcaaactgtagatctacacacccaacaaacagccatatggaagggtgtgtgagattatctctcctggatagaccaccgctcctgggggcggggggtggtgggtcactccttgattagaaaagaatgttgctaattatactcatgttgtcttatgttatttactaattttaggatgcaaagccggaataagagcaatgaccaccatgcctgacagacctgttgctgcgcacacctgtactctccaatgaacaagactgaatgcaaaaaaaacagaaaatggggagatttaggggatcagtcagtgtggttggaaaattgtaagatgaagttacaggatatagacacaaaccttcttggaaggccagaaggtttgcatagcttcagtaaaggatttggctgaaatcctttttacctctaatcccctttaccttgagttgatagcaatagagcaaataacatgggaatgtgggggagtttatctgaatagcttgtttactcatgtggtcctaagaccaacctttgattatccgcaggtgcatgattgctctctacctgggggcagggggagttaattacccacaggtgtgttgactcaaagcctttgtcattaagtctgtgctgaataaatgccatgagggccagccagttaaggcctgtggccgccacaactctttctgtgcatggcccggccccttagctgctctgtcactgaatatcggtgtgagtatgttattcatctgctgtgcggctggggtctgcaggacagacctctgcagctggggaaggaggcatgggactctgggaaa

SEQ ID NO: 181919 - DNA, 1513 bp, Homo Sapiens
  misc_feature (842)..(857): n is a, c, g, or t
ttcgcctgtccagtctatttttcttagaagagaatgacccttccctccctccatgaaatacagaattttgctttttgaagctgcgaagcatggcattttacagaagagctgaccttttagcacagtacctggataacactatgaaaattgctggggtagacagagcaaaggcagaggttgcaggatggggagtgacagagaaggtgacatcctcagctgaagtgtgaaggcattcacaaagattagagcagtctcatattctcaactaaggcatgtacataaagaagatgccacttggggcatcagataaagatatagaaagttcacaaagttgttgtcaccttctgttacagaaggggaatcatcaggctatatggtaactcagctggtcactacactggctgtattttccagacataatttctcaatgccacacctctatggggcacctacaggaatgtcaatcatttcgcaggcatgcctggccccaaatgcatgactggatgtggacagccgaggtaaaagcccttaatgagtggcatattagtcatcacatggtaccctgggctgatcccctctccactccccgtttctccatcttcagctgaggtaggacacttcttgaaatctcaaggtagcacatgctctagcctttcatcttgccttttcttggcagggctgctgtggttgagacagagtagctctttgaaatagagtaagagtgggagagcaccgttctttcgggaggatgaaacgaaccagatgagaaagttgagtgtgtgtgctgaagggacatatctggatatcgtgaaagaatgctgaaagtctctcccaagcagccnnnnnnnnnnnnnnnntcattagtattttgttctcagaaggaacctggaggcttttggcccaggcaaacttctttggagtgaattttatacctccccagtggatttttagcaggaaagtaaaaaataaatgctcccgaggctgagacctcatacactgagaatcttaaaatttgcattttctatcaatgaaattgacttcattatttaatccatcctttgtacagtatcattagcaacttctctcttacatcccgctccccttgttgcttagagaagacacatgagcagcaatggttacatcttcatttgaccttctctgtgatgatgcggcaacatctgaatatgccaggccagcctacaagggtctatttgccagatgccatgaatgttttaaggggcagcacataggtacacttaaaaagtgattactttctattctctgataatatttaaataagtcaggtggacagccttacattttagcggctatagattcaggcacacattaacaccatgaaaggaaagcaaatgatcccttttccccccatattttacaactgctattacaatgaccaatataataccaaagtatatgttttttaaccttcgtactcaaccccatcccaagttgggcccaataaccaccctgggtgaggagacatttcagttct

SEQ ID NO: 181920 - DNA, 695 bp, Homo Sapiens
  misc_feature (462)..(478): n is a, c, g, or t
ctttgtacaaaaaagttggattgttaaatcccaaaaagagtgctatgaccattatgtatgaggaaacaggcctttgacctcctggaaagcactgctcaaaagtcattagtgcccatttttgaattccccaaacagaaagcttcttagaaaacacgctgagattttatttacagggaattctttgacacatttcaattggtgtgtagtcaagtatagcaagtacttaataatgactgaatttcatgttcctacagtcatacatattcattagaagttttatgttgttggtctgatctgattcttctttgtttgtgggtggaacggcactgagagaagtatagttttttaaacttgaacatgttcagtacttacattgccttagaaaacccagacacatagcagtggaaatgaaagaaatggcatcagaagtgacttaatttagcaattgtgattcctcttgtnnnnnnnnnnnnnnnnncaatgccatattttttggagaaaagttggcaatataggggtttcgttgtctgtttcacaagaagactcatttgttcttttgggggaaccagtgccttacagattttgtatatactgtaattattcaggactagggaacaaacaattgacttgtatttgttacagattgtatatggctttgtttttacattcccctaaataaaatggcttcattctcc

SEQ ID NO: 181921 - DNA, 1053 bp, Homo Sapiens
aaggaagagagctgtttgcagataaccacagctgcctctgcaccgggtcctggctgtcccttccagacggacctgtctcttccactctgagcctctctgagcagaggtcccacagggtgttagtgaccagagatgctgccggttgaggtaccactccccccaaagaccccaaggtggaccccaagttcaaggttccgccttacctgagccccttatttctgcacacattcctgccctctacattctggccctgctgcctccccacctctgcctccccagcttaatccatagcaactgctgcttgctgggcttccaactcaccaagctcacttgtaccatgtttgcaccccagacagtcacatacatgtctgactgtgttatcattcttatttcagctcaaatgtcacctcctccaagaagacttctcagactaccaccaaagaggccaccatattattctgtctcctgatcctgtgtagttccttcaaccctcttgtcccagttgatctgtttcattggggtgtcttcttcaccccaaggcataagtttcatgaaagaaaagaatgttgtttgagtcactgctgtatcctcagagcctcagacagggctggacacattagatgccacataaatgtttgctacatggatgaatgagtagaatagacagatggacaggtgggagggtgcaaggatgttagctcaggtggtcaaactctctagaaaaataacccacccttaacaggcatggttggcttgatctccataaacattcccataaaggaaacgtgggaactgggaagcccaaggctcaaagcaagaaatgactagagacagatcacaggtcactcagtcagcaagggggacagtcaagaatagaagcttccttgggtgaggagggggctgctctgctcccacagtgggctcagggttcatatggtcctgcggaggcctccccaggcctacctctgctgattaaagtttccccaaaaagcaagctcctccttctacttgccctctaagctttcggggtactagaagctaatcatgcaccaa

SEQ ID NO: 181922 - DNA, 1676 bp, Homo Sapiens
ttggccaaacttctgtgagtcaggctgataaaagctaactgaatagagtttgaaaaaggagggtatttacaaaggtgaggagttgggaaatccacaaggaacaggaagcacccagaactaggaacagttagagagccatcacctcctctgggcctcaagtggcaggtgtagggagctgtaactatactagagtgtgcccagaggcagaggaatgcagaccctccaaatcatagcgtgggactggggtactgaatactcccaaggctgcttctttgtgccctatggtctcctctggtgcttcccattggctgaaccaagccagagggcggaaagcctggttaatctgtccatgtcagccttcctgggcacagagcaagacagggaaaagtgagggattatttggaagaacaaacagagagcatccagcacaggaagtgtttctgaatacttgaattccttaattgtcacagaccaactgatcaacatttaactcagtagcacagtggtttcttaactctcttgttagaacatcctattaccattttttatttttaaaactgcatactgttcagtatctcactttaggttatcagatcttttttctgtcttgtttgattctagtctgatatttttcatgtatattggtcctcagtgtattattatctcatactaatgcttatggaacattatctgaggggaaagagaagagcttacaattaaaagtcatgggactaggcatgtgtcatgagacctggggtcttccaataacaagctaagacattagctgagtcattttccctctctgattctcaatgttggtggttattcagtagagaagggaaaaggtatctttctgctcaactgtctcatgattcctggaagtcctgcatgggagaagaactttggacaggatggtaaccatattaacaggttagttctgtaccttggcatccttgaataattaagacgaagatgatgttgatgatatcattattactacatgttgttagaagagctgaagcaggactggcttgtctgtcataatgtaaaagagtcttggaagatgtccggggtccagggtccaaaacccctcgtggcctttggaacaccaagctctgtgccaaatggtggaaggctgccctgccgcaccacaaatctaagcctagggcataaaaccccttgtggcttggatggaacccagggctcagggcataaaacccctcatagcctctggaaagtgcacagacttgttggttccttgcttttcactcataaacgtgtcctctactatctcaagcagcagagtatattctacatgtgtcaaagaaaatgctaaactgtcacagctacgcttaatgcaccactacctttctacccccatgtcctcatgccctcacctgtttaccctcacgtcctcaccacctgcttctttgtttgatcaccaataaatagtgtgggctcccagagcttagggcctttgcagcctccaatctagtgctggcaccctggacccactttatgcactcttaacttgtcttttctcattcctttgaccccgcccgactttgtagcccccacggcctgtgttgggcctgatcaccccaacaactaccacttattagtggttaccatgtaccaggaattttaccaagcattaagcaaacataagcttattc

SEQ ID NO: 181923 - DNA, 1101 bp, Homo Sapiens
ctgtccatgtttctccatgttatatttatgttttaaatacttgtatatagttatagtagctgttaatagtttcatttattttcatcattctgggtctgtttttattgatgaattttcctcctatttaagagttgcattttcctgcttcctggtgtaagtagtatagtaatttttcattggatataattggtgtgaatgttgcattactgagtggaatttgtttttgttgtcttcagttaaagaaagttgggctttggtttggtaggcagctaagtaacttttggatcaccttcaaggcctttcttaaattttttaggaaagatctagggtagcattcgtgccagggagactccccttaaaggtatctctgctgcatgccctgctaagtgccccagggaggacatttcactcaggctggttgcagttcgaacgtttcccgaccttgtatgcactctgggaagtatttagcttatagtccctggtcatttcttgcccaaacttgtgagattttactctgtgtacatacagcttagcactcagcaaagactccagggcaccattaggcaggtttctggaactctttttcagcatagatcctgtttttcacaaatcttccctgaaacttcagctgccttagcctgcttaagctctcctctcatctctgtctcctcagttcagcaagcctaacaagctcctgtgtgatttctccctcctcttacccacagtctagaaattgcctccaggcagaaagttagggcaattatgggctcatctcatttgtttccctcctctcaggggccacagccctgcattacctgtttgccaatgtgtgaaagcaattgtttcatgtattttgcccagttttctagtttcttatggcaggaagttaagtccaatgattgttattccatcatggctggaaaacgagggtctggaattgggattttcacataggacctttgcttttcctgtgacacatgcttcctctcagtacatatgggatgaactttctgactaggactacagtagcaatatcagtttatttttgggacccacccaacgctcagaccttactggaagtaccaagttgctctgcttttt

SEQ ID NO: 181924 - DNA, 1014 bp, Homo Sapiens
ttggagccactgtgcctggcccgagacttgtttttttatgtaaaaaggaagactcctataggcagctgtgcacagcattttttcttctgaggttggaaaatgcctggcctccatgatcctccatgatctcgccctcagtcctctctgtccagaagaggaggtatcaccgacatttaccaaaggggacagagaggcgtggaggatgtggccaccctaatgttaaccagccatgacagttaagggctgggactgccagcagacaacccatgcctgcttgccgcctcctcagggacttggatcccatagcaatgctggggatctcggcagccttcctgcagtgggaacagatttgaaagaaccatgctgcccgggcgcctgcctttatcagccactgcttagctttgtcaagacgttgcttccggggcagcagccaagcaccagtgctgtctgccaaattcaaggatggcagccataccctggctccaaaagatcctggaaacaggcttcccaggctgttgtaggaggttctgccttagggaggaacggctcagggatgggacgagatctgcggtgctctctactgcctggctggtagagggtggcccaagccagaaaaataatgcacttcggctgatcccattcacacttgggagaaatctctggaggctgtggaacccttgggcggggcctctcccctcagcggccttctgtgatctacctttacaacgatgcctgaggggatgtgcttcagcaccacgcagttgctggttttgttggttgcctggccccctggaccgtgtcctttcacaaactgctcttcgagttcattctcatccaaggaaagcagtgcagggtagtccttcttgcctgccatctggaccggagtgacagctattcctggggataacaacgtcagcttctcccaaagccggagtccccatggcgccgggcatattcgggtcagtggtgtaggaaaatgaaataaacccacggtgctcataaggaaaaaaccaa

SEQ ID NO: 181925 - DNA, 1266 bp, Homo Sapiens
  misc_feature (812)..(941): n is a, c, g, or t
gggggagtccaaggagtttgattgattgtccccgctggtactgctttgcggtgagccttggagcagtttcggaggaagatgcgggtgactcctgctccaggacggctaggataggtgaagacgaggttcgaggtgcccggagtgacagcaggtgtggaggtcaccacgatgggggtgtgcaggggctcctcaccgtagaagcccccagcaatgatgatgggcttgatgacagagcgctgggccttgtccagccccgccgacgaggacgaggggctgtcctcttccaggggctcctgtttcaccactacagcgcccaccgagccacccccactgcgcatgggctgcagcccaggggctgggggcgatcggcgctcctcggggctaatcttgcacactgggccgtgagccaccaacatgaactccagcttctccttctccttctgcagctcagcaatctccttctgcaggcctgacttctcctcctccagctcctctgtctcctgccatggaaagagagggatgtgagggacagcaacctgccagggaccaatctaggcaggaaagagaaaaccagtaatgttctcagacactgtgagagcagaggctcacacacctaaccacagaccccgctggtctgagtctctcagtcacctggaggctcaagattcctttcatttccaaagaaggaaagtcagcttggagagggggtaagacaacaactgcagctgccataacccagcacctactttgtgcagggcacagtgttaagcatttcagagatgatctcattcaatcttccaggagttttttgnnnnnnnnnnnnnnnnnnnnnnnnnnnnnnnnnnnnnnnnnnnnnnnnnnnnnnnnnnnnnnnnnnnnnnnnnnnnnnnnnnnnnnnnnnnnnnnnnnnnnnnnnnnnnnnnnnnnnnnnnnnnnnnnnncagggtctatgttctatggccttggtgccaggactgccccctcggtacccctgaggggtgagtactgcagagatctgcatggagaagggggtacggaacacagctctacccacctctctccttctcttactccccaaccccatgccagcccacctgtggatggataaacgctaagccctaggctgctagagagtggagactttgtcatgcacactcctgtatccctagcacctagaacagtgcctggcttctcagaagtgctcagcaaatccctgtgggattatcacagcctctcctcctcccttttttcactccaatttctttc

SEQ ID NO: 181926 - DNA, 978 bp, Homo Sapiens
taaatatttcttaaaaagttgattatctcttgagaggagattatgtgactcttcctctcatcagagaggactgaaataacactttggcctctgtctggtccctgtggttctcagggagtttcctatcttggctggcttcctgtgctgggcaagggggaaatgaagaacctaggtgaaaagcctgtgttcatctcccttgggcctcaacactccactgagaatatttctttagagttctcatacccatttcaagatgttgagggttcctttggctgttttcctaactctgctgagagtgtttgaagggaggccttgggtctgaggccaaggagttccccttttcttcctgaccttctgccagaactcccatttggcatgtgtgtcttcttgacactctctgggcagtactggtggcaattgaaattctttacggtggtttttaagcagtcagagatgtactttggttttacatttctctagagaatgcccatcttattctccttgcgcgtccaaattgttttacagccattttcattgtcaatggtattttcagcaggtttgttttccattaagccatctacacattactaggtcaaaggaatatttttgaagatattgagcagacattgattatcttctgagccctgggcatgtagatctatgggtgcttaacattgtagctacttcacattcactcgtaggctcttcggggagtctagacagacacttagtcacaggaaggtgtgacagggaaagtgcacggtactatggatgctcagaagagggaacacccagtttgtttgcaaagtctgaaatatctttaaaagctattattgccacttgattggttgttatatggactgaaaaactgagagtggactctcagagtaagattgggactctccagagtaagatgggattctttctaaagtaagatttgggccagctcgagcaacatagtgagactctccactctaa

SEQ ID NO: 181927 - DNA, 1306 bp, Homo Sapiens
  misc_feature (455)..(706): n is a, c, g, or t
ttggttactatttttaaggggttaaagagaacatacattctcacattagtgtactttctggtagaaagttgctgcaaaaacatttgaaatgtatattaacctaatgtatgtcatatatatgtctttgtgtaagttcaagactattgatctgtgaagttattttgtaaggacatacatttggtaagtaagtttgtgtcccaggaaatgtatgtgtttttaaaccctttctaaatatgcaggccattaataaataagattgtttcttccctactgaatagataagtgtttttcttttttaaaattggaagcttcataaaagttatcttgttaaaaaacgatgatgatgttaacctatctttataattggaaattatttaaactgtttgttgttacagaagaaacaaaatggtaattacagaattagctgtggggaagattggctcccatggtactannnnnnnnnnnnnnnnnnnnnnnnnnnnnnnnnnnnnnnnnnnnnnnnnnnnnnnnnnnnnnnnnnnnnnnnnnnnnnnnnnnnnnnnnnnnnnnnnnnnnnnnnnnnnnnnnnnnnnnnnnnnnnnnnnnnnnnnnnnnnnnnnnnnnnnnnnnnnnnnnnnnnnnnnnnnnnnnnnnnnnnnnnnnnnnnnnnnnnnnnnnnnnnnnnnnnnnnnnnnnnnnnnnnnnnnnnnnnnnnnnnnnnnnnnnnccccgtaccaatatttggagtccttagacattagattatatgaaaatgattgattgataggtaagaaaggttaaagagaaatgactttttaggaactagacttgaacgtataattaatatgtggaactagtttgcttttataattcattgtatcaagaaggagtcatgttttaaatccaaggcattgagactatctagaagcaaaaaagttggttttaaaaattctttttattagaagtgtgtttaaaaacatgtctttttttcccttgagcgacagtggcctcactacattgcccaggctagtcttgaactcctgggttcaagcagtcttcctgccttggcctcctaagtagcagggattacaggcatgcacccacatgccaatttttattgcttaaaatggcgagttctatggatattatctagccccaagcccatatctgtacacttttgttcattttataataccagaaagaaatgttctatcagtaaaagaaggttttaagtatgaatctccatttttgtggagtttttctacccctgtaaaaattaactttgtgggttcccagtaattacagtaaaggagtttttctatatttt

SEQ ID NO: 181928 - DNA, 1733 bp, Homo Sapiens
ttggatcatatcaaggagagggagaaagagtgtcagtgattttagagaagccaaagaaccatattttcagtgcagcctttagtacatggggagacacacacacaaagctatcatttgtttagctttgtgatggcggtattagaagtttaggtggaaaatttggtgtattctggactgcgactttctcctctttgcatcctgattatattcatgaaatttgttaaaatcactatgagggattctcatcctcagtcttttcctattctctataaatctttaataaatctcacactctcaagaggtcagagcatttgaaataaaaatcttaacagtattgaatattggtatatttcatccatacaatcaggaacaaatttaatagtaggaaaggaaataggtacattatatgtgtttctgtatatttatgtttatgtttttatttacatatgtatactgaatatatatttgttactgcttatagatcacatactatgtttcatcaactttaagatttcattaactataaaaatgtcattttatgaaacattaaagaaaaatattgcaaattaactcatgaccttataaagtacatctggatttcagagatgttaagtgtgaaaaaatatcttagaattcattagatatgcttagcaatatatgatactatgcagtagattccattgttttcttgaatagaggcttcagttttctaaataattttccacttataaagattaaaaattagttctgttaaaaatatgtatcttctatttggagatagttcagggaacaattagaaaatatttacatatacctgaatttttaaaatctgtagctatatatgtcaaggtgctcactgtgttcatctctacatgaatgagattatgaatattaaatatgttttattttgcttgtctttgttacttttctgtaataagcattataattcctgttcttaaaataataagttcatttaaggaaaagggggtgaaaggaaaaatctgcagaatttaggtctgagataataccatttcaaagcactgtgatacaaattacttatatatgctatatactgtgtgtgtgttaactacttttatttgggggcttgttttgcatacatgtgaaggaaatgattatatataaggatttaattaaatctgtttataccaagaattatatttaaaagaatatggtttcattggatatttaagcattcaggtgtgatgagggaattcagggaaaggaaacctttggtacataaaacttttttttctttcccctttgaccaggattataaccaaaacagatgtatgagaggtgacagagagaagaggccattggtctcagtaagaatgccctgctttctgcatctctgtttcagaagaccaagagggtgacttaccagactgagtatttctggggacaatacaagtacctgggcatgaatttccatttcgattcagatgggactggaaacaaccattcaattttatgaatcttactggacattatggatttactggaattattccagacattatgccctttggttgtcactaccttgcaaatgtgtaagaggaaaatgtgctaatgtggcagtgactgtaaaactggcacatggcatttattaatcctgaagaaaagtacatgtactatttttcagtataatataatgaacatgtcagaactatttcttgaaaacctttttattacttttgcgtgaatttatttaa

SEQ ID NO: 181929 - DNA, 1210 bp, Homo Sapiens
  misc_feature (693)..(806): n is a, c, g, or t
  misc_feature (1075)..(1083): n is a, c, g, or t
gaaataacagttaaataaactgataaaacagaaatacacgatgagagagggaagaaatgagagaaacaggcagagggacagagggagattaggacagacaaagaccaagagagaaggggggaagagtgctgatgggagcccccaggcccaggcaccaggatcatgacagaaggagcccagtgctccccttcacctcttttcagagtctccacaacccctcagctgctgggggtcagggagctaaggggagtggggtctcctgagattcagagaaaggcagaggttgctccaagccacccagatggaaggccacaaagtgtgggtgccttgcttctcccatcatcagccaggggcacctgttggccagcagaaaggggcttttcggggaccaacatccccttacttcactgaggcctcccggacacgtgggcaggagggcagtgtctccagcaggtacagggcactttcctgagaaatgctgttgtgactcagatcaagcaaaccggagatgggcacctgcggcagacattccagaaggcatctgagtccgctgtcgcccagcaggtttgctgagagactgtagggggtaaggagcagtggcggggatcagaggtgcctcctcagcctgagatgctcctcagtcaccaggagcctgcatccactgtcactgctactggaccccatgtcagggtnnnnnnnnnnnnnnnnnnnnnnnnnnnnnnnnnnnnnnnnnnnnnnnnnnnnnnnnnnnnnnnnnnnnnnnnnnnnnnnnnnnnnnnnnnnnnnnnnnnnnnnnnnnnnnnnnnaattctacaccaccaagcccagtaccaccatcaccatcccttccatcaccactagaatgaccagcaactcctacgttctctgctactatcccctccccagcaccacagtaaacccatcctcttggtcctcttccatatcgggtgaccactcatagctcaggtgcctccagcaggctttcaagggttaaagaaaaaccaatttgccttcaccacgcccttggccggcatcatttgggatccacagtttttgaatgagaggaaattcaggnnnnnnnnntgtttgcaggatgcattaaacccatagatttcttcttttaatctgggaatgcaatatcaatattggaaacctcacctgaagtttcttacttcccttcattgcagcattctgtggttttatttattta

SEQ ID NO: 181930 - DNA, 1482 bp, Homo Sapiens
  misc_feature (1060)..(1105): n is a, c, g, or t
ttggataacttaagcatctccagggctgtgaaactgtatactgaatgtccttatggagataaaaaccatgaagttgagagaagttatgagttttaaatcatgtttacaggcattcttttcccaaactttcttagccagctggcttcttacctgctttgtttagattttgttatattttcttatttggaagaaaagaaccttcatttcccagcctgggtgacagcgagaccctgtctcaaaacatatatatatttaatatatacgtaaagccagagctgacaatgacactctggaacattgcataccttctgtacattctgggattacaggcgtcagccattgcgcctggccagtaccacattttcaatctcaatcatgatcataattatttcatggagactaatttataagtacatcctgatgtgtgatcagttggtgctgggattacaggcatgagccattgcacccagccagtaccacattttcagtctcaatcacgatcataattatttcatggagactaagttatgagtacatcctgatacatatcgatcagttggttctgggattacaggtgtgagccattgcacttggccagtaccacattttcaatctcaaccatgatcgtaattatttcatggagactaatttgtaagtacatcctggtgtgtgatcagttgcactgccttacgttaaggtaactcctttgacatttgaattcattttttacatctttcttcacataatgaattcattaagtagataaggcaagtagtgagtgacatttaacaagtgaagaaactgagacacagaaataagggtaatatgcctgggaaggtcatccagtcttatattagttgggtgggtccaagaccccagggcttctccctgcttcctaaggagtattttttttccctaggccagtaaagatttgttcacaccttcacagtaattggcatgtaatagacatttgatcagtagttggtatatgaaggaatagagtcctcagatgtataactcccctgaaagtgaacacaaaattgcatgtaggtgcacaatnnnnnnnnnnnnnnnnnnnnnnnnnnnnnnnnnnnnnnnnnnnnnnaattgtaagaggaatttatgatgaaaaaagtccaagaaccctgcactagtctatgctgccctagggctatctggaataattaattttcaaatattgaggcacttaagagacaaagaactaccttgtttccttggacagtaaaatgaaatgggtagaaacaaggaaggccttcttgatgaagacgtttgctgaataaaaatacttcgtattttatgtgaattgataatcatttgcatttgcctgttccaaatgcacaagttacaaaagtgaaagctagttttcttcactccagctcttctcagtgtggccttagtcctttgtaaatgtggtttctctctccagtattgctgagctattagagttttctaccgcatctt

SEQ ID NO: 181931 - DNA, 886 bp, Homo Sapiens
atcagaatatgattttaaaccaattcaggtgagcctaacgtggaataattatattttccagctaccagatctcattcctccccattcaagaacattagagatgccatacttgaccagtgatccattcagatcaacattctgcctttgaaagaggcactaaggagtagtttgttgagagacacagttaccctctcagttgtatattaccaagtagccctacttttctataattccttgtagaaggccgtcatgcaaggattcctcataaacctgcacccatgtatagtttctggtggcatcccttcttagacaatgagctccttacatttctgatttgctatgagaagtgctttctttactaaggctatgagatagagccctagagctagtagtacaggaccgggtccttgctcttgattggatatttgatctaactcccctctgctttcatctttgcaggatagagtctatattttaaaaatgtgtcctcatatggatatacctccatcccctgataattttggctgttctctggacctttcctccctttatcatatatcttgtaaataaggtcactagaaacacagataatccgatcaagacatatccatggttttgtataaagtgctgttctctgttatctccaaaagcccttcctgatgatgcccacagggcaattaggcttttggccacagcagcacattgatctctcctccccctcagcaatgcttgtttctttcctgagttctaacagtgttcaggcatatcagttgataattcttccataaatacatttccttatattatgttgaacctcacctgtcagttttctgagtattctcagccctgcttattagtaacccttctgtggttttgtgtttgtttg

SEQ ID NO: 181932 - DNA, 814 bp, Homo Sapiens
  misc_feature (123)..(176): n is a, c, g, or t
ttggggcagcataggaaagggacaggaaggttattttccagctaatcatgtggctagtgaaacactgtatcaagaactgcctcctgagataaaggagcgatcccctcctttaagccctgaggnnnnnnnnnnnnnnnnnnnnnnnnnnnnnnnnnnnnnnnnnnnnnnnnnnnnnncagctcacagagacacctccttcttccccctgcttctgcctccatgagtaactacctatatgacgtgctgctgctgagaccaaggaatgagtgagtaaaggtgtttggaagtcaaatattggtcctagttaagtaagtgtccttttcaagtaagtggtaaactttgtaatgtggacccccttctaacttaggattcatataatttgaacacaggctaagctgcctctgcatcattaaaaaggatttgggtatgccagtgataggaatacacagtagaaaagatggcagggaccatgtttaacatacctaagacaaactttctgaggatatcacagcatccatttcacatgaacagacttagcagaattggcaagacctgcacatggcaacatattattcatttttcaggataacaaaaaataattaaaagtaacattggcttaacactggtatatagttcagtatgacttctctcccctcaacctctggaataggttcaaattgatgagaatttctgattagagcccttaatgttgagttttttgaaaagttttatcaagtttcatatatacctatattgatggtaagttgctggtcttgccatgggcaaagagagaaaaatgatactgagaccttgt

SEQ ID NO: 181933 - DNA, 929 bp, Homo Sapiens
ttggcccgcagatgtgccttcaaaggcatgttctgggaaggatgtagattctgcctccggaggcttcacagtcctgtatgagcccttctcttccattgctctaatttagacccccggcaccaagcttgtctcccgcccccagtgcatttttcacctatacattttttttgctgcccttaattttctaaagatacacatctgatggtatcatcctctactcagaaactgtcagtgaactgccccttctctatagaacccttcgcctggtcctgaatgcagtcaataatttgttcttttctagtttcttctctcaccacgttcttgtactttccatcacatcaaactgctcccttccttaaacacaccatctcctgtccaccccactttcaaaatgtctcacctttcctcatgctcccctccggtttaaaatagcccttctctaagtatctacttaggttcatgtggggttttatattttgaatgtgttttcaacatgtggtggtgtttgatcctcaggtaagatgacttggttttcatttctctgaggaaactctagtatagtagggtggtgcctcctccctgggagggccgggcgccagcagccttggcactcttccttccctgccccgcccctctccgcagcacggaggtttgtagtcctcaaggccccacctagatttcaccttcttgttgaccccctctggatccatccagctgaaagaaattgtggtttcttctcttagccctcttaatttgttctgagatctgagtcagtatcatttatataaatatccttcataatgtttagcacagtgggttatccgtcagcccaagtatcctgtgatagtcaaattggctttgtcctgtgttggatatggagggatagtgaatccatgtggttatgtcctcttatgtgcggatgaaaaaaa

SEQ ID NO: 181934 - DNA, 1048 bp, Homo Sapiens
ttggcttcttaaaaccacctttgtgcccctgctttacattaggaaaaatggaaaggtgattaaacacggccgttaggagcctaaaatctaggtcagagtcccgtatgaaagaaatcagataagttgagagagggcgtgtgcaggttggaaatggtggcgtccatctctgctggggcgtcgatgccacctggctggacaggtggagcctggaaggtagggaggctcggagcatgttcagagaggcagggatgtttttgactgtgggtaacactgcatgctgggaacggaaatgagcactgtgtgcccagcagggctcagactgccatgtggggtccctggagaagaaatcacgctaacactgagtatcaaaaggatgggtggtcctgggttctgctctggcagccctgctaagggcagagtctcccggtggtcctgggtcctgctctggcgccctgctaagggcagagtctcccagcctctcaggagcttcagtccacttaggaaacttgaggtgagctgcagggagcctgtggagaaacgcttctcatttagtggggtgaggtgacacggggtggcggggacagtaagttaagtttgagaaggaagtatgtagaaagtgtatgtgaaatctgtagatttggggcctctactccattgtgaacttaaagaggcagggcgaaagcgagggtgagaattttactcaggacatgaagaaggaagtcctttgagaaaacctacccccggatcacagatgaaatgtcctcccagtagttttgggggttttgtgggtatgggttttctgtggttttcttttttaagcagttgcatattacatctcattcgatttagttatgggaatgtttaatgttctacatgaaagccactttcacttgtatgaatccagacgctctgcagtgtcccatcgtcttatgcgggatggcggggaaaggcctccctttcgaacttttgtgccccaaaaatgaaccggcttcattatctcaggatgatggggggctggaagtattggggagaaaaagaaaaaggaggg

SEQ ID NO: 181935 - DNA, 1682 bp, Homo Sapiens
  misc_feature (868)..(878): n is a, c, g, or t
ttgggaaaataatttgaaaattacacaagatttctctttcttgatcttgttgatgatgattgtgttctagctcaaaaaacagaccttcttagaatttcttattttttaaaaaagtgagtactcaacagataatactttggtactgcccgttgcagacatgggcctactaaactagaaagagcatttgaagagcaaaaggcaaaggttccatcaccatcctgtggaaatacgtgagttgttcatttcagtacacccatagtttctcaacaggtgtagcagatttgtttctaaaggacataggagtgcattttttatatgaaaccagaactggagtggtaatggcacttctgattcaattaacttacttggtgaagctgccagggaaactaaatatgatgagaagaagaggaatgactggatcaaattaatagaaatagatctttttgcaagcaacataatgattctgatcatcaaccttgaaaagtaaattagaacaagcaaattgctgttgaaaaattctttcagcactctgctgttgctactcagctagtcatagctcagccagagggaaggaaaaaatgcactcggttttgcattaacaaaggaaacattattaaagtgaatgtttacattgtgtttattgaagtgttgaaagaatatttgttgcatcttcaagcaacctgctgctctccagactgttacagtgcatgagtgataataaaaatgagtcagtcacttgtacattttagaaaataaataacttttaacatagtatttctcaactatgttacttcaaaatgtttaagtgccaaacttaatgttaccttctctgctaaagatttttgtctctaggaaatatattccattnnnnnnnnnnngaaagaaactcatttatttatttatttgggtataccttccagttacttccagatgctttatgtaactttcctcccagaagctgcaatacataagaaataataagctgaaaataatcaaaaaatgaaaacaattgtgaaattactgaaatgagtatgtaattgagtatgtaatatatgcattggagaaataccggttgattattgtgataacttttgagagctacagttattttgaactacctcgtaaagactacattgagaatgaaaaagccattgaacaatagatgtaccaatttgacctttaaaagttcaatctttattatatgcattgataaatgggaaagttagtaattaaaaatttagaaggaattttagcctttacctttctaaaatgaacaatttaaatcactcttacactttagaaattgaaatatagtatttaacagggattaaaatgttttacttggtctcttagtgttactgaatacaagtttagtattctgtaatcccttatggattggctgatttttgaagaactattttcttagatttaccaacaggacaaagttgtcggccttttcccacatttcaacctaaaaatggtatctatcacagttatcaaagattaccccttgctaaaggctcttaaagaaactgttagcctgttactttattacttaccatttctatacatgtacatttatagagcatcatatatttattttaagtctagaatcataaaaagttatgtgtttgtcaataatcaaaaatgtttaatctaaaataaagtagatgccacgcttc

SEQ ID NO: 181936 - DNA, 1047 bp, Homo Sapiens
  misc_feature (878)..(900): n is a, c, g, or t
  misc_feature (967)..(976): n is a, c, g, or t
gtgtgagccaccactcccaccccagtatctgtcttttaattgctgtttagaccagggaccaacagactttttaaataaaggaccaaatggtacatggttacaggtcatgcttgtatgtcatgcagacattcaactatgctgtaacatgaaagctgctgtacagtatgcaaatgaaccagtatgtctgtattccaagaacactttataaaaataggcatgggccagatatggctccaggactctagtttcctaaccttggcttagtgtaatatgatcactgctgtcattgaattaaaatctgttatccttctggttgttttgtattctatctgttctttgtttttccatctttttctgccttcctttgaattaatatgttttgtgattccactttatttccactattggtttattatttgtacctcttaagttttacttgttaccttaggtttacaatctgcatctttaattaacatgtctgcattcaaataatattatattacttcacatgtagtttaagagccttagaacagtgtactcccaattcttgccttccattctttgtgctgttatcatataattttatgttattttctctttaagccccactaatgtttatactttaaatgattctgtaaccaccctcactgttaagatttttctaggtttgtgacagtaagttacaagattcataaatttgcactgttttacaggtggagaattaggaatatagagacaataagaaaaaagcgttagcctgacaaagtcagagtgctagaagagagctttcaatagctacagataacatttcctctcattcttaccactcagtgtttttctttagtcattaccttaattataactcttactttataagnnnnnnnnnnnnnnnnnnnnnnncacttttattttaaaatttacatttttcttcatgcactatataataaacacgggagtcaaatattcnnnnnnnnnnctgtctgacagactgaagattgtcatccagtttttacattcttgattctggggtgtgtatttcagctttga

SEQ ID NO: 181937 - DNA, 1354 bp, Homo Sapiens
acaaaaaagttgggaattttctcaccgagtggcatactcatgccaaatattattgctctgggccatataggctggtcttcctccacactaaaatgggtgtcttgttttggtacttaaaacagtctactccaggcatccagtccttacagaccaaggaagagcatagcgatgcctgttggaattgcagatgcattctggccttctcccccgtcctgaaacattttctttgaggaaggctcttagaacattagatagtctgctgaggttgttggcccagctccatacacccagtagaacagtggaacaactcatgcttcatgctgccaagctgctgtacttcaaaggaaacagatctagcacactgctgcacccctgcttccacactccacacttcaccccgctgcttttctctgacccgcccctggccttgtaagactcacgtaagctaagtccaggatgcctgtggcctgcggcttgattcttccctttaggattcagcaagttaatggcttcctcgctatagaagtgagactttgacttgatgcctcttggtatatcaaaaagatattcatccagaaagtaccaaatgttctgaaagacccgctcttcactccagttttccctagggtgtttctggcagggcgtttttaaaaggcatctacctgagttgacgctaatacttgtcaccacctggaacgtagttatcggtcggcaggctgaacatactccagattccccagaggccacttctgtagcccagcgatgcatctgagcctctctgcgtggtttatgcttgaaaaatagataatgcttttagatggttcactgccaggccatgggccccacacatctcaggccctgtgtgagggagcacactgagatggtgcaggagtgaatgggcatggcttggcctcgctacctcggggacctgttggagttctggcagcagggtgtctgcaggtgggacggcgttctgggcagagtcagaatggtcagaatgaaacagaacagccaactcacccacaggacagcttattttgaggcaaggttttggattttggaggaagcagccagatgaggcggtgagcctccagaaggtcagcctttggagcacgtaagatactgttacagggtccagaaatcgtgttcacatgggggctttgactcttcaaacagcttttgcagatcgtaaattgcatttgcctagtcgtgtgacctcaaaagaagtcagacatatttaatccagaaatagtttcgtttgagggagggcgtgcaggtctgtaaatagcatttgctttcctggttagagattaggatgcagaaaggagttttcagtattttttttaaaacacta

SEQ ID NO: 181938 - DNA, 1139 bp, Homo Sapiens
ttggcttttcccttaatgtgagagtcattttcctgtatatttctggatctctcaggggctgggaggggggagtgaggggactacaaccatagcactccaagaacccttttgggattactccagtaatcaactacgaaagttattttctaaatgtagatatgtaaggtgttcttttaaagtaaggtactttgaaatatgtagcataaactggtactgctgttaaatgggtcgattattaaacggagcagctgtgtgagggcagctaactttgaatgcctgtctccctggctggtgtgtctccttctcatgttgagagcaccagggattgcgtggctgcatgctgaaaccgcattttcccatggtgtatgactagttcatctctttcttgagcaccattacaagaagatcaaatgaaaatgagatcaatgtggaagacaattcatagcacaaaaaaagtcatcttaaatctactctcaaacattcatcttatacatgcatcaaagtaatttactgacatcagtttgggtgagagagggagtcactttactgaaaaggcagaggcttaaggtgtatacatttgtactcacttccttattttcttaacttgtaagcagaaaacaagccctctctcttgtgaagtatcttcaaaggattggggtgcaaaaataccttgctggtaagccatcaatgttttatttaaatccctgcattcaaagttagctgcctttttgaaataaacaaacaaaaaatactactgtatgtttgaaaatgtgaatagtatttttatagcttgttaaagacatggctagttgcatttgtaaataagtataatgttgctttgattttcttttgtggacatctttatttggaacataattgtctttagggttgatttgtatataagtaattggcctgtgattgtttcttttttggttggaagttatcattttgacattacttgtgattctgtgttcagcactattgtgatgtgttcaacctctgcactcgcttacacaataggatatgccaattgtgtgtggtgtaatgttattttgatttttttccatgttattgatgaagggatcatgcacctaacacctactaacttttttaatgttaggcatattttaatatacttt

SEQ ID NO: 181939 - DNA, 2616 bp, Homo Sapiens
  misc_feature (1015)..(1099): n is a, c, g, or t
  misc_feature (1446)..(1573): n is a, c, g, or t
ttgggtagaattatgttgttaagttcataaccaaacatcatacatgatgataaaagacaagataatggtcacatttatgcagtattaactgagagggcaaatttgtgcctgagaagctattgggaatgttctctctctttgcattactaggaattacatgggaaacacatgtagacagtcttcaggctattaagatttgtccacttaatctttacttatacatgaataaaaaatgggaaaacatgataaatataataaactaatacactcaaccctgccccttgattatataatagaacaaaatcagcatgcccggcatgagcctgccagattgccaattccatcctccaccttcagaggatgccgccatccagaattttgccttactcattttactttcttcatagttcgacaccttaaatgtatattactaatagtagctttgcatttttggctgatttaaaaattgatataaatgaaataatgctgtagagatgctttttggtattaagtggatatactgttattcttaaagatgtttgaaatgaatatacctttctaaatatctttttaaaataatacattaaatgatactgctttagaattcatgaactgcatctcatgagaatatgtagagatgacgtgggcaggtaaagtaaaacttcaggttgaatatcctatgataatttaaaaatgacaaaatagtgtggtgaataatagagcttgagcactttaaggcaccatagggaccccttcaatgtaatgatgacagtgctgaggtgcagagaagttaggtaatcagcccaagccactactctaaggacagaccctatctacttttcctaatttgtcagaagactgcctatgatactactaataaaaagtcctatgaaattggtattgtcattattttacaaataaaataatcttcaatttttgtttcctctatgcatgggttacttagtattttgtaatttgaatttcaagcataattaaaaagaaatcaggtatctannnnnnnnnnnnnnnnnnnnnnnnnnnnnnnnnnnnnnnnnnnnnnnnnnnnnnnnnnnnnnnnnnnnnnnnnnnnnnnnnnnnnatcttttgttgatctctacactgattgtattctctcttttattctatgaaagttaaagattttttctgatactacatattgtcagttttttaaatactcagtttgtgctaaaagaaaacattcggcaactgatatctgctgttctgtatgtatctgtcagtccagatttgtccattatggtgtatgaatctaatagaacctcaccaatgttatacctgccttcttgaaatcattactgagatagctaatattaaaatatcctggtttgtctgtatatttaattctttactctcattatactaaatttttttaatgtaatttgaattgatggtaaaaattgtatacannnnnnnnnnnnnnnnnnnnnnnnnnnnnnnnnnnnnnnnnnnnnnnnnnnnnnnnnnnnnnnnnnnnnnnnnnnnnnnnnnnnnnnnnnnnnnnnnnnnnnnnnnnnnnnnnnnnnnnnnnnnnnnnatattaaaatttttaaaagtgtataaactgtaaagtatattttactggtgttttcttccttattcctacttgtcagatgcaaatacacatttttgtgtgtttgtgtttagtaattataagtatacatatttcattcttctatttcatatatttctatgacattatatcttagatgtgtaatttatgaactactactggattattttaatccattagaaattactattcacgcattctgtattcaattcatgtgatagctaatatatttggttttaaatgcatcttattttgtggttttcttctaggctgttttttgtgctttcttttaaaaatatataggttttaataatcttaattttcttttagtttgaaatgtatatactcattttattcattagtctaagataagaattgtaacacttctctaacctattatagaattgttaatacctttacccttctcttgaacacatcaaaggatgtcattgagtgttggtattggagtatagcatatctattattctgctcaattagaagatattgttcatgttgtatagagataataagtaattgtattgatctgcagatgcatccatctcttggattctcattccttctaccactgcagaactttcacctgtaatcactttcctttggccttaaggataacttttagggttacttttctactaaatttccaatttttgaccagatataatcttatattgtgctcttcctgaaaaatactattgttgtggatagaaatctgggttggtagttatttcttcagcaatttgaccatgtcattccactgtgtccctggcctcctgtatactggatgtgaatggatacaattatatattgtgtttatagttttcctgtgctataggaacagtattcgaatctgatgcaaaggacaacacaccctagagattgtaacagtgagatgaaccaagtgattggatggggttttgagttgctggaataatggagttacagtgtacaatgcataagcaacataataaattatatatctggtgaac

SEQ ID NO: 181940 - DNA, 884 bp, Homo Sapiens
  misc_feature (358)..(680): n is a, c, g, or t
tttataggatgttcaaagcaaaacctaaattttcatttagttcaatatatcacttttcccttttaaggacagtgttttgtgtcaaggctttaaaactctttgtttaatgtttaaatgaaaaatcttaagacttttccaaaaatactagtagagcactttggccacctaagtaagtaaccttaatttattccatctgctgggaatatacttttgatccagctattgtttcataaactagtgtgttttatattatagtacctagcacatggctacagttttcaaatgaaagctaagaaatctgcttatctgtatgcttatacatgcctgtgcatgtaggtatgttacgtatatgtgttannnnnnnnnnnnnnnnnnnnnnnnnnnnnnnnnnnnnnnnnnnnnnnnnnnnnnnnnnnnnnnnnnnnnnnnnnnnnnnnnnnnnnnnnnnnnnnnnnnnnnnnnnnnnnnnnnnnnnnnnnnnnnnnnnnnnnnnnnnnnnnnnnnnnnnnnnnnnnnnnnnnnnnnnnnnnnnnnnnnnnnnnnnnnnnnnnnnnnnnnnnnnnnnnnnnnnnnnnnnnnnnnnnnnnnnnnnnnnnnnnnnnnnnnnnnnnnnnnnnnnnnnnnnnnnnnnnnnnnnnnnnnnnnnnnnnnnnnnnnnnnnnnnnnnnnnnnnnnnnnnntgagatgtttttctacctccagatggtatggtcaaaaattaattcataaaagatttctatttaattgatttaaagaaaaataagcatttcacataaattaagtattctctcagcaatatagaaaccaacacacatgcttttcaagttcatgtgacttgggtaagaatatataatgcagatatacaacttttaaatcctacccaa

SEQ ID NO: 181941 - DNA, 936 bp, Homo Sapiens
ctttgtacaaaaaagttggcttccacagcctaagggagctgctccgggcacgtcgcggagggagtcccatttcttctgactcggcaggagcccgggacgttctggaaggagggacgagccgaggcaggaggggccgggccgacgcgggagaaggcccgttacccagcaatacgcgcgcgagacccaggcccgccgtcgggaccagcacgggccggagggaggggaagcactccggaaagtgattggaagtgtggatgagctctcagccggaaaaggggctgccgctgtccgcgggctcggcgccagggacgcgcgaggaaaccggaagtcaggcccgagggagctgggagggcgttagcgaagccaggttcggtcgtgggggtggggaagtgcaggagtggcgcgcggcgtactacatgtcccgtgagcctccgcggcgggacggggcggggccgcgggacgccaggaggcggaggcggagtggagttaggtaagagcgttaccagccgtcttgtctgttgggccgaggtcccccttcaggggcgccctctggtgcgtctttttcactcagtgtccttttggggggtccccgggccgtgtggtgcgtgctggctcggctcagtagcgctgttacaggcttacgagctgacgtggctgggaactgggaagtctgttagaagccgttcctctgtagcctctgttttctaaactacttgcaagccctcaggcgatcacttgaggcacaagctcgacgaattgcgtaggggtctgtaattattcacaaacgacaccacgacttctagcacactgctcaatttatggaatgagagacagggagaagatgccagagtactggagttgcgcccggcttccctggagttgccaccaccttggttatttctagatgatagaccgtccctagcttgttcagcccaa

SEQ ID NO: 181942 - DNA, 1090 bp, Homo Sapiens
  misc_feature (442)..(573): n is a, c, g, or t
  misc_feature (590)..(708): n is a, c, g, or t
  misc_feature (726)..(747): n is a, c, g, or t
gggataattaaaaatatcaacctcacagggttgttgagcatgaaaattatgcttagaatggtgtctagccttagtaggagctgtattagctcactagtacgattacagggatccattaagatggttaaagtcaaaaagacagacaacagcatgaggaggaggtagagaatttagaaccttcatacattgctgttgggaatgttaaatggtgtgaccatttggaaaagtctggtagctcctcaaaatgttaaatatagagttaccacatgacccagcagttccactcataggtaaacacccaagagaaataaaaacatagatccatgtacaggatccacaaaaacatgtacaggaatgttcatagcagcattaatcataacagccaaaaagtagaaacaatccaaatgtccatcaactgagaatggataagcaaaaatgtggnnnnnnnnnnnnnnnnnnnnnnnnnnnnnnnnnnnnnnnnnnnnnnnnnnnnnnnnnnnnnnnnnnnnnnnnnnnnnnnnnnnnnnnnnnnnnnnnnnnnnnnnnnnnnnnnnnnnnnnnnnnnnnnnnnnnattagctgggcatggtnnnnnnnnnnnnnnnnnnnnnnnnnnnnnnnnnnnnnnnnnnnnnnnnnnnnnnnnnnnnnnnnnnnnnnnnnnnnnnnnnnnnnnnnnnnnnnnnnnnnnnnnnnnnnnnnnnnnnnngagtgagaacctgtctcnnnnnnnnnnnnnnnnnnnnnnggtggtgtatctacacaatatcatagtattcagccataaaaatgaagttctgatccatgctacaacatggataagctttgaaaacgttatgctaaatgaaagaggccactcacaaaagaccacatattgtatgattccacttatgtgaaatgtccaccacaggcaatccatagagacagaaagcagaagagtggctctcagggcttggaggaggggagaaaatggggaagaactgctaatgggtacagggtttctttttggggtaaggaaaatattctaaaaacaggtagtggtaatggttacacaactccaaatatatttctttatcagtaaattataccca

SEQ ID NO: 181943 - DNA, 1264 bp, Homo Sapiens
  misc_feature (1115)..(1130): n is a, c, g, or t
ttggcgaaaataatgccgtcataaaggttaaatagtttacgtattgagccagtaccttgcatccaaagtggttaattatttgtttaaaatgtggcgacctgttctctcatttggttaaaaaaatattgtgggatttccctgggaaggtaaaagatgattaatattcgggagccagctgccaaggtggactcttctgttcaccttctaacttaaaagtgcacttcattcagggtgtgtattttcctctgaagtcatttattctgtggtgtcactgtgtggattagtatctttgtgctgttcggcaacttgcaaaagggtatctttccagaaaaatgtagctgaggtaaatcgaaaaggtccaggaaactaaaatgcgagggaaagagaattagatgggtagtcatggtaaaggacagcttgagtggtaacatccaattacattatgatggctagaagcaaaatgcagcacttctgcatttcaactggagcgatgacattggaaacacttataaattaagtacttccaatgtgatatattctagtactcacagtaagagttgaagtgtcatgacttgcggatatttttaaagcatgtggacatataacaagataaagagttgagacattagggtcagatattgatcctttgtggtggatttatactcaaaatatctgaaaacaaacagttggtcattcccccccaaattgttatgctattattggctggcagttgttgcagagatctagtaggtttggggtaggggtaacactaaagctaaaatgtaatcactcttgacaagagtattatgaaagtaaaaagacgtgagttacattaaactgatatgaattatgattctggaaatatgatagaaatccagatgttctctgtaaacaatgcttttactaaaggaagaaaagctgcttaattttggatcacttagtggtattggaaatgagttgagattttgatcaggtaagattaggggtagtttttgaggcagcttttggaagtaattttgacatgtgaaatttgggtcttctgaacaaattttaagttttgctacactgatgtgttaatggctgtaagtttacctctgatgctgagtatgctaaannnnnnnnnnnnnnnngactatccttttgtgaggctgcattttaattcctcatgtgaacagtctttcacaggcagttaggtttcaggtttaaaaaactcatttaccacaggtataattttgagtctgtttattttgatgggaaaaatttt

SEQ ID NO: 181944 - DNA, 1498 bp, Homo Sapiens
  misc_feature (392)..(472): n is a, c, g, or t
ttggatttggcctggattcttctgaggatgtgaagtaatggaaacagtaagactgttccagactaggggaagactagagacctaatagctggattccatgtgatcttttgttggactttgggattggaggtgagagtagagaaggcataatgcacgtttttgagacgagggaaatgtgaatatagcctgtatgcctacactcaagtctgaagacatgtaaaccatgtctatactaaccagccaaatatttgaacactaaaaggaagaattttcttaatgtggtaatggtatcatggttgtatagaatgttcctcctcttgggagatgtgtgttgaaaatagggtttgacgtctaaacctattttgttttggcaaaaaggacgtgtgtctgtnnnnnnnnnnnnnnnnnnnnnnnnnnnnnnnnnnnnnnnnnnnnnnnnnnnnnnnnnnnnnnnnnnnnnnnnnnnnnnnnngtttctgaatttggaatttctcaaaattaaaaaaatatctactgaggagcttttcgttttaactggtggggaatgggttctgggtggttttgccccttttctttttagattcaagaaatccatggtgaaaggtttggattcctatgaagaaaaggaggataaagtgatcaaggagatggcagctcagatccgtgaggtggagcagagccgacaggaggtggttcggtctgtcttagaggttggtttccctcggaggatccagaccacctcaggcagtgccagacccagaagagggctcttcagcacctagaagctggaaagggatgaacaggtaagactattagggaatctcttgttgggaatttgacatcttagaacattctgcaaccttttgcctgggaaatggaaacagatctaatctttaccaccctcatggctcaaggacctcatctggcagcctggctcatgtttttcagccaagtagcttccagcttacagcagccctcaaatttggacctgccaccagctccagagcttgactggatggagacaggaccatctctgacattcattggccatcaggtacaaaggataagcaagccagaagagggccaatggtccctcaggtctcaggacccctttctcctgattttctacctattcaagccactgctgcctccactgcaggcttttccttcttccttcactgttccctagtagtgttctcagacctcttctcaccctccaaagcgatcctattcacatgtattgacacttaggagtgccaactcctaaatcttgccctctgtagaactcatagttccaactcaacacaggacattaaatatcccacaggcatctgaaactaacccccaccactcctatatttccaatcactagatgcagatcctttccttttccatctcccatatcctgtcaacaagcggtcaattttaacctgtctgcctccattcagcctttgggcaatttctactcccccttcaatcctgcctcacaaacagaaaa

SEQ ID NO: 181945 - DNA, 685 bp, Homo Sapiens
  misc_feature (254)..(325): n is a, c, g, or t
gtgaccactgcatcaatagtggctgctggaattacagataagcttaggagagctagcctaaagacttttattactttcctccataaattaactggctctgactctgtgttgttcattatgggacagtgaggtatgatgtaatggaagggcatcaggctagaaaactacatggtcttaaggtcattggataatctcttggggcattgttttccttggtgtgtgataaagctaatataatgaggtacttgtccagnnnnnnnnnnnnnnnnnnnnnnnnnnnnnnnnnnnnnnnnnnnnnnnnnnnnnnnnnnnnnnnnnnnnnnnngcattatacacatgcaaggttaccacctttttattttcactgttgcctcatgggcaacttatgttcatggactctaaaaattttagagtccttgcatattagaaatgtaaaaatggcctggcccagcaaaggtttcagtaattcatcttgcctacaggctgtaccacagacagaacattataatctccgttctttcttattggcctacaacagtgactctggatcccccaagcaaagcatttggctggctattgcaaggctggttaataggatcttttatctattgaagacagcaaaatattgcacaagaggaaggagctgggctgcagggagagagcagcagatggaaagaagccttct

SEQ ID NO: 181946 - DNA, 1761 bp, Homo Sapiens
ttggggcatagactgtgcatgggcatcccaagatgtgtctgcttaagggttcagaaatctagaggagacaagacagcatactgggtattgtagaaggggagactttgccagcaactgagcaaagaagaggaatagtgagctaagaatcatacataaagtgaaataaatattatcactctttaaagaaagtgtgacagtattgaagaccgagtccaataaaaatatgtagcaatttagactttgtacctgtgcatttattttttagcacaattttattctcttatgtggcataatactgtaaagagtatagtatttgtctctagaatggaccattaaatgatgtgtgtaggcattttctggtttttatagagtagctttttctctgtacatatgcatgtaattcgactgaactccccagcttctgtgttcccctttgctccccaggaagtcgggtattgtcaggggatgagccagatcacagctttactcctcatgtatatgaacgaggaagatgccttctgggccctggtcaaactcttctcaggccctaaacatgccatgcatggcttttttgtccaaggttttcctaaactcttgaggtttcaagaacatcatgaaaaaatactgaacaaatttctgtccaagcttaagcaacacttggattctcaagaaatctacacaagtttttacacaatgaaatggttttttcagtgtttccttgatcgtactccctttacactaaacctcagaatatgggatatctacatctttgaaggagaacgagttcttactgctatgtcttacaccatcttaaaattacacaaaaaacatctaatgaaattgtccatggaagaacttgtagaattttttcaggagaccctggcaaaggattttttctttgaagatgattttgtgatagagcaacttcagatttctatgacagaactaaagcgggcaaagttagaccttccagaacctggtaagaattaccccaatactttatatctacgttataattaagattggaagacatggcataattaacatgggctgtttcttgcccacagcgtaagcattatacttgtgatgacataatgtggatgaatgccttaccagctcagctgctttggctttttccttattttagggaaaggcaaataaacatattaattaaatctgcctctcctaatagatgactgtactattcctgcttacatttagaagtttggttggcaaatactgttgttcaacagaagtagccatggtgctttaaacgagcataacaataagcttttttttgctttcttcatctcattttgtgaaaccgtatacaatagtaagtacagcaatagtaagtacagtaaaagccccatcttatagatgaggaaattgatactttagtgcctaagtggcttaaatatgaagccacagaaccacaaatagcattactgagactgcaggccagtttttctgactactagcccagggctctttgtagtatgctacagtatagataatatattttattcacttattgtaagacatttttcagcacctactaataggttttctgctaggtactactttgctggggatttaagaactgaagagaaagatgagaagctctcagggtgtgcactggagagctagaatatacgagaatgataacagagggtgaatggggcattactagagctagtcgcaggtaaatgggagaggagcagagaagggagtgcagaagggagggaagaaaatgaaatg

SEQ ID NO: 181947 - DNA, 1402 bp, Homo Sapiens
  misc_feature (110)..(120): n is a, c, g, or t
  misc_feature (229)..(244): n is a, c, g, or t
  misc_feature (779)..(817): n is a, c, g, or t
  misc_feature (1331)..(1343): n is a, c, g, or t
ccaactttgtacaaaaaagttggcacaaaggcaaggaaactgagcagacaagacagaacaatgtgtagaatgcatatttcctagttttcttgaaagatttcaagaaaagnnnnnnnnnnnctagtggctactttgccttaaagaggctttataagttcattcacacagctggcttctctggttttaagattctggagaggatgataacctagtaacaccgcagtgcttnnnnnnnnnnnnnnnnctaccatcaccagaaaattccaccagtttgttttccttttctctttgtgtgatgtgtatgtacttcccaactaagtaaaataaaatttcctctagtgagtgctttaggtaacctctttccatatggcagtagtgaaagaactgagccttcagttgatagttcttctctctccagcaagtcgctaaactccacatcccctcgtttttcctctggaatgagaataacaaactatcctagtttgcatttaatctaatggaaacttgagcaaagtttcaattttcttcctataaagaaactgacattttgtcaacaattgatgagcctatagatcatacagtgtataggaagtgaaattgaaacagttaaattatgtgatatttttctctaattggtaaagtacctattaaaatacagctgttcatgaggagacttaccacaattcaaagtgtagcagttgtgtattttagcattataatatttgattgaggccctgaggtgttaatatctcaatctcagagttagatgttcatgtccnnnnnnnnnnnnnnnnnnnnnnnnnnnnnnnnnnnnnnnaagttagggagcacattgagtgaagttctctgtgtagaacaataccttctgctctgcttctcccagctttcactgagggctggaaaaggacaggcctgtccagctgtactgtcccactgtgtatggggaagctcaggctctggtggaagcagggggcatggatgtcaaacaactgatgtggaaacagggagggagagatataatgaggctctctaggcatgttatttttgaccacaagttttgttcagtttgcttcagccaatccaaaccatatactagagtgttctgtagtcacaattcttatttcaaatgtaattcagcaccttacataatttttgagaggttgtcattcatcacatatttactgagtttctatgtgccaggctctgtgactggatactggagctatcaaaatgaaaaaaatagtgttaagaactcactcgctggtgttagagcacgtagatgagtggcaatccatttaaatccatttgcctggctattatttggaatgccnnnnnnnnnnnnnagtctatctactgtagcagaagaattatttctttaagggctagctgtttattttgctgg

SEQ ID NO: 181948 - DNA, 863 bp, Homo Sapiens
aactttgtacaaaaaagttggctttgaaacatctcattactaacttttaagattatttcataatcccttatacatgagccaatgaaatattttgagctctacttaagaagcatgaagtctatattataaatctaaacaacaaaagcacttgtaacttgtttagtaaattccatgccttattttccatttttgacaccgtaaagtgcattttctgtcgactgtgagcaaatttcccttttgcctttaatgaaaatagtgcattaagtagccaattgctgcagaattataaagcaaattagctaacagtgggtcacattggactaccactcaaagaaacaagatgcataacagatgatggaaggtacatgtggtgtggcttagggagagcgcacctgtgccagatgcatgccactttcagtagctgccaaatgtgcctttaattaagaacatctctaatttttttcttcagatcaagtcagcatttggggtcgggatttgggcagggaactctggggtgcaaatatctggtgaaaccaccagagaatttgtttgtcaaagtgacatgtataattttagttgagacgtgtttgtgtatatatgtgtatttgcctttgtttagtagcacggttatttgctaaaataattgtcaaaaaattgctctgtcggtcggtctttgatgtaagaacaaagtgtggtctatacatctaatatggcctttgtacctaaccatgttcataggtaatctttgtactctgtgtgcagcagtatttggtttgcatttaaagtgaaaataacggctgttatttttctggcattactaagataaactgaaaaataataaagaaaaaatgcctgacatagcc

SEQ ID NO: 181949 - DNA, 1240 bp, Homo Sapiens
  misc_feature (1170)..(1179): n is a, c, g, or t
acagtgcggtttttgctatttttcattttgactagggtataaaacttaccattttctgtagctcaaccgtgcttattcgccccgcttctttcttcatctgatccacacatttttgggctaaatttaaataagcttgcaggtgactacgcatcatggccaaccgcaaagcacacagcaggattattaaccagagtcgcagagtatcgaatgtggcttctgtcattctacagatcaaaaagttgatacggtgctctcaaagacaacaatatgctagcatgctcgttatatgttaatggtcaccatataagatataagaagtctatacttcgcaacagttagacacataaaagaatctgactctgccatagacttaactgtataatactttaacttgaataacagaactagataaatgtatcatgaaagcgtaagaagttaacaggtatctagaagaaaaaagtagagcaatacatgagatccttttctctatataccctcctccatggataaaaactggctgtgacatgaaaagacaagttggggaaagaaagaaaactgcagggattgcctgtgggactaatcaagtcaatcacccagcatcactggttacagctttgcctgatcatatacctacttggatgggatctttcaatctgctgagcttttacttgggaccactggaaaatcaaaaattctgatatatcatgaagaaatcaggtgcctgagattcctctacaacaattcatttaacttgctatgcattgaagctggctcggttctgagcaattcctcaaggttaaggttaagattccaggtgaaaatacataacggaaggacaccatttcagaaaccagaccactgatgagggctgcttaaagaatttttagaaagaagagataacttctgatgtccttttggtgtttaatgtttttaaaagaccatgggtttctgctctgatgaagaactacattgcaagtaatttgaatgtagtgactagaccacccttggcatctagtcttatatctagtacctatcaggcacttaaaatgactattgtaatgcacagactcatttgccagataaaacctggaactcagaagggtctccctgaaattcttaagaacatgacggtagaatggatgcatataaagaacaaatgagaaaagattnnnnnnnnnnccctcataactaaaactacaatataggaaaatttgaagtgtaaaattttgctcgaacccaa

SEQ ID NO: 181950 - DNA, 2025 bp, Homo Sapiens
  misc_feature (214)..(270): n is a, c, g, or t
  misc_feature (284)..(333): n is a, c, g, or t
  misc_feature (351)..(413): n is a, c, g, or t
  misc_feature (416)..(435): n is a, c, g, or t
  misc_feature (446)..(520): n is a, c, g, or t
  misc_feature (772)..(918): n is a, c, g, or t
  misc_feature (1262)..(1545): n is a, c, g, or t
ttgggtatacccatgacacaagaagaaggtaggcagctgttgtagacagattgttgaaccaggagccaagggttctggggttcttggttacctctatcagttgcctgtcttttgtgggagtaaaaatttgtgggcttaaatttctgagaggtaatgtttgggactcttcctcctgaacaagatgtgaggagcaaatgagagaatacatatcagnnnnnnnnnnnnnnnnnnnnnnnnnnnnnnnnnnnnnnnnnnnnnnnnnnnnnnnnngaggcaggttctcnnnnnnnnnnnnnnnnnnnnnnnnnnnnnnnnnnnnnnnnnnnnnnnnnnatactcctgggctcaggnnnnnnnnnnnnnnnnnnnnnnnnnnnnnnnnnnnnnnnnnnnnnnnnnnnnnnnnnnnnnnnaannnnnnnnnnnnnnnnnnnngtagagacagnnnnnnnnnnnnnnnnnnnnnnnnnnnnnnnnnnnnnnnnnnnnnnnnnnnnnnnnnnnnnnnnnnnnnnnnnnnatatccagcccattatcagtgtttttgaagcaggaaaacacttgatgatagcaagatgctgtaatactaaatgccagaggagatgacatgggtcatacacagttttagatttcagaacagtaagtgtaatggcctgggcagattaagaaaaacttggaggatgtgtgttttggactggacattagaagaagatgaatagagcttcgatgtgcagagtaaagatcttatagaatggataaaagagtgatttgnnnnnnnnnnnnnnnnnnnnnnnnnnnnnnnnnnnnnnnnnnnnnnnnnnnnnnnnnnnnnnnnnnnnnnnnnnnnnnnnnnnnnnnnnnnnnnnnnnnnnnnnnnnnnnnnnnnnnnnnnnnnnnnnnnnnnnnnnnnnnnnnnnntaattttaaaagagtgatttaaaaagtaagcatactgatacaggttcccagtcccttacccacagttctaaaatcccaaatctctgaaagccaaaacctttttcattattttgtgggaaattaattatagcatcaaaacctgaatttatgtggtactgtttagagcctttatccttcattatgtaaacattcatgaatctcacagcagatctattaatacttcattatagaatgctgcctgtctaaaacctgtaatattctgaattctatgaaacttggggcccctggaattttcagaataagggatgatgagcgtgtaagaaaacctcaattcagcgtatctnnnnnnnnnnnnnnnnnnnnnnnnnnnnnnnnnnnnnnnnnnnnnnnnnnnnnnnnnnnnnnnnnnnnnnnnnnnnnnnnnnnnnnnnnnnnnnnnnnnnnnnnnnnnnnnnnnnnnnnnnnnnnnnnnnnnnnnnnnnnnnnnnnnnnnnnnnnnnnnnnnnnnnnnnnnnnnnnnnnnnnnnnnnnnnnnnnnnnnnnnnnnnnnnnnnnnnnnnnnnnnnnnnnnnnnnnnnnnnnnnnnnnnnnnnnnnnnnnnnnnnnnnnnnnnnnnnnnnnnnnnnntcagttcatgatggatattgtggcttcagatgtgaaagaaaagatacggggctaaaattctgtattttcagagtattctggtaaccagctaatccaagcagtaatttttgaaatgtgaagtttagaatatattctaaataaaatacgtgcaacctccagtgggaacctcttattattggggaggtagtagaaaggcgctgggtgttctaaaataggctctcctggcccacggctgactgtcttccttgtgtctctacagtggacgtgactctggacccagacacggcctaccccagcctgatcctctctgataatctgcggcaagtgcggtacagttacctccaacaggacctgcctgacaaccccgagaggttcaatctgtttccctgtgtcttgggctctccatgcttcatcgcccgggagacattattgggaggtagatgtgggagataaagccaagtggaccatagtgtctgtgaa

SEQ ID NO: 181951 - DNA, 904 bp, Homo Sapiens
ttgggtcacaataatttcctcctaaaatagaaattccaaaagaaaagattatttgttcaggcaggtgcttagcaatttcacaattttcacaagcttctgttcagctcaccatttcggtggatgaatgtgtcatttacaaagaagtctgaaatgggaagctgagtttgaacaggcttagccattattcacctcaaattggaccttattatgactcaaattgaaatactaaaaggtataatacatgattgtataagtggcgtgccttaatgtgattctttagaacaaagtgctcttgagagaactctggctgaatgtcaggtactgtgtttttgtttctacaccaacaaaactgtgactaacccaattaaagcaacagccatgaataatattggccctgaccttgctgaattcaaaaacaaggttaattgatacctaccataaattctacctgagggtttttaaggaccatggcaattcctggcaaaaagctagagatgtttctaagaaacagatgacattcatttcatggtttatggtgcttgaaatttagaactgttctgagttcacgtagcaaatgaaagttttacaactgtactaatgaacaaaaaccctaagctttgttgtttggctttttctgctaattgttttgtttgtaaaactgcctatcttaattttcttcaagcataattttaaatgacttaacatttctcttatacataaggatgtcctttacccaaaatgaggagatttggaactgaaactaatatccagggacacaacattgggtatcatcaaagcccacctttaacatcaggacaaattgatcactgagataagagctgatagttccatttttattcagtctccacttctgcctgaattgcccatgttcagtccatagagc

SEQ ID NO: 181952 - DNA, 1561 bp, Homo Sapiens
  misc_feature (435)..(443): n is a, c, g, or t
  misc_feature (499)..(569): n is a, c, g, or t
ttggccctcttctgagcttcagtttcctagtcctccagatggggttcaaccttccaaccttactgggtcactgcaagccttggaacacagagtgtgtagggaagcactttgtaaactgtgtagcattatataaatgggagtattatttttatggcccattctcttcctccagtactgttaaggagtaaacaaaaaatgtatggattgcagtaatgttgcatttgggagaaattaaaatatgctcaccattagcaagctcttagaaaatgtggaggaaatttgcatggatcattttgggagctcagaactgtagggggtgcacaaggtatctggatgcaccaaatcacagtcccatccatgctgccaactagctgtcaggaagacatggatagttcctgccctttggtagtgatggaagtataggcgattacagannnnnnnnnccatctcctatgggatccacagatatccggctttaaaatccataaacttgagcccnnnnnnnnnnnnnnnnnnnnnnnnnnnnnnnnnnnnnnnnnnnnnnnnnnnnnnnnnnnnnnnnnnnnnnnaaaaaaaaagtggaagtggggattctgagaaggtggaattgaataagtaatcctactgtaaagaaaagtgataatcaatggctcttggtcacctgtgaatgccttgttattttccaagttagactcttctttaaaggatgtaaggaaaaatcccatgcccttccacttcttttttcctctcgggcacatcattattgaaattgttgaggccctagagtggagacacctgtcaggcgtgccttctgcaattttgctctgccactggactctgtcatagacttgctgcatatccttggatgatccttttaatctctccgtgccttggcttgtgtacttactattctgagagatttaaaaaaagccatctttgaaatgaaggagtctttttcaatatccatacgtggtgtggcaggactgcttcttaattgccaattgtgattcctcatgcattattaaatgactttctcttgaagaaagtgtgtctcatcagtgggctgcaacactgaagccatcctgtgaggcccctggggtgatggacagcagattagttctcaggggtgccgcaggctgtgctctgcagctggggccctctcagagggagaataggtgtcaatcagatggcaagagcagttgtcttaatagtgtcacggagagacctttttggtagctagtctcttcagggactttctcctctactgtcctggggacatgctttttacccagagatctcccttcctgcagaagtgggtttggcttcacatgtcaagtgctgagagcaaggtgatgttaagtctttccccaggaagacttggaggcagtgctgcccagtgtagccctcggatcatgggatcctgaatattcccagtcaagcacttctgggctcctcgttgatcaaatggacaagcacacatttccaaatgcgatgccatatgtctgtgtgtgtggatgtgtaggaaggtgggaggaaatgcttgaacaccttgtaaagaaca

SEQ ID NO: 181953 - DNA, 951 bp, Homo Sapiens
ttggcttcttttctggcactgtcctaccaaagagagcctcgtctgatcagccttgtcaggactaggaccccccagagctttggagcatgatgctttcagtacatctcattaggataagatttcatgacttgccatcagtccagattttcagacccttcaactcagaatctacgtctcagtgttcttagcattgctgaaaggaagagacactcaatggtttgcatcagcatctggtaagcctctggctttgtcatcataattattcttcacatctgttagctcatgtgaggcagacaatactatccccagtcttagctgaataaaatgagaactagaagagtgaggttaccctgctgataaatgctgaaactggatgaaatatttttcttgtactatcacagacagcttagatttgccacttcaactccgaatgaaatacaaaataacaatttttcacattcataaagttcctcccattccattttctcatttgatgttctcagcatgataggggatgatttttccccattttacacatgaagaaactggtgcttagagaagacaagctacttgtctagaatcacatacctagtgaaaggcaggagcccaggtatagaacccaggtctcctatatcctggattggattcccattcatgtctcaaaatgggaccctgttagtcatttttcctggaaaataggagtcagaaccctcatctgcagaaggaggtgggatatggcttaggtattatggaccctcagacttatcttttcagaaccacttctaggaaagggtttcaacaattagcctccttgatataaaggtaaatagctgtctaatcctagattttactttgagctcatagttgccaagcaattttaggtaagtattagaaagcagtcctaaaatcctaaaccatcttaacattgaagccttactgtgtgccaaacaa

SEQ ID NO: 181954 - DNA, 1166 bp, Homo Sapiens
  misc_feature (87)..(95): n is a, c, g, or t
ttggtccttggagcacatttgttcctttacccaaaagatgctgtcagggagcacagttagaagtttgcagaacagaaatctcaatannnnnnnnnattggtgctaaaaagaggtcttacattcagtcagacctgttcaataagttcatcaatatctgataacagcattattttgatgcttaaactttaaacatttatatttaccatttgccacccacaaaggtcaggtttgttatttgttgtttgataattatattaattttcttggaaagatcctcttttcaaggtactggtaaattggtgagtatttttattagtaaagcatgaaatagtatggtaataaatgataagacatgtatttgtggaaagctgtagggtattcagtttaccctggctttcctttaagcagagggcatctttttctctcctacagtcacaaaatgtgttatcattaaaaaaaatcaaattaaagccaaaagtaggtacataaaaaccacacacatgcatgcacacaaacatcactgcagcccacagcagacccagccgttgttaccatgaagtgacaccactccaggcctctcttgtctgcaggctggcaggctgtcttctctccagttgccttcgtcttgcgcctgcctttgcattccttgcgacgggctttcttgtttctgcggtttggattccagccaaggctgtttgtatctcactactgtttatgtgtttgtggttctgtgatggtgttgctttgatcctcagtttattttcttacccatgtttttcttgtttccttctcaggatgattttatcatctcatctttgaagtgttgttttccgaaattcatcgtattcctgaaatttcttcttagctgtcttagtgcagtttgtttcttggatttgtattctctggcatgctcttttcctctctctcatttttctgtagtatgcctgccctcctaccctgctatttctttacatctctctcatgcttaacatggatagctgtgtccagatcttctgtctgctcatccatgtgactcagagaggagggttctgggcaggggggccttgccggactgcatgagaggacatgagttttgctttctctgctctaatattttgcttaagccaagaatccttttcttagagatgttctatatgattcctgtc

SEQ ID NO: 181955 - DNA, 890 bp, Homo Sapiens
ttggccattctctttccaatcccagagattgatttattaggtcttggaaattctagattattccattaactattaagcagttaaacctgatacttcctacactagataatggaacttcaacattagcctattgattgcccaagaacaaacatttttttctaaatgtcaggtgttatggggaggattgatgctgacagcagaggtctagttaaaaactgatgcagaggttcaaatacgttgtgcagtaatcactagaactcaccttctaaagtgtcatgagagctctgattctgcaattagagattttttaatgtgtttttgaaattaccttgtaaaccacaaatctgtgtctctgcattgccccttattgtttcctaccacaaattctacatcaagaagaaagttttaaagttagactggatttatttgtgattttatggagcacaataaggtacattgagatagcatactaaaggaggccaaatacaggaagcatcatcttttcttattctcttactgcctggattttcccactgacctggaattgtgcacagttctacaaaggacaattgacattgttttccttttactaagtagtgggttttccttaaggtccagactgaattttgagacctgtatcaggattgccttctgtgtgactttttcttgcaggatctgacatcattacctatgggtccatatatttgtgatactttggtttcgggaacatcacttttagaatgttgacataaaatgcacccacagaatgccgtatttatcaaaagtaactttctagcaaaatctacagcagtaggcatttgggaatctgcatttgagacctctgcagtcatttggtcattccagcaatctatgtccaggttgtcaatttc

SEQ ID NO: 181956 - DNA, 933 bp, Homo Sapiens
ttggcataactgtccaccagatcaaagctatttgggtacctacactttaaagtgaggggaaataatgaagtttcttaaatcctgtgtcatggactaagatacaataaagaaaaggaatttcacaaagtaggggaaattacgtgttagttataatcattcccaagaataaactagtaaaagaaacttagatttccctaatttaatcttgactccgattttgatagtgctatataaaaaggtatttaaacccatatgcttccttttacataaaagaaagatatcaactttcctagtttgcatttacactggctaataggataataaaatgctgtgtaaatgttaaactggaagtttctctgagttatttttactttaaaatttcatgtgattatgccattttgaatatgtatattacatgtaattgtataatgttaactcgggtaggcaaaattcttggtattaaatttaggatgttttaaaaattattaagaagatattaatgtctgctttttgatagcatatattttcatgtaatgtttagtgtattaaaatcaaccattcaagatttattttattgggtgacactattgactgtgttccaaaatgcccatagtgttaggaaatgtggtgtgagttttatttgtgggctaaggataaaataatcatatgctaatataccttttattataaatgactaaaaatttggatataaaactgatgttttactacacaaattacagagagagataatataattatataattattaaataattagaaaatgcaaataagcaaaagtcacccatgttcccagttctcatctcctgaagatagttataactaacatattattttgtactcttcctgttaattagtttctagtgtactttctcctgtagctgaaattaagctgagaaaaaaggaagagatagt

SEQ ID NO: 181957 - DNA, 1729 bp, Homo Sapiens
  misc_feature (263)..(281): n is a, c, g, or t
ttggatcaacttttttatcaggtaaaattgtaaataatttagaaattatctcaaatggaatgatattctaagtatatcgtaagagaaattatgaaagaaaattgtctatgactttattttcaactttaaaataggctaccaaaggaattcattcataacagttaacatttaatacttttaagatgatgaaaagccatatagccattgaatttttcaaaatctaaatggttgcagtgactaagttgaaaagggcaacagctccnnnnnnnnnnnnnnnnnnnaataggctgtttcacttgcagtggcttttgtgttgaagatgctgagttgtttcttaagaacacattttctctctgcttaaacttacctgctttcttcagcttgctgctaaatggcctgggtttgactttttgataactcaacatttctgataaatggaataatgtatattatctctttacaacttaaatctagctcatttttttaaccatattgtaacagaacacacaaattactttgtactcttgaaaaataaatgaaaatttttctcctgggttggctttattctacaggacttgccatcaactacccaaccaaaaggacgacaggtgaatagatatcctctatagaaacttctctaaactgagcagctaatagccaatcctttattaaccctttccatcccataatgtttgcattttggaccataacatttgagcattgagagcttgtaccatttcattttaacacattacacatgactaattctctataaagaatttttcctcacatctttgtagctgtaatggttattgtaatttcaacctgataattttatattaatggttaagaattcagcctttgggggtggctgtgggcctgcctctggcatgcaaaagaattttaaaggttataaaattcttagaattctaagactaactaaaaagttattcttaaaatgctgatgaacatttttaagcaaaaattttctgaagttgaaagctttttcttaaatttgtatttgcatgtgtatttctaaaagccatttgcaatgaaaaataagaaaagaatataaattatcttagcttcacatcctgatatacctgtgttagttcaaacatgaaaagttaagtgctgcctaacactggcaagtaactttcaaattgccagcactttagaggtatagattttaaatgcaaatgcagagacttgtaattttataggctggattgctgaaaataaacagaaaaatcacacagtggttccaaagtcttcaggttggttttacagtgacttaaacattaatattcaattttaatttcaagagatagaatttttatgggatttttatcttgaaatatggtattaaaaataatcagatttagtgttaagatatgtataaattagtacctgatagaattcacccataattttgtcttaagactgtataattgatggaacattgggtatgaattaccttatcttaaagcatttaaaaaataaaataattcataaaaatgctgccatataataaacccttgaatgctaatctatttcctaagtaaactcacatatcataaaactcagagccttgaactatgcatgtcttgaagctctgtgctgatttcaagtgttacattgggggaagctagggttcaaattcatttttattctctcagagagtaaatacaaacctaaaatctaattagaaaaaaatgaagcttttttt

SEQ ID NO: 181958 - DNA, 1852 bp, Homo Sapiens
ttggggcattcctttacaaccagtgtttaaaccaccacgtaatcatcttctgcaaacaaggggtgccagtgttgcctaacagaagataatctttaataaagcaaatcctctgcttcaaaggtttttgaaataattggatccctttttgaaaaggaagatgagtttaactgtgtccaggtggagtaatagtactgctgttgcatgaatagatgatacaaagcaagtgatgaggttggtatgacttctttagtgaccttttagggtttgcttttattttcctctcttttttgtattatttctttcaaacatagtaaatatatgattttacagccaaagtggtattctgttttttctaagctttgagatacaaatattgctatttaatcacattgatgatgaattactttccatgtgaaccttctcaaaatgatttaagtacctttgattttgctcccctaaaaatggcttgtgtctaaagtgacatttttttccctatttggagggttctaatgaaagagatccaggcataaaaactcttttgcttattgaaagcaatttgattacacctatgtttcaggttatagtggggagaaaatttggtcagtgccttattatttgaagagcaattttagggcatcaagtatgacaataatcatgtgccctcttgctcctcttatttcaggagtgtgtgctatccctctctccaccagcttaatctttctcaccccaagtctaacaaagtctttacagaaacctctgtaggtgattgttgcagtcttccttggtttttgagtctttttaaacaagctcctaccctgcttctatccttttagagtaggagattaaaaataaacccaccccagtcaacctttagataagcactcttaaaaacaaatttgaagagcactcttcagccaagttcatttttattttgttgttgatgttttgagcatacatttaattgtaaggccttttggaaaagccctaaaagaataagatacaaccagaaatatttgagttttgttaaatgtactgaaatcttgtaatgaaaatccctttggccagaaatgagatttatttccatttatttttacatttaagtaacactcaaaacaaacaagtagtcacttaacctgccagttattattttcttgaaaatatacaagaaagtaaaaatatctctaatatataagttaaaggaaagttaagagactaagctagttttttcagtgaaagcaaagttggaaatattttgcttctctcagattattggaagacctagagctactggatgttaacctgaatcaagatgttcttttcacatttttttaaagggctagtatgttccagagtaggcaagtagtcattcaagccaaatgaaagagttaactggtccttgaggagtgttagcaaaatttaaattttgaccctggccatttgtactacagaagtgattatgggattaaaagaatacataattacagtgttttgggattgggctcttttttttcttaatagaaaagcagaaacttcataaataatagctgtgctttagataccagataacaaatattgtttcccctgaagatatgacctactagaactactcacatatatagtccaataattactgacttaataggtatggtaaaatagctgataataagtcagactctcaagagtttctgtaccttgattattgacaaattcattgttttacatcctactaaagaacatgtgtgtggggagggggtggggaactggttcacaacataatctgaagagatcaaacatctgtaggacaggtacccagtgatgataatatatctgaaaacacaagccatttttattc

SEQ ID NO: 181959 - DNA, 956 bp, Homo Sapiens
gtgtgagccaccatgcccggcccagaatactttttaaaagaagagcaggttagaggaaagaaaaaaattgatgctgaatgtggtgatgaaagcatgtttctaaaatgggaagcagatgcttaaagaggaaagactaatctgggattttgccccatttctctggtttttcactcctatatttaattctcacaatcgtgtcgtcacatagtgcaaaaaacaaaattcttgtaaagtccccaggagtttatgcttgggtgaaagttttagcctgagtattttcttcctctaaaaaaggtgggaaatgagacattgaggaattaacatataaatgtctgctatgggcttaagagaactggcgtatttggaatgcttcttacactaacactgtctcattgtaaaatataaaaccccttactctaactacatttttattcctctggtagtgtggtatccaggcaacatatcacttctgctatgtaattctaagaattctcatttctagagtacctgagccaaacaaatacacaacggaagctgcagctgtatcatcactagcaatttgctcatcattatttactacctttgaacctaaggtttcctgcctatgcttttgaaagcaaaaatcagtctcctttgcatgaaaaagagccttagatttttaaacatgttagttaccagaatgctaaaataccagttgattacccaaattattttggaaatctatccataatggaagtctacaacaaacacataaaacagattacactaagagctgagaaattcaaaggaactgaagattctgagagataaactgttcaagtcttagcaatgatactgcacttctctttgacaggttctgggcttaagttagaggccctactggttccaaaccatattccactgactttgcaagtaaaataaatttgattctgaaataggaaacaaaaaaggagaaa

SEQ ID NO: 181960 - DNA, 853 bp, Homo Sapiens
ttggcgctgtgcgaggccgcgggctgcgggagtgccctgctctggcctcgcttgttgctcttcggggactccatcacccagaaaatgtgatgttctgaatcgtggattttcaggttacaataccaggtgggccaaaattatccttccaagattaatcaggaaaggaaacagtttggacatcccagtagcagttacaattttctttggggccaatgacagtgcactaaaagatgagaatcccaagcagcacattcccctggaggagtacgctgcgaacctaaagagcatggtgcagtacctgaagtccgtggacatccctgagaatcgagtcattctcatcacgccgaccccactttgtgaaacagcctgggaagaacagtgcatcatacaaggttgcaaactaaatcgcctgaactctgttgttggtgaatatgccaatgcgtgtttacaagtggcccaagactgtgggactgacgtacttgacctgtggaccctgatgcaggacagccaggacttctcatcttatttatcagatggactacatttgtctccaaaggggaatgaatttttgttctcgcatctctggcctttgatagagaaaaaggtctcttctctacctttgctgcttccttactggcgggatgtagcagaagcaaaacctgaattaagtctgctgggagatggagaccattagccaatcacaggagacccaaatctgcttgttatctacagaactcaaagttgtcaatacgtagaggtacgcttttttcctcacgcttaaacctttgccactgatattaataataaaagtattagatgatttttcagggaagttgtatacttaggtccattg

SEQ ID NO: 181961 - DNA, 1450 bp, Homo Sapiens
  misc_feature (254)..(540): n is a, c, g, or t
  misc_feature (1239)..(1283): n is a, c, g, or t
ttggcttatcgaaagcatatatgacagtttttttggctccggccctgtggtgggggaggtaattattgccttcatccacataaattccttcctatacattcccctcagaccaccccagaggcaaaactgaaatggaaatccagtggcacttaaaattcaccctgccccgtttggctgcgattcccaggcttacagcactgcccttatggaatatcacattttcattttctgagattcattttataaaagtaaannnnnnnnnnnnnnnnnnnnnnnnnnnnnnnnnnnnnnnnnnnnnnnnnnnnnnnnnnnnnnnnnnnnnnnnnnnnnnnnnnnnnnnnnnnnnnnnnnnnnnnnnnnnnnnnnnnnnnnnnnnnnnnnnnnnnnnnnnnnnnnnnnnnnnnnnnnnnnnnnnnnnnnnnnnnnnnnnnnnnnnnnnnnnnnnnnnnnnnnnnnnnnnnnnnnnnnnnnnnnnnnnnnnnnnnnnnnnnnnnnnnnnnnnnnnnnnnnnnnnnnnnnnnnnnnnnnnnnnnnnnnnnncaaaagtataatttatttttgcctgatattaatcacttcttaaggcccaaatttttgtttttaagcaaaaggatagctctaagtgtgggttgcagttactggacataaatattcactaaatgagattcctttggttatggctgttcatagaattttaattctatgtcagtgttcttgttcactaagatatttcgaagtgagagaaagcattttaccaatacattcttattttttctcctttaaaataatattgaatttttcctggtacgaagacagatatttattaacttgattggaaaacacagaaattaagatcatgttgaacactgagttatctagatgatccctgagatttgaatgttcatgtcaaccgtgttgagcgctcaccagccaccaggctttaggcactggcagtgcaaggtgtctgaggcccattctcaggctgggcagaggtcacacagtgagtaaatgggtcttttcagtgcaatgtggttatgatagaggcatgccagggtgccactaacccagcaggtgtggcaggaggggcttcacagaggaaagggactttgagctcagtgttaaaggatgaggagtgagtcataagggggaaaaatggaaatgactttccaggcttcagaaacagcataaacaaacaaaggcctgagagctggagtcagtgtggtgtgtccagggatcacnnnnnnnnnnnnnnnnnnnnnnnnnnnnnnnnnnnnnnnnnnnnnatcccagaattgagctcgtcactatcagatgctgctgctctctggcctcagaggaaagcagcacacagctcaccacgaggggtttctccagaggctcctcctgcagccaatgctactattagtttatattataatagtatcagtttctttttctttggaaatcccta

SEQ ID NO: 181962 - DNA, 1162 bp, Homo Sapiens
ttgggttagtataagatccgaaatcaaaatatgcacagtactgtattctaagcaaaacctcaaaccttctcgttgtcttcaataccgctctatctccaagatgaggctgaaattttcagagagacttagctagaggcttagtatgtatgggagttcagcgcttctgctggtctcaggtgtggctgctgctgtcgagtttgaatgttagctgttgaaggtatcaattcagcagccatgagcagctccagacagacaggtgagctctgctgtttctgggtggatcatcacagatttagccgggcaggcagtaaggtgtcctcttactattcaaaaagtgtagactttcttacatattcgcaatacgttcacagtgtgtgcattttaaaataattcttaaaggagtaactgaaattttaccttgagtgaatggccttcataatatagcttgagaagtccttttgagtacctgtcagtgactcaacaacatttaataagggaaagtagacttttaacagttattatatatgtaacgaaaagcctttcctttgggattaatataagtaagaatggtagccttgtggcaagaaatgattacaaaggatatttttatttgtaattcctcagaagacaatttatgaagtcacccaaaatgttattttagctggttttggatttttccaataaattagaagaaggatttctattctaaaacatgtaaaacctgttttacatattactgatacaattaaagattatttttcatctatgtgcaatagatcacccctctttaaattgctctaagatttattttagaaaacttttcatgtgatgttatttctttgtcatcaaaatgcttgttaacactgtccagacaccatcctaaccttgccattgttaaagaagtttaggaaagactcttatattgtaaatatttagatggattctctcacttttctttgatactactgattttcagcaagtgaattatataattcaaaatgctagaaatgtctgtctcgttctataagagagcatatctctgccattcttgcatgcagtgaagcctctgcctcgtcgaaaatcattgcatctgtgactttcaaagtggaaaaaaagatgttatttttttgttgatttgtaaagagagtttaaatgtcatgtg

SEQ ID NO: 181963 - DNA, 760 bp, Homo Sapiens
ttggtatatctttagagtttatcaaatataaatcctcattgggcaggagccatgcatttacctttttgagcaagagtgtccctgttcctaaagagttcctataaaaattgaactgggtttttaatcacatatatggaactaaactagaagtatctttgctctaaattggtttaatgcttgtcatttcagttatcttttcgtcgagttaagaagtgataactttgtagccaattggaaacctctgactgtccaggtgatgcagtagcatcatttgttggacagtggcatctactggtagtctgtaaattttatagcctagtttgaaaggcattgttaatatatacctagcaaaaaggggagtagagcacaatttccagaattttataaatgaagtgaaagaatgatatgggggagagtcctttggggccaaggagagagagcacagaccggaaagtaatacaagtagtaagaagggtgtgtgagttgtttaaggactattaatctctctcttcaggtctgtgatacatgatatggaacctaagagaccatttatatgtcatgtcctgggttgtgaatatatttataaatgaagatcacgtggttcataacctttaatataaaatgacatggaagttccatacagcccagagtaatttatcattagagactagctttacatttttaatttaatttctgataaattttatttaatttctgataaagtggggacagatacatgagttttaaaaagctacagaca

SEQ ID NO: 181964 - DNA, 814 bp, Homo Sapiens
ttggctcattaccgccatggaactttcttggggtcctccgtgcccccacctctttgccaacctcactttctgtcaccctggcctattcactgtccgcctggcacgccacgatgttccacaggagcccgtgcccacgctgtggaacgagccggccgagctgccgtcgggagaaggccccgtggagagcaccagccccggccgggagcccgtggacaccggtcccccagcccccaccgtcgcgccaggacccgaggacagcaccgcgcaggagcggctggaccagggcggcgggtcgctggggcccggcgctatcgcggccatcgtgatcgccgccctgctggccacctgcgtggtgctggcgctcgtggtcgtcgcgctgagaaagttttctgcctcctgaagcgaataaaggggccgcgcccggccgcggcgcgactcggctgcactcctcacgcgcctgtatgtccgcgcgtgcgtgtccgcgcatgcaggtgtgccagagcgtgagcgcgcgcaggcgagcgctcagggcgggggtgcgcgcggggccgagggtgggtgccgtgcacgcgcgcgggtccggaggcgcgcccgaattccccgcaggggcgccggggcgtgcgtgagcgcacagcatgtccgagcccgcctgcgtgtggcgtgcacctgagcgcgcgcagggccgcgcggctcggcgtccccgtgcaccacggctggagtgcctcggagcgcgccgcatgtgcgtgcccggtgcgcgtgcgccggggccgccagggcatcggagcgggtgtgcggccagcggtcttagcccgtc

SEQ ID NO: 181965 - DNA, 954 bp, Homo Sapiens
  misc_feature (518)..(631): n is a, c, g, or t
  misc_feature (642)..(658): n is a, c, g, or t
agccagctagtaaatatttttagcttgtgagctatatggtctgtcacatgtcccaactctgtttagcttgaaagcaggcatagacaatacataaggatgtgtcccagccaagtgtggtggctcatccctataatccccaaagtgctgggattacaggcgtgggccactgcgcctggccaggattattattcttaaagccttttctcacaaatgtagtctccattgttgtcacaattataaaattccatatatgtcttttaactataaatttcatgcagagaatagtgttctgtttatctgatatcccattgcaatagtacaagggccatttaaaacatgtccacctattaatttcaggaaatgattaataggaagttaccttgcatccaacaaacatgaagacttactgtgtccatgcactgatggtcacaggtagacataactcctgtcttttctaacatttagactagtgaaaatgacaaatcaaagccaggcatggtgactcactcctgttgtcnnnnnnnnnnnnnnnnnnnnnnnnnnnnnnnnnnnnnnnnnnnnnnnnnnnnnnnnnnnnnnnnnnnnnnnnnnnnnnnnnnnnnnnnnnnnnnnnnnnnnnnnnnnnnnnnnnttttttatttnnnnnnnnnnnnnnnnngcaagtcataatccgagctctacatagataatgggtacaccaggatagggaaggatgtggttcctctctgtcctcagagctttaaactagagaagagagaataatcacaaccaacagtaaaaagctaaggattttgaaggtatattcaaaatgcatctggaactgagctcagataaagttaatttttcttggaatcattggcgaagcatcgtggagaaatattattattggagcacaatccagagctacatagatttttctgaacttggggaggcagagctacattacggtagtaa

SEQ ID NO: 181966 - DNA, 950 bp, Homo Sapiens
ctttgtacaaaaaagttggcaagaatgagtatggttgcttttgccatggttgcttttactattaataaatgtatctagcctacccaaactctgtagtaacttttgagattctcttaatttcccctcagattaaaatagagaaggttgaaggtactttttgatgaaatttttttctagtctggttagaaaacaaaagttgtgacatattcattgtgttaccgtaactagaaccttgctttgtgaactgtctttcattgggatgtatggtttctctcaatgtgaaatctggaaacttcatgtaaactacccatgccgttatttcatgtgactccattgcccttgtattccataacatgctgatgagagggatttctcacggtttctttctttgctaaattttttaaccataaagcagcttaccctttattttcccatcttggaagtaaaattgaccaaagaatgtacgttctagcctggtggaatgtgcatactttaggtttgtatgttacattgtccaaagccctttactttcttattagtaaactgaatctaatatgacacaaatgttttcacccaatctcttgcaactggtcaaattcgagaaggtgttgggccttagcagtaggccttttcagtgaaaattcattcaaagttttggtaggtggaacacttgatatttaaataggacttgaaaattttgaaaagagtatcagagacctcatttttttcctttgcaataagctgaagaaactttctttttcatgagagatggcaaaatatatgctgttgccagagtcctgtggtataagcatctgtttttattatagtatgtcaaagttagggaaatgggactggcaagtaaaaaatggaatttaatttcaatgttttatgggaactctgatttatgggaagcaaactagttcatattagcagaattattttattttttt

SEQ ID NO: 181967 - DNA, 276 bp, Homo Sapiens
ttcatatattaccaagttgggcaacatacatgaaattggggttagagtagggaagtatgggtagaataagacaggaaaaatatttgaagagataagaactgaaaacttttgcagaagctcaagacaccccaggcaaggcaagcaccaagaaaaccacacccaggcgtgtcacagccaacagttgaaaaccaaaggtgaagagaaaatattaaaagcagatagaggataacaatacattatatccagtggaaaaataagactttcagctgacttaga

SEQ ID NO: 181968 - DNA, 1616 bp, Homo Sapiens
  misc_feature (142)..(162): n is a, c, g, or t
acgtcagggctcctgcccatcaagagagccacttccctctctgcatgctttccgaggagcagcggcttctcccgttggcccaggcgtgacagacaggcacgcactcccatctggagagaggcaaggagacctaggcccaaannnnnnnnnnnnnnnnnnnnngcgcataggcctggcccatcctcagagcagagtgggcccagctgggccaggcaggagcaggccatccggggaccgctgcgaaggcagtgtcagcggctgccctcgggctgggctgcggtactcaccggccagcggcccgtgcttgtcgttcaaggcctcggacaggtgcttaactcggaaatcatgctcgtgacctggcgagatgtcggccgcacaaacacaagcagcgtttatccaggggccaggcaggccgccccttggggtacagggaagaagcccttcatctccaggagggggacgtcagatggggatggggaagggggcatcggagagggccctgagcccctcctctacctcaagccaccttgggaacagccgtttcaagcctgacttcagtgagcacccaggaccgtccttagctgctcatttccccgagcctggaggcccagggaaagcggagaaggaccaaggaggggctgaagagctgatgcttggccccaggggggttccccacctcgctgtatttggggaaagccccagtttgcctgtcctctgctgcacacactcccctttctaaagatgggaaggccgggaggcctcggccagctggggcctgccactgctggtctgagcgtgaaagggctgccccaagacaaataactttttctgagttcacacaggagacaaggacagagacagggaagggaggagggaagcctcagggagggcagagctgccatcagccagagaggaccaggccgagggctgcgaaactgtccctgtgcccgctgaagcccgagtggcatcggggacctgccgttcccaccctgctcccctcagggtttctcccgaggccctcctgggggaggctctgccctgccaagtgcgtggacacacagtggaggaggaagggacaggaggggaacacagggtgattaccttccagaggaatgaggttagagcccccctttttcccatctagaccatgctgggaatactgtttcagaaggttctgagccttacggatcgtccctgtcaccagagccacacagagaggagataagaagacctaggaaatgagtgagagaaaacagcagcggccctccacctgccccccaggccccgcacccagctccccaacagtgagcaggcctttccctgagaccaccagagacgctggggacaaggatgaaggaaaggagtcatttccttctccaaatggagccttgattctactaccgaccctccttgttctggatttcagctcatttctgaaaggacagagggtaatgaagatggaccaagatccaccaggagaagtcaaaaatatggagtggcatcataatcagaacaggcgagggctcaggtcggaggagccggtgacaaagctcgcatacccagagggcacaaccagggtgggagagcctggggggcaccctgaagccagcagccaa

SEQ ID NO: 181969 - DNA, 947 bp, Homo Sapiens
ttgggacaaccaggagatgggataggaccctaggacccctgttgtaaacttctggatcttggaaaatcaagactaggggtcagtccgatggcctttggtcttggaggggagggaaggggagtggggagaccttctgtccacacagcagggacatctttcctggccctgagggcagctttagccagagcctgttgccaccccatgggattttctactccctttttgagactaagaaagagggaactgagactgttgattttcagacacaagaaaggcttgtgttcttcccagaaagaaagggttatggggccctggaagacgcccagggtgcagccaaggcccaggggtgctgagtgctgggtgggccacaagtcacaccctctcatctttgacaaataccacctggatatagcacctgtgcagcaaagcactgtggtgaggggcaggttccatgttaggagtcgtagctttgtttttggttacgggaactcgctgggtcttctccagcctcagatttgccttcaacaaacgagggattctaatacctaccccagggttgctgggagggcccccacggtgcccgcgacccctggggaatgccaagcaggctggctcctggactcactgttccctcctactccttgcaggggttggcatctgcacatccttcctgggcatctcgtgggcactgctcgattaccaccaggccttgcacacctgcctcccctccaagcccctcctgggcctgggctcctctgtgatctacgtcctgtggaacctgctgctactgtggccccgagtcctagctgtggccctgttctcagccctcttccccagtatgtagccctgcatttcctgggcctgtggctggtactgctgctctgggtttggcttcaaggcacagacttcatgctggaccccagttccgagtatcctctatttctcct

SEQ ID NO: 181970 - DNA, 1088 bp, Homo Sapiens
  misc_feature (284)..(292): n is a, c, g, or t
ttggagcatctaggatgggaaaatttttagttatggactcaatttctttaatagatataaaactattcaaatccttctatttccaacactctgattttggcacattgagattctctatgaatttgtctattttatctaaattttcaaaattactgacataaaagtcacatagacctcttaggatttttttaaatgagttttcattcttgaaattatttatttgcacattctcactctctcttcttgatcaaactggccagatgtttgtcaatttaaggctcttnnnnnnnnngatacaacctttggatttgttaaacctcattatacatgtatttgtattttttccattggtttctagtttgttgtttataatttacctaatttactttttttgagttaaaatttgcttttctttttcaaacttcttgaaatggatacttacatgattctatttccctaatgctttatttaagcctataaatttcccttgaatcatagactcggattcagcccacccattttgatatgttacatttttaatatattaaatataaaatgtcttctcattcctattgtgattttggtttgacctattgaatcatttagtagtacattattaacttctaaaactgggaggttttagtatggcatttttgttatttattgctcgtttaattatatgtggcagaaagcatattccatattatttcagtttcttaatctttgttaaggcttcctttatggtcaagcatatggtcaaatttttaaataaaattctatagaacatgtacttgaaaaaaaattctagtctgctcttgttgggtatcagttttcaacatgcatgtatcaattagatcaagtttgttaatcatgttcttcaaacccttatgtttttactattttttggtctattcattctatttatattctttactaaaagaggagtgccaaaatctccccttatgattatggatttgtctatttctcattttagttctgaaaatattgttttatatatttcaaggctttgttactagatgatagctgtgcccagtttttgttacatatgatattgaaaaactagagtg

SEQ ID NO: 181971 - DNA, 1922 bp, Homo Sapiens
  misc_feature (1273)..(1544): n is a, c, g, or t
  misc_feature (1548)..(1566): n is a, c, g, or t
ttgggtttataatctagatacctctactttttgtttttgctgttcgacagttcacaaagaccttcagcaatttacagggtaaaatcgttgaagtagtggaggtgaaactgaaatttaaaattattctgtaaatactatagggaaagaggctgagcttagaatcttttggttgttcatgtgttctgtgctcttatcatcacacaggtcatgtgttgttactcaggattctggaagtactaagccgtagttaacaggctggatagatcttcagccaatcttctttcattatactgctgcttttctgtttcttaaaaaacaaaaatcaatgaacaacttctttagaaggaagcaccactgttcaattggttaactgaaagtatgaatcactgccgctttgcttgcccacctgtttgctttttctcacaggttttatttatctgaatgattgttgcatttgaatactgtagccatggtgagtgagcagttgaagacttcctttctgcaccttcatagttaagggttcatcttctcaagaaataaagttgtgctgggttgtttcaattctgtagatcacctagaaactaggtaacaaggcccttggatcacaatgagcacattgcaggtctttggaaatgctgggaaggggttacattcaagtaactgctgacgtccttcctctctgtcagacccatgttggcctgtaattatatttttctgaatctaaaaacaaatagaaatttctgatatcttttcagtctccttcttttctttccattcatcacttaaatctcattattgtataacgtttcaaattatgacctggattgaaggaagtctgttttgtcagggactttgttaggtgaacatcagaatctcaactacaacaaagctgaaaaatgaggcagccttaacagtaaatgcctggctaaaaccaattctttagattgtttttgccaccatttgcttacttggaatagttttcacatttatttttcttatgaagaaatccagtgtcagtcagaccatgtaacatcaaagcaaaatttcattgaagcctatccttgtcttaattattctaaaataaagtacaataaagtgaattattttgccctttgtagtagcatagtgttaagttatatatatattttaatatgcatactcctaagtaaagtttcagagaccacatgctggagagcagtggctttcagacagcatcagcatcacctgaaggccttgttgaatacacattattggaagagaggggagaacacannnnnnnnnnnnnnnnnnnnnnnnnnnnnnnnnnnnnnnnnnnnnnnnnnnnnnnnnnnnnnnnnnnnnnnnnnnnnnnnnnnnnnnnnnnnnnnnnnnnnnnnnnnnnnnnnnnnnnnnnnnnnnnnnnnnnnnnnnnnnnnnnnnnnnnnnnnnnnnnnnnnnnnnnnnnnnnnnnnnnnnnnnnnnnnnnnnnnnnnnnnnnnnnnnnnnnnnnnnnnnnnnnnnnnnnnnnnnnnnnnnnnnnnnnnnnnnnnnnnnnnnnnnnnnnngttnnnnnnnnnnnnnnnnnnncttgattgctgggggccaccctagagtttctgattcagtaggtctggcggtggggatggtgggcctggtaatttgcctttctaacaagcgtccaggtaatgccccagctgctggtcccaggaccacactttgcagattattactctgagaagagcactaactctgacgttggattccttctgttcctcattagtgaatttatttgggggagattattcaatctggtagatccgcatttacttagctgtgaagtggaggtaatgcaacctgcctgagactgtgagaatgagaaactctaattgaaataccaggcccagcgtgcctggatgcttgaaaaatgctgactcccatggtcc

SEQ ID NO: 181972 - DNA, 848 bp, Homo Sapiens
  misc_feature (491)..(524): n is a, c, g, or t
  misc_feature (526)..(536): n is a, c, g, or t
ttgggaagctgctgaacactggctgcggagggccccccgcccccatcccgcttcaggccccagtgacccagttgcgtcttaagttccatcgtccagatttcaggccaccagaggctgccaaaggtgactgaagcggtctccaagtcactctgtctcaaaaataataatcaaatcaagtattttaagtttggctcttctttttttcaagaaaggctttttggatacctagaataccttcatgtatgtggcttgatttctgtttcaggaaaaggggggcgggaggagagacaacagccgtgttccagagtctgtcctgagatgtcgctgagtccagacacttgggctgcacgtgccctgcagatgacaaaggccggcagctcagcacacgtgcaggaggggttaaagccaatattgagtttttgttcttgttgttttaatctgaacgattattctcctgtaaaaataatttgggaggggcgggtgttgttcgnnnnnnnnnnnnnnnnnnnnnnnnnnnnnnnnnnannnnnnnnnnnacagtggcgcctgtctaaagtatttttcacaacatgtttgataatcagtgctttaaaaagcagcagtgtcctatgaagtggaaatgtcagttctagagcattggatgtgaagttctggtcatgtcaccttgcgtgtctcaccctggaggagtgaaggtgggcgcccggcgggggggtgtggctgcaccccagcaccgggagggggcacgcacgacaccagagggaagggacagccccacccatgtcaacagcagggcaacctgtgttttcatttcaagtgggatacagtatttttttaataaggagccatac

SEQ ID NO: 181973 - DNA, 1102 bp, Homo Sapiens
  misc_feature (988)..(997): n is a, c, g, or t
ttggattttctaaaaatagcagtgatatttgtctgagttcaggctgctataaaaaataccacagcctggaaggcttagatgacaaacatttatttctcacagttctagaggttgggaagtccaagatcaaggtgccagcagatgcggtgtctggtgaggaccctttttcctggttgtggatggctgccttcttgctgtgtccttatgtagaggaaagagcaagaatctcctgtctctttcttttcttataaggggattaatcccatcatagggggcccacccttttggcctcatttaattctaattacttccctaaggttttacctataagttcatagcaatgtttgtatatagttttgtgtcctggttattttatttatcattaatcacatcatgagcatcttatcccatccgtactttaatgactatgtaatattcgactcaggactatactgtaacttatttaggatctttcggcctttaggttatttatagtattttgctgttgtaaaatgactttcatatagctgtcttaggcataatatttgtctgcctctaattatttccttctaggtttgtagaagtgtgattattagttaaaacatacttggcatacctccagaagccagggccacttggtagtttatgattgcaccaggttttcaggttaagtctataaataatgaagagaggaaggaacatagaactgccaactagaagtaaacaggctcgtgatctggtgacctgagcgactctgaatgcttgctgagtcctagttggccatctaggttggttcccatgtttgagagacgaggatggatgaatttaaggtaagcaatatatgccatagctatacgtgctctgtgcttactggtttgagggcttttctgtgtttttgtatgtgtgaagatgagaaaaactatcaacactacctctgttgtgtcttgtcaattaagtagtattgattattgctacttgctgttccagnnnnnnnnnnttcaattttactcttaatattccagtattaatttagcctttcagattgaaacttctttaaaagttttcaatttatgctagttaaattagatttagtgttttcttg

SEQ ID NO: 181974 - DNA, 1426 bp, Homo Sapiens
  misc_feature (1183)..(1305): n is a, c, g, or t
tacgtacgctataccaccaacctgtttatctgttcataggtgaggcactggtcagtgaggatttccaacaagggggcagcattgctgtccctccgcttgaacatctcccgcacaatgcttagcaggttccagacgccctctggctcacggcccctcagagggcgcagcagacatgcccattcagcagcggctggcggctccgtggaagacagatacatggagttcacatcactgaagaccacaggggaggggccacagaacttgtgcagtgtctttttgatgttgtcagtgagtgtcgattcatccagataccaagtactctggtccgatgctgagggccctgctgtggggtccggagctccacacactgtattgatggctgttgactgggaagacaggagttcgtccaggagacgctgagctgtggggaggatctgctgagggagctcactgatgaggtactgagcaaacttttgcagctggtccctctgtagccgggacagggactctgagactggggctcgcaggcagactgcagaagcgttgtggatgcggaagagacagagtgccacgacgtgggtgcaccatttggccccagccccacaggtacagctgcaggaagtgacccggcagcggtcaaacatcacagccacgttgtaggcccctttaggagggaccatctgaggtggcaccactgtagcactcaggtggaaccctatctgcaatgggtccttcacagcccgcatgcggaagagctgatcccctcgctgaaactcatccgcactgccattggccaggcacgaatacagccgaatgtcctcttcattctcagggaagctccaaaaagcaattcggagctgtagctgctcaggcactggtgggtaaactttctccaccacttcaaatgggatatgaaatgccacctgctttgctgacagctccaccaatgggatcaccagtccatctcgcattctggtaccgccactgccacctccgccaccgccgccagtgggggaattgggccccgctgactgtttgcgccatccccgccagttctggcagaggctctcggcctcggagatgaaggaacagagtgaatcctcctcaaaacggtccgaatcctcgaatgagaagcgctctccgtcctcccactctgcaaacatcagctccatggggcccgcannnnnnnnnnnnnnnnnnnnnnnnnnnnnnnnnnnnnnnnnnnnnnnnnnnnnnnnnnnnnnnnnnnnnnnnnnnnnnnnnnnnnnnnnnnnnnnnnnnnnnnnnnnnnnnnnnnnnnnnnnngtgccgggcgagaatctcaggcctgggaaagagacgggaccgggcctcgcccaacagcgcggtgcaagcggtgatcttggccagtctccgagacttagggccgggacgaagcgctcgccaa

SEQ ID NO: 181975 - DNA, 943 bp, Homo Sapiens
ttggctaaatgcttccaagataagaaacttcatcctaatgatttctaaagagcagttaaaagcattaaaataagtaggtaggctgttaagattaaaattaacattttggggacagaattgtgtctgtaaaaatgtcattggttttattacaagcggattattttattcatattttaaaacaaatgtttaagccacattgatttatcctcactgaggattatggtctgtgaccacagtaatatccacttatataaatgccaaataatcagagagcttataaagtacaattgtttttgtcatcattttctgaatttctttctcttcttttggttttgtcctctcattgaagttccagtggtttgaaattagttttggacacattgtcttaatgtactgaaaattgctctgctgtattttgcagcgttcttcatttaatttataatggtccatattagacacatttggtaagagaagtccaggaacacatttagggccatggaatagtattttgtaaaatccatttgggaagttgcaatacccacaatctgacatgtcctaaaatgtaagggattatctctaaggggttgatgggagaaatatttagatgtaccctgttaacagccagtcattttgatttacttatggaaatcaagtgaataaaaggcaacataatttgggaaattttattctaatatctaataaaaacagtttgagtggttgaagacatctgcatgaaattgcacctaggtgcattacttgatataactctcccctaaaactgttgtaattgcattttttcccttttcttggcacccctttagaaatgtactgaagtctcatttttcacccatttcagccatgggacatttttcataatattaatgtaaagatgtttgtgttactgtttataaattacaattgtaaataaattactagtttgccc

SEQ ID NO: 181976 - DNA, 1258 bp, Homo Sapiens
  misc_feature (215)..(224): n is a, c, g, or t
  misc_feature (278)..(288): n is a, c, g, or t
  misc_feature (1085)..(1106): n is a, c, g, or t
tgtttttctgtgataacatagcatctgtcaccttgagaacttaaaatgttaatgtgattgtagttcattttatccagcatggctttatctaagggagggcctacaaagcacagtggaagagggtgggcattagagtcagacttgggtttgattgacagaactagatacttagttattttcacactgggcaattgcctaaacctgttaagcttcannnnnnnnnncatctgtaaattggagaatatggtgtttacttcatatggctattgtaagcaatnnnnnnnnnnnggtattttaaacacctagcatagcaggtgttagtgctaaattatatattactttctcctgataaagtaaccttttaaaaagtaaagagcttatttatatagagctagtttccagtctcttgttttagagacttaaaaaacagtactggactgctgttgttgtttcactgtggcaaagaatagaagaatgaattttatttcatcatatatttgatggttcccaaatcattccttgcttcttatagccagcagaaacctacagttggattttggtgagtctaagtttgtagtaagtgagattgtttttagtgagctgtcagcgggggttgatgaaaggcagaagaccatggtcgtttttaatgaggttgtgtgaaaatccaatgaagtggtcagtgaaaattctacctcgagataaactgtgcagactggctctaacagtagattattttcttctaattataagtttgctatagcttcttttatttttgtttctgtttttgtttgaaaccagaaagtcctttgctgtttccttattatcctcgaaaatcattgcattttgtgaaaaggcggatggagaatattattgatcagtgtttgcaaaagccagcagtaagtttgaaagaaatgcatgtctttgtgtaggagcaatagtgtctacagtatgtggctcacttatgtaaatgatcttaatttttagaatgaactatgaaaatgttgatagtcaactgtttttgattaacaaaagtaacaatttcatatggttcaacctaatactccaacttaagtttcttacacacnnnnnnnnnnnnnnnnnnnnnnataaagattactgaaggtgttggcatcttgagtattttatttgttcccagaagaaattcattgtaaacagtcttagttacagagctgatgtgtctctgcttactactgaagatgtgaaatgaatggtttgttatgagaccagagggaggtgg

SEQ ID NO: 181977 - DNA, 877 bp, Homo Sapiens
ttgggtgtatatgtattttcgaggcaaattatataagttcctggtttttaatttttctccttccttcagttttaacctgctgtctcatagctccacacagaagagagttcaaatcatctgggtttgtgtatcagagatgccagaattaagctctatcattttgcatggggtatagggttgaactaggtattaaagaaagtggaaatgcaatcaggccttgctcatctgttccctttgagacttatcatcagtcacatttgttgagtgccagttacatgtaaaacaccattccagatcaacaaggcagagtcctatccttccaataattcactaatgatctgatatactaggtagaatgcagtaggcgctaaaatagagggaaatgactatcagcatgtggggagagagtgtgacaacagagacatttaaaagatatgaatttttttaatccttgagaaaggattcttatccacgtaaagcattaattttgctttcctttaactcctttattaatctgcattacaattggcatccattatattgatgaataattgcatggtcctggaatatgctggcatgaactaactactccataaaggtgtcccttaacccctggtgccactgaactgttccataagctctctaaccctaaaaggagctcactctgaatcataaatttttaaagctactatttaataaactttagattcaaatataacaaaatttgttactgtcacttttctttcttgtcccaggtaaatacttcctcggacatatttaaaataaatacctgtattttacttctttttaaaaaatgtgttaaaatctaatgtggggtagaatgtataatttaatatacttaactctaggaacaaaa

SEQ ID NO: 181978 - DNA, 525 bp, Homo Sapiens
ttggcttgtccaagtaaaactgtaccatcgtttattctctgtgttgtcaataaaacactaagtgatatctgagtttctaaatttcagttcactcatagaatgtatccttttttttcttcttgcctccaacattttattatgaaattttcaaattcatgataaaagtatatagtattcatctgtatacttacctcctagtctatatattttttacatactgtttataattgttttattattttctacccatttgtctatctgttaacccagcttaatttttgatgcatttaaaagtaggttgtagatacaaataaccatcaccctaacacccttcaatacaatgtttacagttgtttttttgacattggaatgtatctgtggtttctctatttcataggatcatagcattaacacctttacacttccccttacatctccttccatttcttctccccgtccgccaccagcttccatcatctgtattatacagaatctgtcctaaaaaattctgaagtaggccttagg

SEQ ID NO: 181979 - DNA, 909 bp, Homo Sapiens
  misc_feature (82)..(93): n is a, c, g, or t
ttggtcctaaacccagactgaggtgatgctgaaagggtgggggagggtcactgaagagctgatatctaagccaagtcttacnnnnnnnnnnnntgagagtgggagaagagaatagtatgtatatcaattgggagacgaatttggctagctccgggtttctcaatcttggcactactgacatcttaggttgaacaattctttgacactgtcttgaatactacaagatgcttggcagcatccctggcttctacccactagatgctagtagcaccctaccctagttatgacaactaaaaccaaacattgccaaatgtcccctcggggcaaaattatccccaggtgaaaccactagcctagctcaacagtttggaagatagacaggctctctgaggatgggagtgctggaggctaataagccagttaggagactgctgtggtaacatggatagaaatgagaagatgactatgagattacagaaggaacaatcgagaggaaggcacaaaatgtactggtaaacaactacatgtgggtattgagggagatgaaagggcctaactgctgggtttccaactaaggtatataactagtgctattcaccaaactggcaaagacattaaaaggaggaacatattttggggcaaagtgataagctcaatcctcatcatgagtctgaggtgctggtgggatgccaagcggagctatgtaaaaggaagatggatataaagaactgccaagtggcaagatcttggctaaataaagagatttaaatgtttcggcatgtaagtgatagtagaagccatgaatctcagttaaagtacccaagaagaagacagcagggatggcaaagatgtgacacatgttctgttatcccttccttcctacctatgcagatcccagtattcctaccc

SEQ ID NO: 181980 - DNA, 576 bp, Homo Sapiens
ttggctggtccctgtgagctgtgcttccagagcactggggcttacatgatggggaaagacagaggagagcgctgacatctcagaagaggaacagaggagaaacccaggatcttgagaaaatacggaccaagggcagcacacggggccaggaaggggaggcttctgggaaccgtggttggtgtgaaccacctgcctgccgcatggttgtgggcaagtcccttcgtctctctagatctgtttctttcaaatgagggaagtttgacaactcctcccagagttgatgtgacaatatgacaatggaggaattccaagatgtcaaaagtggaagggcccctagagaccaactgccccatttgaccaaaggggaaactgagatccaaagaggtcaaatgagttgcccaggtcccaaaacgagctctgcacaggcttgccatatttgaggcccaggcgtctacactgtgcctgaagggaggctttattcatggctcaggcgtctacactgtgcctgaatggctcctacttattggatgggggtggggggaatgttccaatggctgagttcccctcccccactcc

SEQ ID NO: 181981 - DNA, 1167 bp, Homo Sapiens
ggtctgtccctttgcagctcgcattcgccagagcggagcgcagcccttgtttccttctttcctcttcagctctgacttaaaaacacactatgttccaaatcgttgtgggatcggaaactagaactgcttgtttccaggagagaccaccttttcatattttttttaaaaggaatttgtgcttcaaaagaaactccaaaaaataaatttattgttagtctagcatatgctcattgaaattgacttatgttttattttaaaaaatcatgtaggatctggtacatggggcgggcaaaagggtatcatcagcttaagaagtaaagaagtgagccttccatttgtgtgggtgataacatctttttcctagatcgtacctcaaaattcaggctctccatgaaaacaaagataatctgaataaaaattgtgtgttgggaaatgtatcaagtgaccttcagttaagaaaagcacaggctgtttattagcacaacttgcttcattaaataattcgtggctttttctgccactggggttcttttcgttttgaattcagcttgtgtttggttcctcggtcttgtaccccttcagttcgccggcgacgtaatggtgataccctttgttttttgtatcacaccttttgtgaattgtgacaaccatcccgtaatcattgtggcctcagcagaagttttgaacaatctttgcagccactgttggggtgtgtaccagcagcctggaagtgaccagcagagctgacaaaagcaccccctgctctgcccacctccgcagagtcctgtcctcatcagaaacggtatcgcggatgctcctcaggtaggcgtaggcagacttcattgtgtgttagcagtgacagtgatgtctgtacctatctgtgagtgagacccattcatgacacactagaaatgtgtacattcttttgttttccatcacgggtataggtcttctgccatgaaagagaactatcaaggaaattcctgaaaacaagatttgtaaattcgatttgaccctcccaattcaggctgctctttgcagtggtccctggcccagcagtggccggcgtggctcctgttggctcatgccagtgttgtgctggaccctcgagtatgtgactgtcacccttgtccaagactggtttttacagtcttgatttgtcatttt

SEQ ID NO: 181982 - DNA, 1158 bp, Homo Sapiens
  misc_feature (128)..(207): n is a, c, g, or t
  misc_feature (253)..(287): n is a, c, g, or t
  misc_feature (311)..(389): n is a, c, g, or t
  misc_feature (448)..(543): n is a, c, g, or t
  misc_feature (694)..(785): n is a, c, g, or t
tgccggtttaaataaccaaatgctaaaagaactggcatagaagtaaatgggctgctgctttatttttaggctgttctttttagagagcaatgacagttatttccaagtttgtcattagaaaataatannnnnnnnnnnnnnnnnnnnnnnnnnnnnnnnnnnnnnnnnnnnnnnnnnnnnnnnnnnnnnnnnnnnnnnnnnnnnnnntattataaatttgttccttaaagtgtatttttgataagaaagcccnnnnnnnnnnnnnnnnnnnnnnnnnnnnnnnnnnncttggtagagacagagttttgccnnnnnnnnnnnnnnnnnnnnnnnnnnnnnnnnnnnnnnnnnnnnnnnnnnnnnnnnnnnnnnnnnnnnnnnnnnnnnnncctcaacctccctaagagctgagactacaggtgtgagccaccatgcctggctaattttnnnnnnnnnnnnnnnnnnnnnnnnnnnnnnnnnnnnnnnnnnnnnnnnnnnnnnnnnnnnnnnnnnnnnnnnnnnnnnnnnnnnnnnnnnnnnnnngtgtgagccactgccagaaaaacttttcctaagacaaggcaggttttacattatatttagattttttttaatgatgtcttttttggcagtgcacagccagagaacaacacatcacacacaggaaacagttgtgctcatgtgatgggggccnnnnnnnnnnnnnnnnnnnnnnnnnnnnnnnnnnnnnnnnnnnnnnnnnnnnnnnnnnnnnnnnnnnnnnnnnnnnnnnnnnnnnnnnnnnnagtgcatgctgtgtacagagggtgtcaagaatgcctcctacgtgacggaaagcagatccgtggttgcctgcagactggcaggagcagattccaaaggcacaggaagaagcttgtgggtagaatgtgttcattaccttctgtgcattataccataaaaaagctggtcacaaaaatgcaaaccaaaaacaaaggtgaaactaggataagatttctcacctgtgtgattggtaaacgtgcagatgtgccgtcatgctttgtttatgaagctgtgggatacaaggactctcatacgtcactgtggaatgcagaatattgcagcctcatggaagagatttgggcagcgtctaacaaaactacatggcatttgcccttt

SEQ ID NO: 181983 - DNA, 1315 bp, Homo Sapiens
ttggcgcaaggtggagaaccttcaaagtctgaaaagtttgacttgttggggctcaatgctgtgggcagtagggaaccacagaaggctcttaggtggagaaatgacagctggactttagcgagcaagccctatctccatgagcagcacgggtgatcctctaagcacaccaggcacgagtgtgcagggagctggtgcaaatgcctctgtgtgcgggtgagcttctgtgttgtgactctgcccacacgtgtgcttcagtgtgctgagtggctgcatgccccagatccatgctgcacgcgccgccggccagtgagggtgctgggcactgggaggtggcggggaaggaggcgtatgcgtgttgtttgtgggcatgtgtgttagcgtgtgcatgtgggccatggggcctcacagcatatgtgtgcacgcccgggcgtgtgcgtgtgtgtgtcccccacccccaggccggccccacccgtgcgtgtgaactgccatgttgatttcgtgctgtctttcagaatcactatcagtgacccctgaggagcgtcagccatgcaggaagggcccagcctcacctacgagacctgcagccccccgaccagctgaggctcccctcttagacttataagtctatggccactggcatccggctgcctgccctccctgcctcccccagggtcccttcagagggtcctgggttttctgaacacccagaggggcctccggcgctccctccagccatcccttttagtttcaccctcctggttcaagcagtgttctttctctatcaggcctggtggctgttgcatggggctccccaaggcaaggggtggccccaggccagtgggttggaagacagggtgaccagagaagagggaagcccgagggggccgagcatcagcctgaattgcgggtgccctgcctgggtgccgtgtgagaggccagcgtgtgtggggtggggagggccgccacagcccccaggcgctatctgtgaagctacggctcctccctccatcttcctcccctttcccttccagccccttttccaggaaccttgccacacccacacctgcagcctcccctccccggccctcccaccactgctgcggcgcggccggccccggccgtgtgctgcgcttgccttaccagctctctcctcgcttttctctcccgttttctctctgctttctctccaactgccagccgatcgggtcaggcaagtccatcccgtcctgagagccccaggccccccttcgacctctaaacagatccctcctcttctcggagacctccctttccaagcctgcctggacggctgttc

SEQ ID NO: 181984 - DNA, 1388 bp, Homo Sapiens
ttggctaagaaacgcagtggtctctgaagcctgcaggggcaggccagccctgcactgaacgcctgttcttgccaggtggcagaaggttgctgctcatttgagcagtacctgtcacccctcctcccactgctgcggctgttaactcatcttcaggtctcacaccttctgcacataaataagctatttttaaaagttattatttttttactctttcttttctttggagagggtaccaaaggatagctgttctgtttaagtagggacctctcatggcctacaggctttgacatctgagaatcaaactggagaacattccgaagccgttcttataagtgtctccatctctacctgggctgaaatggaatgtgcaaatgtagcccagcctggtccttgggtgttgccagttgattgatgactgggagccaaagtggcatctcctttgacctaaacgggcgatgatgaaataaaactcaacagcctttctctcatcttgcattgtgagatgcgaaatagagcgtgtctctctgcctctcattttaggctgaggccgtccaaagcggccatgccccatgtttccactagatggcgctgacacttcaggcatcaaccctcatggcctctcagccttgcaaaggcagccacttaaagtcggtgtcctgtgtggggcaccaagctgagctgcagacacccagtaggcgcgaggcaaatgcgtcccattttaagaggcttgtatttatgagctctttgcttcctccctcccactaactttaaagaattgctctccatctcctttggcaaagttcctttgccctttgtcttatttttgtgaaaccctccaaggtatttccagtccatttgcatccaatctggcatctttacggagagcggtctcatatgctattgttgttaacgtggactagtatttatgtgttgagaacactggctgtttgtcaggaaaagtgtgccaaaacaaagagtacggccggccctggaaatgcatcagcaaaacccatttcccccgtgcactcattctgagcttccttccttcatttctgtcattactgctgagaactggactgtgcccagctgacctttcccttccttgccctcatcttgctgccagggtctgcaggtttgccaccgtcccggccccagtctgaaacatgggattatttcagaattggaggtggcagcttcagaaaaaaatccttctcgtgtgttgactgctgagatccaggaactgggaaatcaacccccagtttgtagattgctctctttggaaattctgtggcccaacctcgtggctgttttctggaattccttctatcggggcagacagtgctgtgcctttcttgacttcaggatgttcccaaggatgctgctggatc

SEQ ID NO: 181985 - DNA, 1095 bp, Homo Sapiens
  misc_feature (163)..(183): n is a, c, g, or t
  misc_feature (611)..(688): n is a, c, g, or t
acaaaaaagttggcgataaactgaacttgattgtgataatactttgtttttattcattgctacttttggtatgttgatattctgcttaggactcttttaatctgtcttttcatgtgatgataataaagagaattttcaatactttaactccgtgtacactctnnnnnnnnnnnnnnnnnnnnntttctttgcattttaattctcttataattcttaaaaacactagacattttcatagtttatgcatgagactgccaatgttcaagcaattctcctacttcggccaggctagtagccagggggttctttctgtttccaagagctagctttagtgcctgtggtagatctgtttaccaggctcttttcagaaatgagtggaagatatagaggcattaaggatggttctagagaaggattttccaatcttagcattgtcaacatgttggatgggatgattctttgtgtatggtgttcccttgtacattgtaggatgcttaccagatcctgcccactagaggccaatagcacctcatcatcatagcaccccttccctcagtgataataaaaaatgtctccagacattgtttaagttaataaatgtgcccagagcnnnnnnnnnnnnnnnnnnnnnnnnnnnnnnnnnnnnnnnnnnnnnnnnnnnnnnnnnnnnnnnnnnnnnnnnnnnnnnctagaacgttcctctgtcaaaagacaaaattacaacaatttaaaatctaattggctgttattggccattctagaattggttgacatctcattctatgaaatacaatgagtgctcttcaataagctgagcagaggggggttagctttattggcagaaaagggctaaagaaaacagaaaaagaacaaaaagtgattggttgtttcagagttactttccttaaagaggtaaagcacagaggacccccttatcatcctggctcaggtaacggtggtgtcactccacatcagccctcattttacacgggaaggtagttgctaatttaacaagatttcatggccaataaaatatttatgatgcttttagtgttcaatgcatttatcttatagtgatttattataaaaatggta

SEQ ID NO: 181986 - DNA, 1035 bp, Homo Sapiens
tgtcatctgtggacaatacctggaagggcaaggggtggtgggtgtcactaaaaggaaccagccccagctacttcactgcaggctggtgccctggtgaaggtgaatcagtcagaggagtgctgactgcccatggggctgcaccatatcatggttcccactagcaatatatgagagttccagttgctccacaacctcgccaacatatgacaggtgctgcaagaggatggttatttaacgctggcccccaaggaggaaggcacagaccttcctcctcctggaacatccaagggcactggatcctctgtgtccctctgagatggggtgccactccagcaagagcaccacggtggcagctgagtcccagaagcttgaagaagagcgcgagggaagagagccaggtctggagaccggcacccaggcagcagactgcaaggatgccccgctgaaggatggaacccctgagccaaagagctgaaatgcctctctccagagtcggaccctcacctccttcctggaactgcctttggccccagaaccatgagacaatccccaccctgagaagctccgatcactgggaggagagagaaagcctccagctttgggattcaggcttcagaagtttttagcagcctttgctcattggagaggtggggaggataagtctataaggaatcctatttccccagctctcccacagagaggacaaaagaagtcttcacacgttgtggaactttcctgcaacttctggatgcagacaagcctcagagcagactgttctggctccagtgaatatcggctgccaagctgtgagcatccagggatccccgtctgcctggctttcctgaagtcagaaggcgccttggtcatactgtgtggggtgtgtggatctcagtttgctctctttctttctccttttttcaacagctggcggagtagccaacacccctgacagcaatgtgttgcacttgggctcactccacaccctatgaataattttaatatttaacttgaaatgttgttaaaaaactatggaaa

SEQ ID NO: 181987 - DNA, 1075 bp, Homo Sapiens
  misc_feature (499)..(515): n is a, c, g, or t
ttactgacagtctgagccccactccttcctcttcctcaccacctccaccttaccaacttctgacagctgtacagtgcttgcttgcacagaagagcccccttcctgagctggctctgtggccaggaaaggatgtaaccaccatccaaacagcagtctgtaaccagctatgagcatcacagtgtcaggcactgagaggcacctcaactcgctttggtttccaaggcttctcccatttagcttgttcagaaccacaggctgtgagagggactgagggccaacaaggatggtgaggtctcaggcctgcaggggagggtgctgtggataaagcttaagtgaatttgctgagaagtctttcatttgccacacatacatgatggagaatctcttgagagggaaagccgggagcaagtagagaagtgaggagggggaggctgaactttggacattacatcagcctcctgcttactctgatagctccctttcagatgcccatatttannnnnnnnnnnnnnnnnaacctaataaaacttcagtctcttcccattttcgtataggaaggagagattgtgccctccttccaaacctcccctgacctctccagagcaattcctgattaaccaagggctttgtccatctcatccagaggaacccagggtcctcgttggcccggctgggaccattccactgccccagaataccagggggccatgacagcacccactgacagtaagagctcacttcccttggctgcccttctcctgcatctcccaggcccccagagtctccccttcgatctttctccctagctctgtgtttggcctactccttctggctttcctcaacagtgttccacattcccctcaaattcccttttggtgtgctggcattgccatggtgctgctcctgcaagttctcaggaggaactgtggtgtcagggagcagaggtttggggttggggtatagtggctgggaggaggggtgcaaagtatgtctcctaacgcttaccctgcctatgtcccctccactgccaactccagcaaggaagctgccacccattaaagcagagggagacatc

SEQ ID NO: 181988 - DNA, 1510 bp, Homo Sapiens
  misc_feature (1014)..(1026): n is a, c, g, or t
  misc_feature (1424)..(1432): n is a, c, g, or t
ttggcatacatatatatcatagcaattccttgtggtttataacttgcaaatactgctatcagtttataggtaaagaaacagtgtgttaaatgacttatccagggagggtcctgtggcttcatgtttatggagttgctaggtctctgcctcatggtccagtgcctgttaagccactgtgttcattctaataggcataatgaattgttaaagaatttactaaaatctcttccaccaaactttgaaaaataatgaagccgcccccactttagaggctctgtatgaaaaaatgctgtggagacagagccctcctggctccctagctgatcctggagatgcagcaatagatgaatgggttatctctgaatttgtaagagataattcacatgaggattaagataaaatgggaagtaaaatctaacaaacacaaagatagctcccaggcactgctttgtgtagtttgacagcattgtggttgtagcagcaaaggacttaaagtgatagtttttaaaccatattctgtccctaagtaataaaaaatctaggaagttactaaaataccagatttgttctgctctgcctcatctagaatcaacgtctaactaacttaaatgaagtataataaatgagttcatatgaaaaggcttcctctatggacacttagatatattgtaactattgaagttacctgggatgtgggggtggtgggaggaggacctgcctccccaggacatctatgactaaggcctggctttagttatggagagagacgtagaagttgaattttacacccaaaattgatgtgactgaagaggaactgattgttgctaaccagctcacaagaatccagtattgagaccagttcactagaagaaacaaacatttctgccatgcagaccaaaaagttattagttggtgaatatgtattttctctttggaaggtctttaaggggagcaaaccagttttaatcaatcagattgcttggtaagtttggaatctgcaatcagttggtcttnnnnnnnnnnnnnctttattttggaaatttaaagacatacacaaaagaggaacaatataattaacctctgttaactcatcaccaacaagactcatgaccacttttatacttcatgagtgattgtatttgtatccactgttttctattattttcgagcaagtctcagacacaccatttaatctgtaaataattcagcatgtatctctaaaagacaaagacctcttaaataacagttcattagtataaaacaaattgggtaaacttttgttggtcatcaaactatattagcactggtccaatagtttaattttcattgagcctttcaagaggaccgaccagtctgctgctcaagacatcctctcctctggaatgtagagataatacatatcatgctcctttttgttaaaacgnnnnnnnnnccccttcaaacacagtccattcatttttcagtttgggttgaaacatccttttcttgatcttgagcttataataaccta

SEQ ID NO: 181989 - DNA, 1326 bp, Homo Sapiens
  misc_feature (315)..(323): n is a, c, g, or t
  misc_feature (855)..(865): n is a, c, g, or t
ttggcttttatacttcatgagtgattgtatttgtatccactgttttctattattttcgagcaagtctcagacacaccatttaatctgtaaataattcagcatgtatctctaaaagacaaagacctcttaaataacagttcattagtataaaacaaattgtgtaaacttttgttggtcatcaaactatattagcactggtccaatagtttaattttcattgagcctttcaagaggaccgaccagtctgctgctcaagacatcctctcctctggaatgtagagataatacatatcatgctcctttttgttaaaacgnnnnnnnnnccccttcaaacacagtccattcatttttcagtttgggttgaaacatccttttcttgatcttgagcttataataacctagtcatattgctcagctcagatatttttactccctctccttaggcattctggttccttaaatatagttagtgtcacagaggataaataaccaaccttatttctaaggtctgagaacacttggaccacatattggttgagctcagccaccttctgattaaagttttcagacttgtaagaactgaaaatttttatggtggaagttctctgagccctcatccattctgtttttaaaaatgcattgcagatgggctatgtgaatatgtttttaaacatctgatatgtgcatgaaacaaaaaacacttgaagttattatgtatacaattctgtgggatgggacttcatgcaggattggttttcaagtttgatttcctgagggattttttagttgtttgtgaaagaaccccaggtctacttttgaaattttgtattataattgtaatgttgcccatggttnnnnnnnnnnngtgttcagtgatctatgtctcctactactcctatttctctgtttttcctctgcaggagcttgctgctgttaacagttattcttccaagttgttttctttgtggggagatgggaggtgggaggaaatataaacatatatgtatagatctttcaaaatatatgacggtatacccgtatgttctgagtcttgctgtttttacctggtaatatttagaaacatttattttgagataaaggagagcacttttaagttgaacctgtagttttaaaaaagtacatttcaagtaagccaaagcagagaagtaaatgtatttttcattgttgtatcagaattttgaatttactattttaaaaattcaagagttttgtagctgatctatttcttcccctcagccatcccaaataggtcatttggtcaacggatttaagaatgtttagaaacacaactttggggaaaacggg

SEQ ID NO: 181990 - DNA, 524 bp, Homo Sapiens
  misc_feature (167)..(220): n is a, c, g, or t
  misc_feature (316)..(405): n is a, c, g, or t
gaattaaacccaaaatcacttccccatctggacttgatttagatgaaaagcttctggactttgagctgatgctatagtgggttgaaaattttggggtcctcagaaggggatgaggatatattgcatgagagagcaacatgaatcattgagagccagagtatagagannnnnnnnnnnnnnnnnnnnnnnnnnnnnnnnnnnnnnnnnnnnnnnnnnnnnngttgcacttacttgtataatatggcagatgggatgtgatgtcactttcaagattaggttataaatagactatggcttcaatcagagggttttctcnnnnnnnnnnnnnnnnnnnnnnnnnnnnnnnnnnnnnnnnnnnnnnnnnnnnnnnnnnnnnnnnnnnnnnnnnnnnnnnnnnnnnnnnnnatatggaagatttctaccaccccctaactaagcctttagatcagaccgcaaccccagccaacaaggtagctacaaactcttgagaagccttgagacagaggtactcaatagagccattc

SEQ ID NO: 181991 - DNA, 1746 bp, Homo Sapiens
ttggcaaagcactaatagaccaggcaacttaccacttggagtggatttgccttacttttgccctctcccattttctgttttgagttatttatcttgtaaagtctgttttcctttcccaaggaataattccttttgtctacctaacattgacttatgtcttagactgacactgttttaggcttttcactaggcacattccgaaggtaccaacaagttaataacatcacctactctccactaatagatgctatgctaagagaagtgaataatctttctttggtagaaaataggctgagatataaggtgatattgctattgacctgaaaatgtgatagaacttctggttgcctattgattattcctccatgtctgataaatgaatctgcttcctaccatttgtacttgtcttggagctggctataaagaagtatgctggtttgttatgtactcttttcaacagtatcatagcccaacttcatctcattgaattgttcacatataccagagtactctctcttgaggaacacctgcaggcagatagttagggatgaccatgaggagcataatcaacagggatagaagtacacttatacaacagcacttacatgggcggtttctctggtagcatgtcccataagaggccatatgcttataattaatgtgtaacttgttgatgcttttgagatcaggactgctccaggcacgctaaaaatgtgctaaagtatagtgggctctctaaaaagaggctatttgggagtctctgaattttgtttcagagtttagccatcagaaaggtgagtttggccatcagagttttgtcctgtgcaccataaaagtctctgaattttcgtttcctcatgtaccttaatttctaaaacggatgataaaagttaggttggacacagaaggggcaatcaaatttctgtattcagatacctcttaaaggtacactgtgccaccttgctgcctttgattgcaaatacaaagttaattttcaaaaaggaaaaacaaaacagctctttttcctaaaacacatgttgtacttcagacctaaaattctaagtcttatttgtttctcacccatgagttagatttaggtaatagtattagtagagtccttagagaatcttaagaggtcatttactccacctctttcattttaaattggggtatccaaagcctgaagaggtggcctggccaatattgaccaaggtataactaaatatgagctagcatcttcttccttcttctcgctatcccttggctttaaaagatttagtacatgaagaataatgcattagcaaaaagctcctagtttgtgtttcccctttgtgtctccctgttggctttctgagacaacctgaattttgccaacaaaatatcgcagagggatttatattaattattttttagttagatgaatattatattcttcccatccaagtgagtgatttgctaggtttgtttagggagggaaaaagcaagaataatgtgagaagaatctaaatgcgaagttgattttgtgtggaaaactgtttattagtttccatcacgattttctgtttttatttttgagctatgagagtgcatgcagatttgaaaaattaggcttgcatagtcagaggggatcttcaatttgttatatttgatacgtttacatgtatcattgttatcatatgtaaattatcatcatgtgagtcagatgtgaagtatgatttttgtcttttgttcaaatatttaaaatga

SEQ ID NO: 181992 - DNA, 943 bp, Homo Sapiens
  misc_feature (65)..(74): n is a, c, g, or t
ttggatttaatgtcggttgtacaggaaattgacttagcactttccctgtttttctattgcataannnnnnnnnnaacccaaagatattttttttgctgagcctgcccagtattcactgttcacaactttgattactggctacaagaaatattttcttgccttccccaaatcccatactccccagaatctgctggcaaagtgagccctggtacaggatttaattgtgacctcgtcttccctgacctgtgtaagcatctctgtatcctttcggttttaatatctgcactgccaaaagcagtcctcatacttgcaaaaggtctgacaaggttctctccacatacattccagtatgtaaagagaccatgaatatttcagtaagagcaagaacatgactccatcagtgtgaaatttcaaatgtgattataaatatgggagagtcctataggagggtccaccagagataaacttcacggaaaacgttccctaacctcctttaaaagaatagaggatggcagattgttccaaaaggaatggcttgggtttttaactaacaaatgttagcaagcctttcttgaattcactatgtattcaaacttctaatatgctttgtgatttttttctttcatttctttctgtctgaggtaaccaggaattgcgttcaaaatgagctcatttgtgatcaggcttaaaagttgcccaagctgaggtcgtttccccccagtcacaaagcagaatgtttttctcaagacttcataggcacttactggtccgtactatctttggaatataattagaagctttgaatccttgaaaagcaaacctgttctcttcatcaaaatgctaaccacctgtgcccgtggatcaatatcacctggatgtagtgcttgatatttttcccaactcgaagaaaaccattatggtttaaagaggaaatgcaaatggc

SEQ ID NO: 181993 - DNA, 1101 bp, Homo Sapiens
ctcccgagtagctgggagccagcgcgcccagcctaaaaaacttttcaagtcaatattactacgatttaacattagagtgtggacatgtgatttaatcgctatagctaaaatacgtcaaatatacgttgtcatgtgcttgaacatgatgctaaccctgacaggatgaaggaaagtaatattctttcagtgtagttcaggagagcatttgttttcttttctaccaattaacccatcattgcttttaaacaaccatctgaaggagcagagaggcagggtagaagacagaagggggatctatgtggtaactaaagaatgtttctgttttgttaattattgtgtgtgtgtggttttattgtttgcttaagagaatcaaaaactgaaaaaaatgagaatacaggaaatggctcttgtttatttttttgctgtgtttacagcttgttaatgctctactgtctttgtttcaagagagatttgttcactgcccagctcgttttgtgtcctgagccctatgcccagcccaccttataaatcatgcctgtttagatgtttgattttgttctgtttgctattgttatcttaaaggtgtataactctgacatgccagacatcaaattaagctcaaattaagctctcgtttaaatgtttaaacacctaatttatattctaattgatcccagccagtgatgcatgtactttaactacttctgctaaataagcatattaattttccacatcaggccatcagatcttgagaaccaacagttatctagaattccgtgtctactaatgtttcacctgcatgcagccttcattaattttgtagcaaaatataaagtgatcattatgtagtttctggattaaaaaaatttgtgtgtgaagttgctttgtaaagtgcatgtggaattaatgggacagtgtgccctttgtgttagatgttaaagcaaaagaaagggcttatagtgttagtattggagcactttgaagatagatattttcagaaaagatgtaggattttaaagttaaattttaaattttagaaaaacatatgatggtgagtggaaatactcccaatgaaattcttcatccctcacgtgtttaaca

SEQ ID NO: 181994 - DNA, 2263 bp, Homo Sapiens
  misc_feature (1246)..(1307): n is a, c, g, or t
tacaaaaaagttgggtaagactttgtacatttttgtgcatattggtatcatttggcagtagggctggaaccaaagtattactctctttacaaaattttaatttaacatgtttttaaattggaccttctttatattgtattaacagccagcattcaaaattgataaattaccaatttgaggcccaataacagtgtatttgtttttccaaaacaaatactttcttttgaatggtttcagtgagccaaccattttataaaaggcaatttttaaaaactataaatacagtattttaaactgaatgatgatatgccttccagggaaaaccttgaatttttcctttataactgacttttggattccaaagtcatttgcacattaacagagtacttaaatttacttgttcagtccataaactatgatatagcctctatacatggtaagaaaatttgaaaaattaaagatggttgcacagtatacttttataatccagcatgtaacaccacatgacaatttgttggccaaatgctggtttggagtttttttgaggaatcactttggtttttttgtcctttatatataaccttattggaagtattaattctaagcctgtctctcaagtttatttatagagaaaaagtaagtaatctgtattgccacataccttgaaaatagaatgtggtatgtttaggatgcccacggaatgaatttttccttattccaattcaaccttctgtctggttgtgccaggaaaacagatgttatatgacctatgtcatttttgccattatagtcaaatgttaaaagaagaaaaaagtctgctgaataaaaaggccttgatcaaagtttcagatggggaaaatcatacagatattttatgtgtttccaacatagattatgtggctgttggtttcttgagatgacagtgcaaaggatttgggagagagaacaaatttggggcagtagttgaaaacgttgggtcattttcctgactctagctgccaaatggccatcatatgcttttaatctttgtttcagttgtctgtcagggttgaattaagaagctactggtttattcccaattgttgatgcctttaggtatgttggaatcttttttttgcctaggaggggccagttgaaaatctgtgactcaagaggcagtgaacagaatactgttttctggggaaaaattggttggctacttgatgttaattatggcacagtaacaggaaaaggttgtgtctgtgtnnnnnnnnnnnnnnnnnnnnnnnnnnnnnnnnnnnnnnnnnnnnnnnnnnnnnnnnnnnnnnaaacttttcatgcactttactgtttctagtctcaaaatgtgatatttttaataaacaagaaattttccattatgtgaatgaaattttaaaagacaatagcctatatttgtgtctcactaatatataaagtataggtcaaatttaaattatttaattagttttaaatatacacaatttgtctcctctttcaaacctgacatcttcagctgttttattagtcttaaatgatgcatttactttggtcattttatgctaatttcttccatagtaaattaatcaggctatataaggtaatatttccccagagggtaattttagtgggacgagggtggtgggatgatgtcatatcatacatgggattgcatcagaagggttctgtaaagcctgaactcccttttaaaagtgcctagtgatagaggcgttgtttgtcatctattataattggaatgtcattgtagttcagtgaattttgatgtaaataaaatatcttttaaaaatgttaaagtaccaggataaacaaacaaaaagaaacaacccttaagatgacagattttcctcaacatgcaggtttcccttcttatatacctcaagtatccaacatctagccatgcaaattgattacctgaagcatagtactggaaagtagaatagcatgaaaaacttaattttgtggacattacctttttttgtaatcagctactgtatgttttattttagatcttttgttttgggtgggttttctgctctggaggtatatgcactaacaaaacattttcctcctttcatatacgcatgttaattagcaatgtgagcaatatttcctaccatacttcactcccaatattttttgagatgtttgtataaaatggaatttaaagttcacttatgattgtatatgaaccacagaggagcccatttattaataaaaaacttttttaatagttaaatgtagaggg

SEQ ID NO: 181995 - DNA, 1291 bp, Homo Sapiens
taaaactttaaattgttacaaagcatgtactacattttttgaaatacaactttcctttaattcagtttagcaattcccatagtcataaaagcagtatgaaaataaaaatacttaacagcttgggactttttcaacacattttaaaagctcttaaaaccttgtcaatgaaaaaattcataaattatcggttcggatagaagataatgggaataatcaacaacaagataaaatacagtatcatattactctttcccatacagtttcccctttaaaaagatgccaaaatagccaaatagtgacaacaaaacatgatcataataaatattaaaactcttgcttaatttaattgaagcaaggtaattcataaaagcacacaaacttctcacagctgtgaattttaatgtgaactagccactagagttaagtgggaataaataagtagtgctctcaaaggcctctagatttgcactgttagtatcaggacctcaaaacttcaaaaactattttaatgtcaaacaaagcattacaagctcagcaaactattttttattccctgacttcttacttgcctcttatttcaacacttttcctataaatggaccatttaaaaacagtccatttacattgctgcacataaatgctcattcgcctgacaaactaaaggtttttatttgtaataaataaaaataagttttttttaattacaaataaaactgagatgtagttggaagattacaactacatcacaacaacaaacttcttaaagagctaatattctaaactcaaacaacagtaatcatgtaagtatatctgataagagaacctagagaaataaaaactaggcagatagacaagtaagtacacaatccattagttcttgccccacactttctctaaaaactaaaatcttgggagaagtacaactgggagaatctataaaacaacatataagaaaggcagacaacaacctaccaccacctccgcaaatgaagctacaatttaattaaagtgactcaatactgccctgcccatctgctctgagtctgatcagtcataactctgcaagaaaacattttagctacttcttaaataaaaaattcacaccattagaatataccatacgtctaaactaagccataattttacatttaaatttttttcaatttatcctttaattccacagaatattttgaaatatttgcagcattaagttcaataaaccactcagcaatagggagtcagttctctcccgtgctaaaactagtagcagagaatatccaacttttttgta

SEQ ID NO: 181996 - DNA, 1377 bp, Homo Sapiens
  misc_feature (553)..(573): n is a, c, g, or t
  misc_feature (930)..(965): n is a, c, g, or t
ttggtggttcttatggagagccttgtgaggaagcagggattgttataccactgtgcagtcaagggaatcaaggcccacactggtttttggatccacccaaagccacagcttcagcctccttcatgaccccagagtttcctggcctgtttctggttgtgcctcctgtaactgcctgtgactgtttccctcgttttcatcagccaagccatctcctccctggccctccctgcccatctcttttggaagcttcttcctggatctgcaggatgttcactgtcccttgtgttccctttcagctcctccttgttgcctgactacgattagtgccctgtcttgtcagccagcattcctggccctccaggacctccagagtcatcctacaaatgacgtttatctggattgcctttctgttctttgcacagggccaactggtccactagggctcctcctctgtcactgctaaaccaaaggaagtggcctgctggttgtcccctttcttgtggctaattgctgaacctttctttgtcctactgtggctaagaactctgtctcnnnnnnnnnnnnnnnnnnnnntcactttttgatacttctgttaaaatagataataaggaaccatatcttaaagtgtggaggatctggcttggcttctgtttttgatagctctatgaaagtgacagatttgcatcatgagacttagtggaatgaattgggaaattgaagggcagcccagtggctatggattctattttctatgggactgtctacgccaggctttattttctctttgctcagataacttctgactagagtcgacggtaggattataaatggtttaaaatacgtattctcaaacctcattttcagcatataaatttttaagaatcagtgtttaaaggtacgtgaaaccatttgctagatttttgtcctagnnnnnnnnnnnnnnnnnnnnnnnnnnnnnnnnnnnnagtaagcttaagatgtccagtagtttatttgcagacagcatttttaaaaagtgaatagatgtttaactgaagttaaatacaaatttatgtctgtgtaactcttggtaagatataacaaaacctagacatctaaattttttggaaatttttattttaaaagtttgttgggaggtaaaattgtgtgactttacccttctggttaatagttttatagttaagaaagaaagtccagcgaagtttacttgatctcagttgcactccagaaatagggggattaagttccactttggttaatttcacttctaccctaaattcatagtccctgaatactttagctttacccttgggcttaccagtttttcatttgcagcgagtaaatgggggagtagcagagccctttgttaattgtaaa

SEQ ID NO: 181997 - DNA, 778 bp, Homo Sapiens
ccctttccttacttaaggttgcaaacacattgacagaggcaaaataaacacgtttcatagcagaaagaccaaaaaattgaatgtaaaccatagctctcccttgggagattacacaaatacaaggttcatctgtacttagaacaaggctcataacttcttgtagcatggacattcaacaggcacagagcaacaacattcacccaaataccagctgcaatttgtcctttaaggatgcctcacaaggatattatgtccaggtagctagtccatttatatcggggaccagttgtccttttgttgtttgtggctgtttattaaatgtagtggcacaactttgttgtgaatatgtaccatcatttgctacaatctagacagatcatcctgtctacaaaaaatcattttctacatttctaagaccattatcagtttatctgctcctgctagaaaaggacatactttttgtcaatttacattaacaaaggctctgctactccccatttactcgctgcaatgaaaactggtaagccaagggtaaagcttaagtatcagggactatgaatttagggtagaagtgaaaataaccaaagtggaactaaatcccctattcttgagtgcaactgagatcaagtaaacttcgctggactttcttcttaactataaaactattaaccagaaggtaaagtcacacaattttacctcccaacaaacttttaaaataaaaatttccaaaaaatttagatgtatgggttttgttatatcccaacttttttgtacaaag

SEQ ID NO: 181998 - DNA, 1397 bp, Homo Sapiens
ttgggaaagtctgaaacagtgtcagtattgttagtcaaaaagaacaagttcttcaaccacttgcgtagtaccccaaattatattcaagtccctgtgactccaatgcttggagaagtcattgatatgatttgattaatgttataactttgaatttcctaactttctcagcggcatagattctaagccacttccatgtgctttcagatggcatcttaatagattggtgttgaggttattttaatgtccataaacaagaaaggtctgggaacaatctgtatgatttttctttcacattttcttatctttgccactggaggttaactgtcgtccagatatgcatatgaattgtgaaatgcaaagaagcaaacatttgggggtaggggagtaagtgctgtagttcttttgttcacttattttaatactatagaagtgtatttcattttataaaaagcaagaatcataaaaaccctctgtattttgatttatgaagaatatagcttctctctgaagtatctcaagatatatcttggggaccacaatgggatcacagtgtaattgtttgctgttggtgtcatgtttggattttagcatggtttgttatgcatgtcagtggcctctgatttcagaaagagcttggcgagggcagaacacataagggaaggaaacctctgctcaagagagtggcctgggatcacagtgtcgtcattcccaatttccttgaattccttcttggcagaccttactgtaatattacacaaaactgtaatgagtggccctcctttggaggtaacagatgcctttcctaagaactcaaagttctcttttcagcgtgctgtgacttgaatatggaaatcattttaatttcttcttttctcttatggggaaatttccatgcttggtttgtcaagacaagagaattcattccttattattgaaacattaatgaactgaaacacgttgaagcaagtaaaaaatcaaaattaggttggtttatcttaaatagttaaaagccttccttagtacaaaataaattaagcattgtaaaacgaagttaattcaggtaattactcagtacagaaatctaaccgtatatatcattggtattgcaatttaagggtataattaaattctcagaaatctgcaggactcactctaatttgctttctatatttatttacaagacagggaacaaatatgtgtcaatgtgcagcttaacagaggggacttgaatggataaaattatctttaattatctagagctacccagtactgggcttgaatttaatcatagtcaaatgtttcctctggcagcataatattaccatacaccatattaccttataattgccaattacagttccttatcaaaaatgttaaattctttgcttgagcaaaaa

SEQ ID NO: 181999 - DNA, 1318 bp, Homo Sapiens
ttggcttatttatgcactacagaatgcagcatactgtattactgttgaggctgcttaataagtttaccaatgtgaaaagcagatcttgggtataagtgtatgcctgatttgagcttttaaaactgtgcagtaggtgtatggtaatgttttacaatcctatgtagcaaaataggaaattatgaatttttgttgttattgttttaaagatttaagatggattggggtagggaacagctggagccaggtataccttctagtatgtagagggaaacaatgtttagataggaaaaaggaagccgtctgtttacagttaactttatttcatggacttctacaaaatgttgtattaatcactttttctagttcaaggaatttcaattccagggtacaaaccattgatttaaaaattacgtttccattctttttagtatcagtttaaagtaaatgcttaccatcagccagttgctgtcactgggaagaaggcaacttgaagtatttactgataaaatagcctttattcccaagtgtgacttttcttcagtgtctacatattatgtcacacgttctatttgcactgctgcaatatagatcaaagatcttgtggcataggggtaggggagtgttagtatctcccttgtcccatttgttctgttactgcttcattggactgatataccctcatgaacttgcaatcacctaaatggaagtcttgaatgtgtcaccttttgcttggttatttcaaccatgctgctatatataatcaggtgtggcacagtttgtcagtttgattataggtgtgagtggatagaaatcattacactgtgctgttaacgatccttgtctgcttgctgttacctactttttacaggcatcataataaaagctagactatttctttggggggaaagagacttatttaatgtaatttaaaaaacttttccaatagaaaatgaaatattattgaaaataatatctattttttagctttcagcaattgatggtgctttgttgtggtgtctgctggaagtctactgccattatagggaaccttgcttgttagcttctctagatctctattctaaacaatctgttagtgatgataaattctgtaggagggtctattctgagccgttaacttcctgtaaggggaaaatgggtgggttaccaaaaataccattgaagcagggtggggctgtgggggtggaaggttggggtattttgtcttgagaaataaaactacgaaacacttttgtacacactgatttttttaaaaaataacccatttttaaagatgttgaattttccccccttatgggaa

SEQ ID NO: 182000 - DNA, 1378 bp, Homo Sapiens
tgtaacaaaaaagttggggtgcattttgttcccctggcccttcatctctggtaccttttgggactgggtgggaaagttattaccaaaactgtttcccaatctggctcttctggccttggcccctcaggatggaagtttgcagtgtccaacctgcaagaccatttatggggtgaagacaggcacccaacctccagggaagatggagtaccacctcatcccccactccttgcctggccacccagactgcaaaaccatccggatcatctacagcatcccccccggcattcagggaccggaacacccgaatcctgggaagagtttcagcgcccgaggcttcccacgacactgttaccttccggacagcgagaaagggagaaaagttctgaagctgctgctcgtggcctgggatcgccgcctcatttttgccattggcacctccagcaccacaggcgagtcagacaccgtcatctggaatgaggtccaccacaagacagagtttggctctaatctcactggccatggctacccagatgccaattacctggataatgtgctggctgaactggctgcccagggcatctctgaggacagcactgcccaggagaaggactgaggccagaaaagctttgaggtgggaggggccatggagactgcaggacaggaagtgaggagagtgagtcaatgtagaagaagttggtgtcctgccctcccaactttctatcctcccctcctgccctgtgtccatccctcatccctcccaaccacagtgggagccagactgaatatagcgacatcattcataaatctcatccaacacaaagggagatgggatgagggccatcctgggtctgttcccatggagtttttggtgctgggtaggcaggaatcccctccctaccccacctcccaagtaggggcatggtcagcacacctagggtatgggcagtgcttaggcactccatatcctggctttgggaagccggggtttcttgcctcagccggcttcttgctacttccactctgctttgagactggagtttctgctattctccctctgctggaggcagggagctctcactgtgcaaggttggggggtgggcaaaggggtgaatcactaaactgctgtgacatcagaaactgatgccttggtgtagagcaaggaagcacttcttcccaagagggtcggagaaggaaaagcctctgggagcacattctgctgtcatcacagtccttggcttctctgggccctcctctcctcctcacagctctcacctgtccaaagaggcatctggttctctcatgtggatggatggactctggggttcctctttgggagtggcatcccatgatgctgtttctagaccctctctgatcaaac

SEQ ID NO: 182001 - DNA, 906 bp, Homo Sapiens
tttgtacaaaaaagttggccatgattatccattgcagggtggaagttcagtattttgtcatttaaaaagattagttatataatgtctgcttccagccagtgagaaacatctagccatacctttcttatgcaatccattgagttatcaggactgtgaattaacactgtatgaataaatttctgtacaccttattgtttggccagaaggccaccaagtgtacttatatgtaatccttaaattttaaagtagctgtaatttttaaatatttctaaacttttcttaaaccactaaaattaagctcttactacttagtcaactatcctcagctgtattcgtactcaattgtcagtatggcacagattactgtattaaaatattctcctttcgtcttcatatttaccttctgaggtaattttttaacttaatgtgttactacaaagatttgcagatctttaatcaagcactatgttaatactgtaatatcagaatactatgttgcattatttaaaatgttcaaattgaatagattaaaaagtttttaaatgctattgcatcatataatttgctattcatccactatggcattgcatatcaatcagttaatacacttaatgttgcatgagtgatattttggtctgggtttcctcttaagattttagtttgtctgaattaaggaaaaatgtttttaatatacattcttattttgtcccaccccctccagaaataagctggaaatcttaactttttggggggtcttttttggtgttttaatgggcccagaactgtggtttaaatttttatgtatgtattttcttttttgtggagtataaatttaaaaactggatttgggacctaaaatactcctcagttgatgtattcatgaagtttaaaacatctttaagtttc

SEQ ID NO: 182002 - DNA, 1109 bp, Homo Sapiens
aagaagctggctaggtagccaagaaggtcaccatgtcctcaggatgcagcagccatggcgatttcctggtgatagcatattatcaacacaataaaccccaacatttgcattgcgtttcagctcattcaagcaaagctctctagtagggatattcccccataaagagcatgcacattttgattttacttgtcctctgaccttttactcatcgtaatactaaaaaacacacacgtgagtggagtttttgctaatgagatgctaattagatatgtgacatatgctaatgagatatgtgacatataaacaagcatgtacagccactgtgtatgtgcaccaagaggaccacccagaacatgcttactaataacaccactttctaactctttgtaaataattatgtaagactccgataaatggagtctctctatttccagtctttgctgtctcattcttataagcagcccatcctgaattgcttttctctcaggggtgttttgcaccgcacttttaaaatagtgtttctactttgcgataaatctatctatgctgcatcctcatttttttgcgtctcgtttaaatttttgaaactaagaaccgaggtctcacaacagccttcaggactattgtgctttgttttgttttcttaacattattttatgtgatatttcatatttacattttcaacatagccaaaactgctaaattaaaaacttaaatgatcatgcttttaaagtgatttgtcttaaaagcatgtatgtatatttttcaagtttcagctttatgtattcaaattttttaaaaattctgacacatatatctatcaaatttaatattttaaataatttgaattcacttccaaaatgatttatattcattgttatatttcattttgaccaaatttggctttccaagctaaagaaatgctctgtagtaaaataaaggctcatgtttttatcaataatattttatgtctgaggacttaagcatcaaggacagaaatctgggatgatgttgagtgaatatttaaattgataaagtagaattatcagaatcaaataagggtggatccagaaacatagtacttaataaaaccattctggtatgtttga

SEQ ID NO: 182003 - DNA, 1788 bp, Homo Sapiens
ttgggacttattctcagaagttacatactgtcacttctgtcctattctattcgttaacattatgtcactaaggcgatttctatggaaaattagttcccaccttttgaagtgagtgtcaaataatctgttaactattttaagccactacttcagtggtgaagtgtaaagatttcaaatatatgcaagtattgtgagaatttttttgataagggtagcagagagatgagaagttaattgaaattagatatacaatgaaatatttttaaagacaatatttaggcatattttgtgcttatatgaaggaaaaaaacaacatgaagaagagaaagaggacatggaggtcctcaaggaggcttggtacgggaaaggatcgatataaaaataaagaagcagtgaatgtgtctttcagcgaaatcagaggaagttagagaatggtgggtacacagtcacatagagtggaaaattttacggagggaagttggggtaatttttacagtatggtctattttccctggaaaatattaggtgagaatagcagtagagaaggagaggcaaggagaggggtcctggggatttgatgatagaggaagtaagaactataggttagcttggagagtaggacaatgaatttgctatggaagttaagtaggattgtctggcttttgtgagtgcccatttgagattcacgatcataaatataagtgaatccagtcagcacatttataagattatgactatcttagaccagatcattattaccatgtacctgaattattataatagttaccccactggtcttcctttcctcaggtttcccctactactgccacatcaatcttcttaaaacacttttctgcataaattaagctctaggtcaaaaactttgtttctccttgatcttgaaggccaagcacttagattttctccctcggcctgtcataatatggccataggctacatccccaatgatggcaaaccacaaaatattttccatggtgcattcacatgatctgttttgtattttgaaatggttattctggaggttgtatggaaacctattggaataaggcattaccagattcacagagaccagcaaggaggttgtgtctgtggcaaaatgtgttagtggtcccaaagcattagcagtaggaagagaagtgagctgatgggtatgagagatataaggaaggtaaatctcttgacttcgatgtaaggataaagtgatagggaggtatctagagtgacaaacagatttttcacttatgtgattgttagatggcggtaacagagaataggaaaggaagaaacaagatgaagagaaagagaagtccagcttaatacatatgaaatttgacatacccaagtaacatacatttgtagatgtccagtaggcaactggaatgtttaagtttgaggtctgagttctagactggggatcaaaatttgggaatcattagcaatgaaatcatagattggtttgttatcaagtattgattgtaggtatagggttagagaaattgagactatctgaatccctggaaaaaactttccggatagagtaagagattcccccagaaaggaaaataagtgacataaaggtggaaaaaataaaataataagtgttatcacagaaagtataggaaaaagcttcttaagtccactaatgtttatatttaaaaagaactaggataaagatagacaatagtgctatttgaacaataattcacaaccctatctgttagtatcatcctggagaccttctttaaaatcaagtaataactgggatta

SEQ ID NO: 182004 - DNA, 1345 bp, Homo Sapiens
  misc_feature (1108)..(1139): n is a, c, g, or t
gagctgagaaactgtatccaggatgtactcaaacacatgtagacatattgtctactgagcttcaggctgaattagtaatagcttactgccaaaaggataatatttatgaccactactaaaaatgatttcttcttgcacaattttaagaaagtatcaaaagaggcaccatgatttaaatgaaacttaaaatgatttctcacaatatctcatatgttcacatttttatacaaaaaacttgtaaaatagaaaaatgctgatctagcttttagaaaaggttttaaaagagccaaacatgagttcataagtacactggatatttactagagagaaaaaaagtgaagttaataaaattatgctggaaaataaatacattaattttgcaactgcatgcatctctagttcctttaccaaagattattagattgtaaaaaaaatttttataaaaatctaagtaaacacttgatgtatgtattgaaaactttccaaaactggaaatacattgaaatatatttatgtagttggaagaggaagtggtagcgagaggctttcacttacaatgaccattttagaattcattagaaattactgttcataattcaaatacatacgagacagtgcacctgtcttcaagcgtccagcagatacaagagcaaagaacagatttggagagccatggggcactggtattagtgcaatttttaagactgttatttatgttgtactagataacaaggactgttgaaaatggtagctttaggaagaccttttttttgaaaactcaacttggaatgaaacccctttcatagaatatgctatgggaagatgttccttttatataatgaaacaacaattaaaagcaagtggaattatacaagaggaaaaaaatagaaaccacatactgcaagcagaagtgctagaatagggtgaagagacattataataatcattatcatttgaagtggtaggtctattttaatatactctgaactatattcaataaaacaataaatacaaaattgaatgttaacgataatgttgtaatcattcaaatttttgttttccattctagcgggtatattttgaatcctgggaaaaaattagcagcccnnnnnnnnnnnnnnnnnnnnnnnnnnnnnnnnttcttctccttttccttactctccacatcatcttacagagttctactgtaaccaatctggttcttgatacccctcaattcattctggttatacccttgtgtagagttcaaaatccatatatactgttaagtaccaataaatcaagatgccaatgtgagaggttcagttcagaaacgacagttaaaaataattttgttgggtgccaa

SEQ ID NO: 182005 - DNA, 1603 bp, Homo Sapiens
  misc_feature (280)..(298): n is a, c, g, or t
ttggggcaattattaaaatacctgagtgccttgcaatttaaggtacctatttcttatttcttgaattctggagtaatttttcatgcttccttttttcacctctccaaaacaatattattagcatgtactcttggttcctcctttgaagtatctcatgcttcatttcttccatttcattcctgtagatactattctagtttgaacattttattactcatgttgggacatctacattaaccccctaactgacttgtatttcatatttagaatgtcttcaggnnnnnnnnnnnnnnnnnnnaatctacttcttgggtcataaacatactcagattaaaagcaaaaacaggccagggtgactatctaggaggcgagagatgagatggactctttttatggcttttgatttttgaggtttctgaatgtattatcattaccactaaattataagtactcaatcattagtaataaattaaagtagtatattacctttgaaatttttcatttgaaattttgactcatatttaaaaagagaaaagtcttggctctgtcaagtattatttcaaattatagcagtaattttacttaaatattctggattgcaaaagcaaattggactcctactacccattttaagcagcaatgcttatataaaactgaaacaagaagtaaatctggcatgtagtagcaaaatttgggaatatatatgtttagggaaagtccttagtgggtcagaaatatagtcttctttagagactgataaaaaaaagtaataggtaaaataaagaatgatgtgctcaatgagctacaattcaaatagaggaaatttaatgggaaatgattacattagtagcagatggactggcttcctgaatttcagtgttactagaaatcctagaacagcttaaatttgtttttcaaatttagagtctgataaaaagacagataaagagatttgtttatttgattgtgctagtgtgattcttactgtcttttggatatttcatttgtactaggctatttttatgattcccacaaatccaccaccaacattcagaaagccagaactttggtccgatgatttcaccgattttgttaaaaagtgtttggtgaagaatcctgagcagagagctactgcaacacaacttttacagcatccttttatcaagaatgccaaacctgtatcaatattaagagacctgatcacagaagctatggagatcaaagctaaaagacatgaggaacagcaacgagaattggaagaggaagaagaaaattcggatgaagatgagctggattcccacaccatggtgaagactagtgtggagagtgtgggcaccatgcgggccacaagcacgatgagtgaaggggcccagaccatgattgaacataatagcacgatgttggaatccgacttggggaccatggtgataaacagtgaggatgaggaagaagaagatggaactatgaaaagaaatgcaacctcaccacaagtacaaagaccatctttcatggactactttgataagcaagacttcaagaataagagtcacgaaaactgtaatcagaacatgcatgaacccttccctatgtccaaaacgttttt

SEQ ID NO: 182006 - DNA, 1228 bp, Homo Sapiens
  misc_feature (852)..(872): n is a, c, g, or t
ttggcttctctctgacttttttgcttaagggagtgggatgagtagtacattttgcccttgtccaggcatgtttaaggagctcctactggacaggttgcagactagcagtgagtcaacagagccctgtttgccagctctgttgccagtatagatgcagtgatgtggcggctatgtttcccagagacaacagtgggcacagctatagtgtcaccaacatggcagagatagtttcaactgtgcctgttacaggtgtggcactcgaaggaccagaagcagcggtttggaacatgggtaactgggagcagaggactggaagaaacagagctgggctccttccctgtcctgacaatgtaggagaggagttgttgtgaggccagccctgcccgtcgttgaaattctggacctaccctctagctaggtcccttcccctgctccaaagttgagaagggggccccactgcaaacttgaaattacttacctgaaggtgatgtatatacctaggctccagctgcgctcagccacacctgtcttaacattcagtttcggcactgagccagctgcagtgttgtcaggggtccccaggcccgtggtccctaaccacgatgggacatggtaatcggctgctggcacaccacctgcccagagctacaggaggtctggttctggggtggagttggtacagtttctgagtatgggaacttccctccccaagtggtgggaagttacagttaactacagcttactcaactatcacttccagaggtttagtgtttttaatatgggaaagaggagaaatctcaggtctaatcagggttctgcccatcagcttttcactgaaactttcaactgtgnnnnnnnnnnnnnnnnnnnnnccatctttcagtttctagctgtgtttgccttctccctccgcgttccctcctctttttttgcttttggtctcctttccagcttcatgtctccatgagttcagctgtacctcatctcctgttaaagcagatcatgtccactttttcttactgaccttactctaagctacagtagctgagggaggtacggtgaagacatgtagcgtttgccttattcggagcctgaggagcccagaaacccatgctgtgaatcccaaaactcagcgctcctcaagagctgtgaaaatcatgatactttgtcacaattttgcctgaaaagggtctttggcacgggctcaagagccaacctgaggtccatt

SEQ ID NO: 182007 - DNA, 1151 bp, Homo Sapiens
ttggctgagaggttggatccctggatccccaaaaggctggaagaagccagtttgttttcccagggcctgggaagcaccatgcctgggctccctaggaggacagagccctggatattggaggggagaggctggggaattggacctttgggttttgaagaagagcccaagtctggtgcttgggatcctggagacccagaggagcaggcttgggacttcaagggcttgggggcaagtttctgggaaagttaggaagtggtagtatctctgggcccccgagaggggtaaaggctggacgattaaactcttggttttccagaggctctaatgcaattgtctaagtcgctgctgggtgtcggactgggttaaaaggtttgagggttaaaaggataagattgaagcttgagacctggactcctaggtccctgggggaggaaagaacattccaagtcatggttctaccaagcagtgggggctcagactctgggtcctgggggagggaaggaggtagatggactagaactctagggtccttgagcaaatagagggcagactggagggaagcaacgtgggaggagacgaaaacaaagcagtgaggctggaggagacaaaggggggtctgggtgagggcccgagcagagggtctcagcagggacagcgtgctgggagctgccggccccacacagggggtgccgcggccctgaagaccccccctctcccctgcacagtcaccgagacttggagccagaatctgagcctcagctggagtcagagacagcaggaaaatgggtcctgtgtaattatgacttccaggcccgcaacagcagtgagctgtcggtcaagcagcgggacgtactggaggtcctggatgacagtcgtaagtggtggaaggttcgggacccagcggggcaggagggatatgtgccctacaacatcctgacaccctaccccggaccccggctgcaccacagccaaagccctgcccgcagcctgaacagcactcctcctcaccaccagccccagccccggccccacctccagctctggctcggccccgctgggacaggccccgctgggacagctgcgatagcctcaacggcttggaccccagcgagaaggagaaattctcccagatgctcatcgtcaacgaggaa

SEQ ID NO: 182008 - DNA, 1162 bp, Homo Sapiens
  misc_feature (288)..(306): n is a, c, g, or t
  misc_feature (793)..(855): n is a, c, g, or t
  misc_feature (887)..(1077): n is a, c, g, or t
ttggctttaggatcatactggtaaagccatgttttgtctcctgttaaaattcttcaagaaattgctacaggatcttgatcctacttgttaaaatttccattgaaagctcagctcttgtctgcagctgatctgggcacaacagttttggtacccattgagtggaaagtttgctcaactttaatttttcagtcagaatagtgtaagctaagccaatttagatatctatggtgttgactattgtttgtgctgttaattcttgttcttcttcaattaaggcatggacataannnnnnnnnnnnnnnnnnncaaacgatgtggaaggcttgctgctatgtgcttcatcttcagcatcatctcatcccttcttaaaatgagttatctgtttgcaaactgctgatttcttttggagaatcatccccataaacttctcataaagcatcaatgattttaccattcttccacccaagcttcacactaaatttgatgtttggttttgcttcaattttagtagaatttatgttgctctgacaggtgctcttttcaaacttacgtcttacctttttagtgcctcaaactacatcctgttcaggcatgttataacaagttagtatgagcttattttggtataaaaaatttggactccataattttttcataatatgcatttttcattaccttttggaagacaactcatatcaccttgagcttcttttcatatgcctattttccatatgtatatcttctttggtgaggtgtccttttcagatgtttgtacatttaaaaatcagttatnnnnnnnnnnnnnnnnnnnnnnnnnnnnnnnnnnnnnnnnnnnnnnnnnnnnnnnnnnnnnnnacaagaaaaagaaattaaagatatctaaattnnnnnnnnnnnnnnnnnnnnnnnnnnnnnnnnnnnnnnnnnnnnnnnnnnnnnnnnnnnnnnnnnnnnnnnnnnnnnnnnnnnnnnnnnnnnnnnnnnnnnnnnnnnnnnnnnnnnnnnnnnnnnnnnnnnnnnnnnnnnnnnnnnnnnnnnnnnnnnnnnnnnnnnnnnnnnnnnnnnnnnnnnnnnnnnaaacaatcccatttatgataacataaaacacttaagaatacatttgaccaagaagatgaaagtgcatcagtatagcctgcacact

SEQ ID NO: 182009 - DNA, 2820 bp, Homo Sapiens
  misc_feature (401)..(420): n is a, c, g, or t
ttggattatgatagattgatagcctgccagaaaatagcaatttctaaggtgctgccatccacacttacttattgtgaaatatgaaaatccagagtggtttgtatgagaggggaaatactggctctaagctttctacagaaaacaggaaattcatgctgttgttgacataattttaaaggaaacttttaacaagaaaattcatgagggatacaatcaaacatagttaatctcttgagtgctaatcatttgagtatagtccacatcaggaagttttatgaggttgaaaactttactttgaaatatttaattgggagactagaccatttctttttccaagtcattctgatttattgtcctagtaaatgtatgtgtatgcatatatactgatgtattgactgaannnnnnnnnnnnnnnnnnnncgcgtgtaaatctgttttcatagggaacatacattgatggctcctagtctattttatactaaaacttaaaaaaatttgctgcactttgcagttgccactttttaaaagattaatgctttgcacatttcagtaggccttaaagatgaattgctcaccaacattttagaaatacactgcttacatgtgacatactctaaacaaagtcatagtaaactgttctcttaggttcatgtattattgagcaaataaggatgtcctttcttaaaatttctacatttatgtttgcttttgtgtaaaatctttattagtttgtaagtttctcaaagaggaggtttatactggaagcagtatttctaaagtacagagattcgaccatggattgaatacagtagtggaggaatgctggtattgtggcctaatttatccttttaaactgtatgtcattagtattagccaaaacctcagagtggagtgtcttgggctgaatgatcttctcaactttgccttgtttcccatctcataaaggctccttctggttcttttcccttccaaggattgtgagtcatgctcacataggcctgggatcttctggatggggtcggggaggaggtgggggtttcctgtggctggcccagagttctagccaatggaatcattcaagaatgcctaaagttcaggggtgggaatgccatatattggtgttaatcacttggcactttcttgggcaccaatattagcactgtttcatttttaataactggaagcacttaatgattattttgtttgtttaatttcaacttaaggatattgagggtcagagaagtaaggtttatttcttgtttatgttttctggaatttatagggtgtttgtagaagggataaatgggttacctaatgagccattcttctaggctctgtaaggtatgcccttttggctaggatattttaaaataatttgcaagcttttaatattgtgctttgtagaaatttacgatttttaaaaataatttgcaattgatagattacacttaaatttataaagtatccaattttaagtttcttttctgtttggtcattgttgcttattgtctattgtgtaggggacacaatcctgacatttcattgttttgttacttggggcagtattaaccagtggcctttgtatgtacattcattgcttacatttattgtttaagtggtagagtagcatttttatgaacttccctgttcagtattagtgaaattgacagatgcgtatatgtaaagatagaaaagaaacgaatacaattaattttttattccttgaggcctatttatttgttttggccctggatcttttctaatcacaattatatttctttatttttgcctttgagcagtttcatttatctttgtgggcagggaagattaaatatgaaattcagtccagtcattttgctactggttagctttagtttgaggcaagtaaaaatttttgattaaaattagtttcttaaaattatgcccttgctttaccaaataatcaaattggctaaaaaataagggtatgtaactttgcattttgaagaacaaaccaataatttttcatgagccctactcgatcttctttaaagaagaccttcctaagagacaattagggatgagtttgattaatgggaaatagctctaggttagattattttaaattccatacaccaagtgatttaaccacagtggcagtggcagtttctgaaccgtcaagtatgaacatcacttaaaaattaaaagatgcttaataataaactcttaattttcattaagccaatctgtaattcagaagaaaagcatatgtctgccatgggactattgcagtgcgtctccatcagtgttaacacaggagagatatgttattttatgtgtatgtcttagtttgggatatgtggtagtaagaacatgtcaagagtgctttcttcaaacctgtcagctcaactgagaagacagttacttcattgcttattttttcccttgttttattgaaatctgtatctcatatccagtatctaacactttgtagagatacttacatataatgtaagtgcacacctacccagaggaatggataactgttaaagtgttaataatagctcgtcttagttgatttcagcataatttacattagggagacctaaaaagcaccttcaaagtattaaaagcacctttttgtcttctttttcctaaaaaagcaattaaaatggtcactgctaacatttattaaacttcatgttagttgatgaaacagctggagggaagctgccacatctcctagctaagcagtctgacttaccctgttgggaaacaaagggatattgctctaagatttgattaggatgattgtagctagagtcttgaattctatctgta

SEQ ID NO: 182010 - DNA, 1071 bp, Homo Sapiens
  misc_feature (428)..(443): n is a, c, g, or t
  misc_feature (716)..(725): n is a, c, g, or t
ctttgtacaaaaaagttggattttcattaagccaatctgtaattcagaagaaaagcatatgtctgccatgggactattgcagtgcgtctccatcagtgttaacacaggagagatatgttattttatgtgtatgtcttagtttgggatatgtggtagtaagaacatgtcaagagtgctttcttcaaacctgtcagctcaactgagaagacagttacttcattgcttattttttcccttgttttattgaaatctgtatctcatatccagtatctaacactttgtagagatacttacatataatgtaagtgcacacctacccagaggaatggataactgttaaagtgttaataatagctcgtcttagttgatttcagcataatttacattagggagacctaaaaagcaccttcaaagtattaaaagcaccnnnnnnnnnnnnnnnncctaaaaaagcaattaaaatggtcactgctaacatttattaaacttcatgttagttgatgaaacagctggagggaagctgccacatctcctagctaagcagtctgacttacctgttgggaaacaaagggatattgctctaagattgattaggatgattgtagctagagtcttgaattctatctgtatacggcagagaaactttatagagtgtagagaggtgagcgaaaggatgcaaaagcactttgagggctttataataatatgctgcttgnnnnnnnnnntgtgtagttgatactcagtgcatctccagacatagtaaggggttgctctgaccaatcaggtgatcattttttctatcacttcccaggttttatgcaaaaattttgttaaattctataatggtgatatgcatcttttaggaaagatatacatttttaaaaatctattttatgtaagaactgacagaggaatttgctttgtataatgcaggctggctttacaaaagcactgtagcaaatttactacaagtctaaaagtatacatatatgttaatagatatatgtgcaactagatatggacagcagttgtatttttttaaataaatatttttaacaaaatgacagagaa

SEQ ID NO: 182011 - DNA, 1219 bp, Homo Sapiens
ttggagttggcggtcgggctagagaagagaggcgcctgcgcttgcgagctgggcttgtgagtggggctgccgagagggcaggcgtggggcgaggccaaaggactgaacccgcaggagcgtcacgggcgccggggcggctgccgacggcgggactgggttttctatcagatgttccacgtaataatgctggagttaagaagtttccattattttgctccaaaccagaagactctgttccctgtatatagaataggagtaatatttgaaaacaactggctgatgtttaaaactgaagattgtcatgattgtttatcctaatcccaatgctgaagtaagattgtcttggaaatactaagttgggtaagtattttttaaaggtttatgttgagtggtgagaaaatactaacagaaaaagatgggaaaattttaaaagtgcactttcagatcagcaggggaactatgttacctcagtctcatgctattttgaggctaataattcaggaatttcagtaatttgtggctaattaagtttaggtttgaggcagttttcaaacaacagtgagttacatttgaaatttgttttaattataaattcagaattctcaaaaagcatatttaatttaaaatgtgcctagttacagtactactgtgattgtcaattatgccttattatttattacattgtttctgtaggaaagtgaattctgcatttaaatttcagggaaccagtcagaagcatctggattaggcatttagtgatacaaggatccagaataacaaaaactatgtaccagccacattcacacaacaggtgatacccctataggttaattattctctagatattctaaattaagagacacagaatacttagtcttatgtgagtcaagagctctattctgtcttcactactgggtgtctactgttataaactggagaatatgtgtggttaaatgccatgtttttcatttttaattgatctttttcttattgctgtggttctttgcctttttaggatttcttgtaaaaacctcaaaatggttataaagagtatcacagatgtggtgttatggttagtgtgtactttgaaagtaatgaatgtttttatgtaattaaatatctttctgccaaaattacctacttagtgttatatttttaaactaatgagtagtcattaaatattctattttttaacactagaatttgggtacttaaaagc

SEQ ID NO: 182012 - DNA, 1497 bp, Homo Sapiens
  misc_feature (526)..(890): n is a, c, g, or t
caacccctctgaactgcaggatccaccgtgcctcactgcagtgctgcatcagacacatgaggttgggggaggacatgcacggaggacatcagggcatctgccaggcaagacattccttctaaagtttttcactttagaaagtgcacatgcttggttctgtgtgcctcttcttgcactacttttatgctttcggtaaagaaacaaactctttatcgaaagggctcaaagggcccctggaaaagggtgcaagcaggggctggctcaatctcttgttactgtccacctcaccaggacctggagctgaacattatgaaggactgtaggctctggcaatcatttccaaagaacatctacatttgccttattgagcagagggatgctgggcacactaacaggatcactggttcttctcctcctgcctagcattgcctctcctccagacagtatatccatcctatcctggaagagagggaactctggagacctcagaagcaggaaatgagcaaaacaagccaatttaagcagnnnnnnnnnnnnnnnnnnnnnnnnnnnnnnnnnnnnnnnnnnnnnnnnnnnnnnnnnnnnnnnnnnnnnnnnnnnnnnnnnnnnnnnnnnnnnnnnnnnnnnnnnnnnnnnnnnnnnnnnnnnnnnnnnnnnnnnnnnnnnnnnnnnnnnnnnnnnnnnnnnnnnnnnnnnnnnnnnnnnnnnnnnnnnnnnnnnnnnnnnnnnnnnnnnnnnnnnnnnnnnnnnnnnnnnnnnnnnnnnnnnnnnnnnnnnnnnnnnnnnnnnnnnnnnnnnnnnnnnnnnnnnnnnnnnnnnnnnnnnnnnnnnnnnnnnnnnnnnnnnnnnnnnnnnnnnnnnnnnnnnnnnnnnnnnnnnnnnnnnnnnnnaagtaactaaaactaatcctggaagctcctgatgtaagagaaacaaagggccttaggtgagaccataactggaggatacatttcttcaggccattaggatttgggctctgaatgataacttcctgggtgcccaacacaataaagcaataaaataaagaaggccaatacatgacatctgagactctcctgtctccagagtagacatcacacactgatgacagtacttttgagtcagtctggattaaacctccagatttcaatcaacacaacacaacagggctctgagcagccggacaacagagagaagttggcccaggaggtggaatctgtttgtcaatgatgcactatccccttcacagaaaaaggaaggtcctggcccccgaagaacctgaaacatcacacaagggaaggggctccaagcaccctctacaagacctatgcagccagaacctacacaggtgagggtcagctgctgtttatgtagcattccccgggatccacctgcttcctcctctaggctgcagaggtgcagccatgcggacccctcctacttctatctaagaatctggccaagcgcagtggctcatgcctgtaatctagcaatttg

SEQ ID NO: 182013 - DNA, 748 bp, Homo Sapiens
  misc_feature (156)..(548): n is a, c, g, or t
ttggatcaaaaatgggtgtagtgattgtgttctttcctatgctcgaatggaaaatgatgaggggacacgatgttagagttgcagtgggaaggggtggaaaagagggattccagagtgccaggcacacaggttttctggaaggtttacatgaggacnnnnnnnnnnnnnnnnnnnnnnnnnnnnnnnnnnnnnnnnnnnnnnnnnnnnnnnnnnnnnnnnnnnnnnnnnnnnnnnnnnnnnnnnnnnnnnnnnnnnnnnnnnnnnnnnnnnnnnnnnnnnnnnnnnnnnnnnnnnnnnnnnnnnnnnnnnnnnnnnnnnnnnnnnnnnnnnnnnnnnnnnnnnnnnnnnnnnnnnnnnnnnnnnnnnnnnnnnnnnnnnnnnnnnnnnnnnnnnnnnnnnnnnnnnnnnnnnnnnnnnnnnnnnnnnnnnnnnnnnnnnnnnnnnnnnnnnnnnnnnnnnnnnnnnnnnnnnnnnnnnnnnnnnnnnnnnnnnnnnnnnnnnnnnnnnnnnnnnnnnnnnnnnnnnnnnnnnnnnnnnnnnnnnnnnnngagggacactcagtgagctcttccctacttgatggagcactccctgcgtggtgccttgtatttgtagacatgatgctataaatgctctttgaatgtcttgaaggcttttgtttgaggagtttacagagaagcccctacaggcttcaagtcccttctcgttgcttctttgctccttaattcctccctaatctgatgttaaa

SEQ ID NO: 182014 - DNA, 165 bp, Homo Sapiens
ttggggaaaggttcatcaaaaatgggtgtagtgattgtgttctttcctatgctcgaatggaaaatgatgaggggacacgatgttagagttgcagtgggaaagggtggaaaagagggattccagagtgccaggcacacagattttctggaaggtttacatgaggac

SEQ ID NO: 182015 - DNA, 1625 bp, Homo Sapiens
  misc_feature (1437)..(1451): n is a, c, g, or t
gaagaaacacacttttttctggacaatttaaaagggaaacactgtagatgtacaggaggtctcttaacccacttgacctgtaatgtcatctggataaaagttctcttgaccaaagtaacattttatccaaaataatcatatcttagacccgtgtagcttgacatacttcaaaaatacgtgaaagtgtaactgcatcacagcaggtctgttaataccgaggtactacatacttctcaaagacataaatagtggaagctttaagtttgattctgatgttagcacttcaagtgaagaagccacagaactcaaccgtaatttgtctgtcacttaaaataactctgtgtttccactgatatacctgttttaaatggatatttccctattatttaatgaaacaaagcaccgaatgaacaaaccggctccgtgttgaaggcactgacagcgtgtctgggacacggctctgtgcagtcactgaacggcattgctgctcgctgcactgccggcggcaagctggcccagcaggtggacgataacgttgattctttccagaagagtcgcggttttatttgcagttgctctcaaaagctgggagtaaatgtgcttgttggttttgagaattgtgtcatcttcgatgttattgctagggttaaaaaagaaaaagagacaggtaagggaccagcaatgcctaccgacaattcagaggtccagaaaaccggacagtgacagcccaacagtcactcttcacagagcagcaggcattcctctcctgccgggttcagacctgccttcttttacatattgctcatgggcctgtttctacacatttatttcaatacatcaatgaaatccagtactcattccttttataaatatttgaatgcctattatgtactaggaattgctcttgacagagaacaaaacaggcaaaaagaagcccctgccttatggaatttgcatcctattgaggtaggagtttgggggaggggaggggaggcactgggggaaaccatagtaaacaagagagtgacagacggacggccatgaagaaaatgcagtggagccgggtgagggcacagaaggagctatgcagtatttcctctgttcctcaagctcggcctaagcgccttcctgtgtcataaacacacatctaaagccactgttgtactgccgtctctagagctagaactacctaggatttaaacatggattcctgaattacaagaactgctgcatctcagtttactctgaaaatgtcagtgcaattctgtgtgaagattgcccctcagctgaagagtactagacagtactctacctgaaaactatttcagtttacagtttgtcctgaaaacatttaccccttatgatggatcggtgaattctatttttgttactactggaaaagactagtaattacgtggcagttcatatctagcatcnnnnnnnnnnnnnnnaaatgagtccaggtggagacccctggctcacataaccagataccaggtaacaattccacaactcttttcagtgtccatgaacacatctgagccttacaataatcccatcccctcagataggcaaggactagcattttgaatttacagatgtaaaacataaggcccagaagccaa

SEQ ID NO: 182016 - DNA, 896 bp, Homo Sapiens
ttggcttctgtgttggggctgagggagttatcaagggtgacttttaggttctggtttgtacagtggagtggatagtataaattattgatttaaggaagaggtaagggaaagtgggagacactgtttcatttttgaactgttaggcttgggatgcctgtggttcatttttttgcatggagatattaaaaaagcagttggatacgtagctttgaaactcagagagacaaattgagagtcataagcatttattgtggttagtatttaaacccacagaaattgatggaattgcctaggaagaatatagaaagagaagagagtccaggactgacgtcgttctctcactcccacccccaaagatcatttagagatctagaagaggagaaagaaaacaaaggacaacagaaaagaatcagtcaggataaaactggaattacaggcgtgagccaccgcgcccagccggctctaagattcttaatgttagagaaccgaatgtgttaggaaacagttggaaacgatgttccacatccttgagcactcctagtccaaggaatttgagatcagcagctttccacagttaattacccaggtttgatttggtcagtggtaaagagtgcaggagttagaggtttaatctgaacacaagagatgactgagtgagaagattgttttgattttactgcgcccctaggactcaaaatagtgccttcttcatagcaggcatttgctgttgactgactgactgaatgcatgaatatcaatttcctagactatggatggatgctacaagaaagatgggttttctcattcacctcactgcagagcctttcaaggcaggcttaagtcagctagagcaccagctaaacatgcaggtcctgacaacaaaatcattttgattg

SEQ ID NO: 182017 - DNA, 1186 bp, Homo Sapiens
  misc_feature (722)..(731): n is a, c, g, or t
ttggcactgataccctctcttgatcatactgtttcacatatcatgaatatgaatctagggatgactttttttaacagatttaaaagttaattacaaagtaaaaatataggaccttagagacttaagggttgggggtgttgagaaaaacatggtcctaccctcatggagctaaaataatccctggtaacttcagtcattcttgagtgaccttaccttatttctttctggcctatattcagttcagaggctcctctgatgcccttagtatcttttatttttccagtgatacttatcactcaatactatgaacatttacatgtgtaagactgtacattctgagaagatgtggactttgtcttttctggctcacaattgcacactcattacttggcacaatgcttggcaaatctgttgaatgactgagtaaatagatgaatgatcggatgattgaatatacgaatatatttaaccccaggacaacttaagtatatcaacatggcatcacacaaatctgctcaaataaaagaagtaaaacaattttggttaaggagcaaatggagttaatcattaattgtatacaggaaaaagtatgctttgaatacagaggatctcagattgttagggggacactttgtgaagaattaagttggtgagataattccatgttttcattcataggctttctgtttatgcttttctttcagccaagaatgttctccacnnnnnnnnnnggtttcttgtagcacttcaaagtttgtatatctagtaaagcattcctttcatttttatattacatttagttgtgttcatgtttctctcttcattataaagttgaaaaaaacagaggttttgtttcatcctctatgtttaagtatagctgacatccagtaaatgttgatcaaatatatatatgtcatcatcatttcattcacttattcagccgatgtacactgaatgtatgttatgtttcacacactgttgtaggcacgtggggtaccataggggaactaaagagattaaaaagagtattgctgtcctcaaatagcatacattctatcgggagcttcagcttctcatctataaaatggagatacctacttacaaagttgtgaaaatgagaaatgtgtataatgcagtgcctagcacatttgtagatgtttattcattggtaattattattttacaa

SEQ ID NO: 182018 - DNA, 1550 bp, Homo Sapiens
ttggcaagaagtatgtatatttgttagtcactaatttcttaaaggatctttcaaattaaacaccccaggatcaggatatgagaactgagctctaaatggtgcttcaaattcagttaatttaatttaatttaatttgccgtgtctccttaatgccaaaaagaagcagtaatagagtgaaactttagcaggttatgatttttatttcttgtcatttttctgatatgaagtgttgcttacattatggtttctgtaacatttttaaaggttggggtagcagtggcattcagagaatcagtttattttgttttatttgtgaggctgatcacacagcaatgccccgaaataccagtccaaccacagacctactggcgcatgtgcagcaggcacactggtaggcttgggtcacacaccgatgctcccattatctgacctctgacttaggaagatactatgtgaccaaccaagaccagctgcagcttttgtttgctaaatttcacttctggagctgtcttggttggtcctatattatctttctaagaggggaaagacctcttgagttcttaaggaactgaatgtttttaaagactatcatatgctcgattcttgattaaataatcttttattttcatattcttcttcagactttgtcttttgctttggctgacaaaaccaaggccagaattgttttagctaacgacccggatgctgatagacttgctgtggcagaaaagcaagacagtggtgaatggagggtgttttcaggcaatgagttgggggccctcctgggctggtggctttttacatcttggaaagagaagaaccaggatcgcagtgctctcaaagacacgtacatgttgtccagcaccgtctcctccaaaatcttgcgggccattgccttaaaggaaggttttcattttgaggtagggtgtttctgggactcactcattttcctttcatctgctctgtagaagatctaaggcatgtctttctcttttggattatccctttaggaaacattaactggctttaagtggatgggaaacagagccaaacagctaatagaccaggggaaaactgttttatttgcatttgaagaagctattggtaagaagtgatcatgaacattaaggaattggctgcaaggcaaaaggaaaaggtttggattgggattcaaagatccacagtgaaacacggtttattttgcctctccagcactcaggttgaatgtcgaactgtcctactccaaaattgacatctcagatgatttacagccaaaaggaatgtcttaaaaacaactaagtcattcatgtcagaatcctttgcctggatgactcaaaacagtgacattgtatgcttggctgccggtacatgtattttgggagttgtgatgtttcctccactgtggtggttaatatccaggcctaaacactgtggtatttaatgtccctcctcctccaaaagtgctaatgaggatctatgctacggtctagccagaggaaaggagaaggaagcatggtttgctgctgtcatcagaatgatactcacccaaa

SEQ ID NO: 182019 - DNA, 1405 bp, Homo Sapiens
  misc_feature (447)..(461): n is a, c, g, or t
  misc_feature (736)..(756): n is a, c, g, or t
ttggctctatgttacttagcaactgcctaaataagagtgggggtctgcaaagcatagagtgaatgcagattgtgaacactcaaatgaaactagtattattattatgacaccacagtttttaacttgacttactggtagtgctaaaaacacataaaagtccacaaaaagagcaggagagggatgggatagggaattttcttattctgttttatttttccaagtgtttctttagattttctagacatttatatcacctacattagatatcattttgccttttccgttccaattattatatttccaattgtttattcatttcagtagctaatatttccaacatgatattcagtcagatggggacaactgatatctttttgttcctgatttgagcaggaaatttcctttcatttctccatcaagtaagatgttggctttgagatggaaatnnnnnnnnnnnnnnnacatgtatcattatataatatatattgcatattgataggaaatatctattcctattgggaaatttttaaaaatataaacaagtgctaaattgttttcagatgcattttccctatcttatttcctctacttctttcctctatcttatttcctctgcttatttaatgggttatatgaatagattttataatattggcccagtaagcattcctggaataaactccacctggtcatgatgaattagtttttaatatgctcttgtgctttctttgctaannnnnnnnnnnnnnnnnnnnnagtttgtgtaatcaatattcatagtgaaactgatgtgtttttttgattgtaatattatactcaaattagaaaatatatatttctaatataacaaggaaaataagttttccttagttttctgtgcactgggatattttaagtagcatttggatctggtctttaaaaatttgatagaaaatttggtagaaattcccaagggagtctattcttctattttttttaaattattaattgttaattctaattatgtatacttgtgctttctacctttttcatttattgttttaattagtattttttcttgttttctttcaaagcacttctgcatttactaattaactctactgttttccaactcattaatttttggttttaacactatcaacttttttcattccactttttttgtttattagctttggaaattggatatttagttggtatatttttcatgtttattgttatggtaactgctttagctgtatcctaaaatttctgactatgaatttccaagagaaagtaccatttttccttttgattgctttaaattaatgtctgatttaaatcatgtaggcagagaatgctgtttgtatatttctattctttgggattattgaggtcttctttgtggcctaaatgtcacttttgt

SEQ ID NO: 182020 - DNA, 1276 bp, Homo Sapiens
  misc_feature (389)..(430): n is a, c, g, or t
  misc_feature (483)..(548): n is a, c, g, or t
  misc_feature (707)..(928): n is a, c, g, or t
ttggaccatagccaatcaatttttgcaggaaatggtgtgggcatttgaagagagattaaacatgcgcacaggagccagggggaggtctggtgtctaccccctgaatggagtttccaaaagttgtacattttacaaacaaatgtggtgcatcttataaggcttaatgtttttaggaaacgactttgatatgacaattgtgaaggctatgatgaaaagacaaaacagaaaaccgtgtaaaagtaggagcctgacattacaaagaatgacacctttgtgtgttgctcccccaacagccagcaccaggccttgctttccagctagcgctactgcaggtttatattctctgaagttagacgctggttattccccagagcaaagcaagggatatnnnnnnnnnnnnnnnnnnnnnnnnnnnnnnnnnnnnnnnnnngcacccatccacctgagttagaatcttagctgccattctctaacttgactcgnnnnnnnnnnnnnnnnnnnnnnnnnnnnnnnnnnnnnnnnnnnnnnnnnnnnnnnnnnnnnnnnnncactataaaaatttaataaaataaagtttgtgtctcagcttgggttcccagaagagacctgaaactaggacttgagtgcaagtagtttatttggaaggttaagggaacactcaaagaggagtgggagctcagataaaggaaaggaaggagctcttcaannnnnnnnnnnnnnnnnnnnnnnnnnnnnnnnnnnnnnnnnnnnnnnnnnnnnnnnnnnnnnnnnnnnnnnnnnnnnnnnnnnnnnnnnnnnnnnnnnnnnnnnnnnnnnnnnnnnnnnnnnnnnnnnnnnnnnnnnnnnnnnnnnnnnnnnnnnnnnnnnnnnnnnnnnnnnnnnnnnnnnnnnnnnnnnnnnnnnnnnnnnnnnnnnnnnnnnnnnnnnnttacacaaaaaaactattagcaagccacctttccctgtgtgttactggagcttagaatatcactaataattctttgaaagaaggaaaaaagtcagaaaatatatatgcatatatacaaatacacatgtatatttgttcatgcaaaaaatatatttaaacacaaaaaatgtgttagagaggttgcctctgaggaagaaaattggaggacagggaaacatgagtaagaggcatacttaatttgctcatatcacctcccgtacatcaaattttccgtgcttatgtatacttttaatttaagaaaattgacaaagtttgctaatactgatttttccctagcccactcccttt

SEQ ID NO: 182021 - DNA, 1031 bp, Homo Sapiens
ccccataaaaaggatagcaggaagaaagtaccaacctgaaaatatgatggcaataggataatacttggtagatattatagaaagaagtagaacaattagtaaaggaagtagaacaattctgtttgttatggtcatggagaagcatgaagtattcagaagtgcaaagccaaaataacttttacagatgattttccaagttatggaacgtgtctctgtgtgcttgggtatatacacatattgctaaacttggatacagttttttaaaaatgtgtgtatttaagtagccaccttcactacctactctgagacaaatggctgtgtggtgtatggtcggatgatagttactagaaacaacttttaagtcataaaagactaacatcctctgttttcccaaggagataatatgtacttttgattgaccttggatttggtcttcggaccagtacaagtagaatgtaggggattcccttgctaagctactagcttaataaaaagtattcatacaactcctgttcatacaactttatgattggtccccaaacaaccacttagaggctagctggatatcctgctggccagtaactctaataacttgttggagaagtatgtaactggtgaagaatacttatctaggttctctagtaacattttatcttttattgcaaagatgctctgattgtggcggcaatgcttctttaatcatagggaggataatgtagtgggaaaagaatgaggaatcaaatgagtgatttcacttaagctctcagagcctggagccctcatataaggtagtgataatccgtaacaaggctgtcgtgggaaacagatgatagggtgcaagtgttttgtagtactttaaagtttgtaaaactgtcttaaggcacagtaacatatatgtaagaatgtaccagtgtgactacttgtgttattatgctattatatataatgtgtatatttgcaataaaaagttataattttttcctgtggacagagatttagtttgggcaagggtggtaggcaagttttaaatt

SEQ ID NO: 182022 - DNA, 1205 bp, Homo Sapiens
  misc_feature (130)..(168): n is a, c, g, or t
  misc_feature (335)..(478): n is a, c, g, or t
  misc_feature (770)..(780): n is a, c, g, or t
ttgggtacccatcaactttttcatattgtgaaatgaaccaggatcttaacagatactatcatcgctgtccttttttggctgtttaatatctagttcatgtaacagatttacaagagataagtctcatggnnnnnnnnnnnnnnnnnnnnnnnnnnnnnnnnnnnnnnngaaattgagttattacttggatttaaccctgataggccaaagtgctgggattaaccaggcgtgagccactgcgcccggccttaaataaaatattgtagtcattaatggtgtgtttgaattgaagagataccaggagatagaggtgaagtgcagtacttttattcttnnnnnnnnnnnnnnnnnnnnnnnnnnnnnnnnnnnnnnnnnnnnnnnnnnnnnnnnnnnnnnnnnnnnnnnnnnnnnnnnnnnnnnnnnnnnnnnnnnnnnnnnnnnnnnnnnnnnnnnnnnnnnnnnnnnnnnnnnnnnnnnngtttcccattcatattaactccatcttttaaaaatgtcatgattacaaagtgaaaagatttggctttcttagaggctcaatcacagaggtgaaagtgaccttggaaatcatatactctatccccatgttacacagattagaaaaactgaggttatggcactgacttaggcacccccagcaaggcaacccagggactacaactggcaatcccaactcctgggctagggctttttctacctttttttgcattggcctcttaaagaggcaatgaatactaattcctggcatcagnnnnnnnnnnnggcatgaggtgggaggattcttttttccctgatgggaaacagtgaataagaaaaatctcatcattcgatggaagaggtgacttaataattttattaatgaatttgatgtcccatgttttgtagttttgttatcattgaaccattggggctggaatctgcctaaataattttatcttggtagccagcaattatgttggtattttatgtgggccttcccagattttcatattaatgaaatgactaatagtcgtacttaagaggtaactctactaaagcagaatgagatctaatatgttgtggaaataaaagagtttgcagtggaatgatactctcactccgtgcttgtaaaattgagttctattcaagacggaactgctatgactgggcctattcaagcttcatatttttatacagactatttcaca

SEQ ID NO: 182023 - DNA, 1977 bp, Homo Sapiens
  misc_feature (255)..(265): n is a, c, g, or t
ttggattacaaagtgaaaagatttggctttcttagaggctcaatcacagaggtgaaagtgaccttggaaatcatatactctatccccatgttacacagattagaaaaactgaggttatggcactgacttaggcacccccagcaaggcaacccagggactacaactggcaatcccaactcctgggctagggctttttctacctttttttgcattggcctcttaaagaggcaatgaatactaattcctggcatcagnnnnnnnnnnnggcatgaggtgggaggattcttttttccctgatgggaaacagtgaataagaaaaatctcatcattcgatggaagaggtgacttaataattttattaatgaatttgatgtcccatgttttgtagttttgttatcattgaaccattggggctggaatctgcctaaataattttatcttggtagccagcaattatgttggtattttatgtgggccttcccagattttcatattaatgaaatgactaatagtcgtacttaagaggtaactctactaaagcagaatgagatctaatatgttgtggaaataaaagagtttgcagtggaatgatactctcactccgtgcttgtaaaattgagttctattcaagacggaactgctatgactggcctattcaaggcttcatatttttatacagactatttcacagaccatagatttattttaaaagggaaaatctcacacataattaagcagtggaaaatgtgctcaatgctatggtgcgtcaggccctctgtctaccaggtttctcccctttctgcagagctgtggaccctgtacgtaccaaacaggtgaacttggtccatctttccttcttcctttttttgcacatttgcatttatatcttcctgtactaaaagaaacaaattatttataattggggtgacaatataaaggaacaaaagatggggcaatagttgcttcctagctggagctgtaagtccatgttacagaaactcactatttaaaaagttttaaaagatttatgaaccttgtcctacaattcgctgaatacttatttgtcttttaaactcccctcggtgtatggatcatcttcgtcagaatgccgttgtttcattgtgaatcaggggaaaatgttaatcatttggagactgttttcttattaccaaatgtacaatccataagacaactgaaagcaacaactgctgggttcactgacaaagattataaaaatcatcacgttcaaagtagagtttttagccaaggtcaagaactaacctggggctgagtcagcgtctctacccacttaaataacagcgtaaagatctttcactaaattcgttatgtggtctgtctggatgtaaacctatatatttccttttgaaacagaatcatatcctgcagactcttggcactcctgcatagctttgaccgaatgttcactctcatcgtaatggaagatttctatctatgcagataatacatgtttttaaatactgttttctgtttagtcctcaatcttcctaactcaaattggggactgaggagagagaaaggtggttacccctgttaccgtgccatattcttcttgctgcttttcaaccccacgtgattgttgattgacggttctgctttaatgtgcgtgcccttcaagtttcagaaaactttcccaatcatttcacttcaatcttaattgaacccaacagtcaaagttattattttctccgaacgtgtttgtgatcttctgttatattttggggcatgttacctttatggtatataagctgtaatgcaactccttgggattgcaaaaaactggtccggtatttaagtacatgtatttccacattttattgtggcttgaagtgaaaatccatagatttgtattatttgttaatttgtccactttaccctgaggttttaggaactctaaacattccctgtccctattcaaagaaacaaaccaaaatgaaa

SEQ ID NO: 182024 - DNA, 1257 bp, Homo Sapiens
tgtacaaaaaagttggcttttcaaaagccaataactaagactctcagaatgttcactttaaacgaatatgccagaacatagacagctaaatgaatgttactctgcatagtgatcatgctggaaggttatttcctaatgccagcaatctaccattgcccaaaacctgctgagtttactcttttagaattgcattcaaagttaatttgtcacacacactaaactttatgattatacattgttttaaaaaatatagtattaggaagcttgattatttttagttaccattacttggcaccaaatgaaagtttccaaaacttccacctaactttgatgtaatgcagaaagtatataactggctttgaaggcaatcccaaaagagttttaaaggttttttgagcagtggcagtatacttaggagaatgaactgtggccttccaaggtaactaccttaaaggaactcagctcatttgaatgtattgagttttggatgtatttgtttcattttttaaaaagttcacattattttatagtgtcgaaaggaagaactaggattaacataatttctttggtttttctattgcttgttattattatgtaaaaactgggtggcagttcagaaggaagattgtggttacagaagagtgacaaccaagaattttttgatcattaaatcagattttataaacagtggaaggagcatggacttaaaacaaggcatgcttattcggttttgtcaaaattttacgaaaatatgtgatatatatttatactaaaaatatataatccttagatttagaaaagcaatcagttaatgtctttagcagactaaagcagtattaaacacaggtacaagttggaaattgtagaaaacggaaagaaaacaaaagacaaaatgtctatggtagggaataaaagtttaagatattataaaattatgtgtattttctcttttacataaatcatttgtgaaaagtgtgctaaactttttttacaagagtgatattaattaggatttatttttcaatataatttggagaccctttgttatccaaataaaaatgatgagtttttgtgcctgtattcaaatatgtatgcatgtgataacccttgaaagctaaagcccttcttaacttttgagttgatggaattagaattcaaagatttgaatgaaatgatttaacctttatcctccaattcttacagtgcccagttctcctgtgctatctttgctttgtacaatagtgcatcttccacttt

SEQ ID NO: 182025 - DNA, 926 bp, Homo Sapiens
  misc_feature (798)..(806): n is a, c, g, or t
ttggggagatcatcttcaaagggcatgagaatgtggaagctgctcaggcagagtacatcgagaagtttgccaaccctttccctgcagcagtgcgagggtttgtggatgacatcatccaaccttcttccacacgtgcccgaatctgctgtgacctggatgtcttggccagcaagaaggtacaacgtccttggagaaaacatgcaaatattccattgtaaacaaatcaaaggaaaagaaaccaagaactgaattactgtctgcccattcacatcccattcctgccttttgcaatcatgaaacctgggaatccaaatagttggataacttagaataactaagtttattaaattctagaaagatctcttttgtgccttactgtaaaattatttacttttttaaacattttaagttgtattttttgagcataaattcgatttttttaggtggaaatctgaaaaatcaatacaactagaaagaaaaatagtacacagtgttatcatctagagctgatttttatttcacacctctgggtattgttctttttcctctcgagttagttttttttatccataggtgagatatatagtaagtttttaaggcaaagtatttcttaggcttaagtttccttattttaaaaatagggtaatatgccctatctatctcctaattcctccatgaattgaggattaaatgtgatgtttgcaattgtggtatatgtgtttagcagtacagatgctcaataaggcatagcaccctatgttgactcaggttatttccagaaatgtgttcttaaaattnnnnnnnnnctttttaattgcgaaaattttcaagccgatagaaatgttgcaagaagtgtattgtatccacttcacctagattctccagttggtaacattttctccatttgctttatttcttccatacgt

SEQ ID NO: 182026 - DNA, 1264 bp, Homo Sapiens
  misc_feature (227)..(300): n is a, c, g, or t
gcaaggtgaagggagggttcaggttccacaacagcagtgagcagggtccagccatcaggcctcagagcctctgtcatgccacatgcgagacgggctcctcctgtccccactgtgtccccgcttcctcctcttacagcagggggagttggagtcggagtcatggtggtggtgcctgggcctctcaggagatgtgggagaggaggtggcctcagctggccgcctgtgcnnnnnnnnnnnnnnnnnnnnnnnnnnnnnnnnnnnnnnnnnnnnnnnnnnnnnnnnnnnnnnnnnnnnnnnnnngtggctctcacaactacaaggaggatacaaggtgtgcctcagaccctagtcttgcaagccaagagagtgaacacaagcaggccccatccagatgaagccaccacccacaagtgcgtctttaaatcagttaaatcaaactacaaattccactcctcagttacgtagtcacgtggccagtggctacgtgggttagaaacagatgcaatatccccatctccacagcacgcccctgccccaccccagccgtgcccttggcaggttgacaccttcctacctgcacccaccaggccactcttagggtcaggcccaggctcaccatccaggagaagccctggaggtgccacccacggcaggaaaaggccccgccccaggtcctgagtgccctcccacggcacagcgcccgaccactgccagtacttaggacctctcttcaagggtgacccgagaaactcccctagagaaaaacctaggagtaactgggacaggaagtaaagtagggcaggccacccgccgggccggtgcgccaagagaagctgccacctgcccgagtgggagccgctccggtcctcccgagaccccccaccccggggcacagctagcccaggtggcacagcctcacctgctttccgtatgatcctccgcccgcggcttcctcctggccgaggctgccgaggtcccgggcccgccgctctctacgcggtgatgctgcgggagaagcgagctctgcggaggagtctgcgggccggccccacaccacgccccgcagcgccccggggagctccgttcagtgcccccgccccgccccacccctgttagcccctgctgcggtcaggcggggcgggggattaccgtgaacacagacagccccagtttggcggcctccttgtcctctcgggacatcgccacgcggcccacggagccactgcagggacatggcgatgaagccaacttttttgtacaaagt

SEQ ID NO: 182027 - DNA, 1461 bp, Homo Sapiens
ttggaccttttataagggaatatatggaatattttttattgttaatgtaacttaattccttaaaacctggaatattaatatatataatctattaaaagctgaagattaaatatgtaatttttgcttttagtttcttgtgttagtatgcttaaaggtatcaatacttttattctatattcattagaagaaaggtaataaatttaagtttcattgctgaaaaattttaaatgagtgccaccccatagccatagtcattttgattaagcataatttaactttcattatagcataaagagaaaataattattttagtatggaaacagtgataggcagtgctgtaaacaatattctctgaaaagttgtgggggtcacaaagaaaattttaaagaatatagaagcttttttaaaaaatctttttagtgtagtttcttagaacaaattataaacataatcattctgaataatcaatttttatttagtccttaactatgtaaaaccgtatcagtagaaaaatgtgctggtgtcgtgtctaaagatggataaatttctttggaatttatctttggagaccaactttatgaggcagactttttgtctacggctttggaaccaaaaaaacttcactctaattcagtcctaaaggctattttacattttgccggggtaaagtgacttcaagatacagcatggtgtcttgtatctagtagaatattgtgctagccatctaaaaaagtggatttgagccttaatttggccgtttctcaatttgtctagtttgacctttagaccaatagtgtccatggctttccttttgtttttcccatactgaggaacttaaactacagctctaaaatgtcttttggttttaaaattctgaatgcttatatactactattaaaaattaaaaatccctcaaatagtagggaaatacaggtaatatgaaattaaatgtatttttatccattatttgattcccacctgttattttatttagaatacgaatacaaccaagtagggaaaaacgtatcagtaactgctattcaacttaaattcagcgaattaatagctgaatagaaatagctaatgacaatgcaaaagagaaaacaagccatattgctaagaaaaggatagtaagctgcttagaaagaaccagcctgtgttggaaataattctcttctagataatttaccttattttcttggcttgtactaattgaatggaagtggttaatttgttcagagtttattgccgtttgatgccaccccagtctatagttctgtgtgactttccatattgaaagagtagggttagtagccaggttgtcagtcttttacaaatgtctacataaatgtctacataaatctgaaagtggtttatattcaaggttagtttttcagtagcgtctcctccttattcattcacttttactgtgaagactgaaatccaaaagccaggttcccc

SEQ ID NO: 182028 - DNA, 1137 bp, Homo Sapiens
  misc_feature (370)..(621): n is a, c, g, or t
  misc_feature (666)..(839): n is a, c, g, or t
ttgggtgttttgcatatacagtcttttctcatctcccagccttcttgagcttttcctctgcctgagatacgctcccactcacatagacattgggggcactaaataaaaatagctgtttaattgaattggaatcgttccacttggaacccaagtttggaaattttgctacttcttgttaagctaggccttttattcttgaagttgctatttctcatacaaactcattttatgcattagacacacagtcactattgttatggagaacatagttgtatcagaagaggtatagctttgggtgtggatgtgcgtgtgtcaggggaaagatattctgattatatgatgattttcataaaatatagtatgctgagtnnnnnnnnnnnnnnnnnnnnnnnnnnnnnnnnnnnnnnnnnnnnnnnnnnnnnnnnnnnnnnnnnnnnnnnnnnnnnnnnnnnnnnnnnnnnnnnnnnnnnnnnnnnnnnnnnnnnnnnnnnnnnnnnnnnnnnnnnnnnnnnnnnnnnnnnnnnnnnnnnnnnnnnnnnnnnnnnnnnnnnnnnnnnnnnnnnnnnnnnnnnnnnnnnnnnnnnnnnnnnnnnnnnnnnnnnnnnnnnnnnnnnnnnnnnntctctgcacacaccagctcccctttgctttctgccatgagtggtnnnnnnnnnnnnnnnnnnnnnnnnnnnnnnnnnnnnnnnnnnnnnnnnnnnnnnnnnnnnnnnnnnnnnnnnnnnnnnnnnnnnnnnnnnnnnnnnnnnnnnnnnnnnnnnnnnnnnnnnnnnnnnnnnnnnnnnnnnnnnnnnnnnnnnnnnnnnnnnnnnnnnnnnnnnnnncagggtcatagggatagcaggcacctgagccaagccagaacttagatctcaactgttaatgcaggatgatttgtattgaaccatgaattttacactgcctctcaatgttggtgtcagcatttaaggttatttaaaaaatacaaccctgaaggttacataaagtttcatttaaaaaataagaccttataagtctacttttatttccagtggacagcaactacttaatcgtcttaaaactttcttcttacaatattactttacaatattacctggttggatttattatctgtgtacaatc

SEQ ID NO: 182029 - DNA, 1417 bp, Homo Sapiens
  misc_feature (236)..(279): n is a, c, g, or t
  misc_feature (451)..(511): n is a, c, g, or t
  misc_feature (1235)..(1244): n is a, c, g, or t
  misc_feature (1303)..(1333): n is a, c, g, or t
ttgggagctatctctatgagccaggagtcctaggctttagtatcccatgtctgccgttttctagctgagtctatttaattctcagatcctttgtttcctcagctatcaaatgataagaatgtagtagaccccaaactatgttctgtggaccaagatcactgttttaggagataatcgtaggaatgtaggtataagtatgtaattggccatctaagtttaggaaaatctgtttgctnnnnnnnnnnnnnnnnnnnnnnnnnnnnnnnnnnnnnnnnnnnnctcttagagtcatatgtaggattatagaggtaaaaagagatgatattaatgctggaatagcgcctgtaaactggggctgtctacagcaaattaggatatatggtcactgtgctcattgtgaacagtagcttgttcgaggctttaagaaaattctggtataaatctgtcttannnnnnnnnnnnnnnnnnnnnnnnnnnnnnnnnnnnnnnnnnnnnnnnnnnnnnnnnnnnncccagaattttctaaactaaatttagcatgtaccactatttgttattcttgccaccaccccccattcccctagctcctcacactacctgccaatgtcatcctaaggtacatgtggatacctaggttgtagaaatgctggactacacaattgctgagttactctctggctgtagattatatgatgaggtattttacaatcagcttttgaaggtcaacattgaataatgctcttttaaaaaaattatatcctcagtgtttttccatggaaaaataagtgaaaattcttttaagagttgctgtttggtgaaaagaacaaacatgactttcaaagaaaatgttttactatcaccaaaatctcccaagtgaataagtaccacagaaattacttattgcacctgtatctgccattggctgtgaaaaaggctgcaaaaagtagggctgaaagggaaactttagaaactaatactctgaaagatgttttcctatggattaaatttagtgtctttctgaaagttgggggcaaattcccagatactaatagcatctttgctaagtgtctgattatcttctatcccctaggaggaaagagtggtccatgttgctgtaactactactatgagtgcttatgctgtattgtttttaaagagtaaaacctttaagtactaatagttgtcttttctcattcacaggagcagaaaggtgcagttgtttattctcttagccnnnnnnnnnncctgtatttcccacaaatctagaaataattattggagttaatatgaaagataaataggnnnnnnnnnnnnnnnnnnnnnnnnnnnnnnnaaatcataaaaaaccttgggatttagaaaaatgtcaaaatcgacaaataaagatgaatcattggaatgagactcttccttggtt

SEQ ID NO: 182030 - DNA, 1084 bp, Homo Sapiens
ttggcacacaactattttaaatatcaaatctaaacatttcaattaactaaaattctaaaagaagaagctttgagtgtttattaatcaacctagtattcaattttcattttcttttctaaatgagcaaataaggagattatggaatgatttttagtcttcacagaagtaaaataagcatagtgtgttttgagtgttaagacatcaaatgcaatttctcctttaccttactccaagcttgtttgtatggagaagttaagaccatcccatctctatgttatgccacaatgctcctctatagcacacaacttggctccgaaattttgaaagtcaaaatactaacctactatgtgtctctgataaattgcctgaacattacctgattttgaagtgctgcactcctaagactttttcttggaatgagttaaacgttttattccaagaatcctctactgagctagaaagcagagctgtgcatctctgtttcagtaaaaggaggtcaatacagggaactgtggtctctgagaatgcaagatctgcactaagaaaaggattagctacagtactacccaagagaaccagctaccaggaggaaagagggtctgtaaactgcaagatgatgacttcacttgatttccactgaggaaagctggtggttcagacttaaacttctccttcctcgatggtaaacatctatggaaggttctatgaattataatgagttagtaaaacataatgcactaaatattagactatgtcagcagatcctgcgaccaaaacttactgaaaatataactatagcgggaggcaatggaaaagagactaaaggcttgaatggagaaaaaaagaaattaaatgtgtcttgtaagcctggcgtctgatcatgtcttagacgaagtaaggtataagctggccagagactcctttgtgacacaaaaggtgaagttacagatattccactaaatttaatttttattatgacataagacaactggtaatatgcaacatgattgaaaaaaacttctcattcaattcgattgggctttgacataagaatagacataaagaagctaagaattgacaatct

SEQ ID NO: 182031 - DNA, 1090 bp, Homo Sapiens
ttggctaactgctaattttttataaaatcgaatgagcattggtatttatcatttcaagcaggagctctgtggtatataaattaggaaatccttatattttgtcttgactaggagaaatggctctgagattgggtgacttgagatggaaaacattgtaaaatgaaaataaaatcaggcatagttacaggaagaaaaaagtaagagccatgaggttgttactggtttaggttacagttttgagacttgtgcttttctgtgttagctatgcatatagaataaagaaaagtatttcattgttatagatttttgaacaggaggaacaatagaaatagctaaaacatgtatgtctactgtgtgtactaggtactgttttgtttgctttatagaatttaactcatttaatcattacaacaacttgtgtaagataggtcctgttattatccttgttttacacatggggaaactaagacatagtttaaataacttattcagtcatatgggtaggaagtggcagagccagaatttgagcctaggcattctggatccagactctatgcccttaatcccagtaagggattgcctcccttcattatcaaatctttcaagttcttttgaataaacatatgataaaattgatttccctttattcaggagaggttatggcatgtttgtggctatgccagactagaatcacaggagctataagttctcatctcacatttgccaataatttgctgaaattacttaatttccctgttttagactttgaatatttataattaataagaacttgagtataagaagaaaaatgtaaaattcagattaaaaatcttctagaaataccttctcttgctgaagtaaaatttcattgttaatggattgggttaccaagatcattctgtcaatacagtttttattaaaatggataataggaattttccctaactcttgttaattacttggaacctacagaaatcaattaaaacgacctgaaaacttgagaagcatagtttatttaaaaaatgatattatgagtttgcttccttccagctgggatttctcttaaaatgccagggagaaagggtctgga

SEQ ID NO: 182032 - DNA, 971 bp, Homo Sapiens
cattttgcgtctgttaaagtcagtctttggcggaatcaaagggtgctttttttgtcttccaaagcttctgcttttgtgtgcccagtggtttgcaaagatggaatgactgacagtcagtctcacagaagttataatcccctgtatgtttctgttggacagacttagtcatcaacttagaaattcacttttaaaaaaagcatcacacacagcagcagttttcctatttaagtgagataattttgagaaaactaagtgggaggtagtccatgagatattctgtaccactgatgagacaaggaagcttaaactactggctcatcaggcatcagtgacagcatctgttctttggatatgacattttataataaggagtggagcaggtgctggaggattagtatacaataaatacatcttctctaagaactttaaagacgggaagtttttctccgcctagagaataatctgaaatcagaagagatggatttctgagaaagatttctcctagccctgttcctatctggagaaaaccagctggtgggtctaagagtaagaggagcaaccatgccagggagcaccctgactctggggcaaatgtgagcattagaggtaggcacatcctggctcataatcaccctgtcagacacagagtgccctccactcaaaacactcaagcagagagtagccatccagggtgtttcaaaaggaagttcctttatcctgggaggctgagccggattacatctcttccaactctaagattgtcttccctcgcccagaacaaacaggatgaagtacaactctcaactgtctccaagagttgttttctcttccaagcaccatacattcattcaacaaaacatttattcagtgagcacctatgtgtcaagcactgtgccagggtagagcataagtgtacaacacaaaataaaatctccaaaggaaatggatttaaactttttaacaaaagccaa

SEQ ID NO: 182033 - DNA, 1025 bp, Homo Sapiens
tttatttccaagaatataaataccatttattgaaaatttaactcagtgtaaaaagtttaactataaaagtatatatgaggctattttgtaagaagaaccacaaaggataatgtttttataattgtgcttacatcaattaagaatatgagtaattggaatggggtttgaatttagcttaactatcaacaatagtaatttaaagaatttcattttgaagacaaattttatttgtgcttataatgaaaatgtactctttattctctaataaaatcttttgaaatgcttttttcatttagagacttagacacatgataccacgtcaaactgatttcaatctgatgcggattacatacaggtttcaagaaaaatataaacacgtgaaagaagatcttgcccatttgcattttgagaaacttgaaagatttcaaaaactcaaggaagagcaaagatgttttgatatcgaaaaggttctatagaactattttttcagaaattcattagtgcatagtatacagtttgtgatttatgcgtatagtacacattgcataagtagtagtggagcacaagttgcacttccctgatgcatgactttgtcctgccctactctcaccctttctctctctcccctgctccttttctccatcctgactcttgctgactcacctctacttgtggctgagaacaagaactgccatcttctggagtggcaagacaactgcattaccttcactggtagaaatcaatgtttcagctgctttagtgatggagggttgctattagctaccccattggtcaaaggcacatgaccattgtcaccactgagggagatagatcagacaatgtcctctcgctttctctcttttgcaaccttcggtcctgccccatttctctgttcttggagatgtgaggtaattctttgcttgcttaccttttcaatcaccttgaacaactctcaacttctttctggcccttgcttcttgctttgactaactctctgctccttctcagatttctttaaactcttt

SEQ ID NO: 182034 - DNA, 269 bp, Homo Sapiens
ctcaccattgctgaaaaaggtagtcaggattcaaatccaagaaatctgactctaaaacctatttcttagccagtatattatatgcaatgcatgtggaaaacaattgttaaaaattacttatcttttattaagatgagccaattcattacaataacaaaattaacatttacataaggctgtttcaaagataaataacaaatttaaggaaccagtttaaaataaggtttgtaaagaaatgaaaaagattgggggccaggaatgttggctca

SEQ ID NO: 182035 - DNA, 363 bp, Homo Sapiens
aactttgtacaaaaaagttggctctcggcgcccccgcggccccacgctccgggcccgtcctcaaagcgcgcggcgcgaggcgcgggcgccggggcctgaggcggcgggcgacgcccgggggcctgacggccggccccgcgccatggtgtgagcgccgccgcccgtgcacgctccgtccgccctccgcgcggcccggccggcagagagccccgaacggcccgagagcgcagacgagcccgccgccgccgcccgcggccccaaaaggaaagtaatgggccggaacggctgccacgcgaggagcgcggacggcgaactgatctacggctgagtttctcagagcgacaaaaacatttattgttattt

SEQ ID NO: 182036 - DNA, 1630 bp, Homo Sapiens
  misc_feature (776)..(789): n is a, c, g, or t
  misc_feature (896)..(1010): n is a, c, g, or t
  misc_feature (1032)..(1292): n is a, c, g, or t
ttggagaaacttttctgagaaaaaatacagtgtaaaaagaaagaaatcaagatccaagaaagtgagacgacattgagaaaatgaaatagaaactttctggaaaaatattttaatagtgataataacatcagattttaatataacattccagagaattgtggaaaatactgcatatatatgtatagactctgacacatatttacatatatatcaagtgtgcttagaaaaatgtatattgtaaagcaggtgagcttcatttgattttatttttcagagtatgaacattctaagagaaagttaaaacaatagcaaattgtataattgtatccagaaatgtatactcatcgtattttaaagctaaatttattttttaaactagatcccttcattattctttatgccccagagtaaatcccagatggatcaaagatctaaacataatctttcatatgtaaaaatataaaagtattagtagaaaacaaatatgaatgctttgatgatcttggaatggcaaagtcaatttttgcagcatatggtggacaaagaaataatttctttaatgtatcaatagctcttgcaaagcaaaaggaaaaaagcaaactgagtaagggatatgaaaaattagttttctgagccaccgtgcccagcctaatttttgtaactttttataatgagacttacacattgatttaaattatatacaggatgctcagccagcacaaagctgtggtgagatttgggcccaagtctccgactccagattccaaaccacattnnnnnnnnnnnnnntcacctgcagactgcctatagctttaacagtctctgtctccccttcttcacatccttccggtggagaaaagtttgtgaatattaagtaaatttgattcaatagacannnnnnnnnnnnnnnnnnnnnnnnnnnnnnnnnnnnnnnnnnnnnnnnnnnnnnnnnnnnnnnnnnnnnnnnnnnnnnnnnnnnnnnnnnnnnnnnnnnnnnnnnnnnnnnnnnntgagccactgcgcccagcctgnnnnnnnnnnnnnnnnnnnnnnnnnnnnnnnnnnnnnnnnnnnnnnnnnnnnnnnnnnnnnnnnnnnnnnnnnnnnnnnnnnnnnnnnnnnnnnnnnnnnnnnnnnnnnnnnnnnnnnnnnnnnnnnnnnnnnnnnnnnnnnnnnnnnnnnnnnnnnnnnnnnnnnnnnnnnnnnnnnnnnnnnnnnnnnnnnnnnnnnnnnnnnnnnnnnnnnnnnnnnnnnnnnnnnnnnnnnnnnnnnnnnnnnnnnnnnnnnnnnnnatatccctgttcaggagcaggatttggagaatataagaagcatatcttttataatttaaaaacttgctttctaagatttgaactgaaagatcttttttgaagatgagtgtcatggaattgacatgatttgaagtgttatggcacttcctttgaataaaaaaatcgaagttgctaacaagttccatgtacttaaaaatattgggacagagcgctcaaagctatgaaaagttttgggccacccatgaatatgagataagattaacaagagaggagaagaagtgaaaatatggctttccatgcatttccaattgtatgattaccattgaaggctagtgatg

SEQ ID NO: 182037 - DNA, 1768 bp, Homo Sapiens
ttgggtggaatcagccaggagcccagtgaggaagctcagaaccccagtaacagcagagcatctttcagatagctccagagttttcctgcttttctgaggaagctcagcatcactgccacaatacggaaagtggtcttcattttagcctatttatttttaggcagagagtggatggttatttgtgtgggacttttggtggcgatatataatgaataattaagttaatttctggtatgcataatggccagtcctgaggcccagctgaagacctgtcccccagaccctgcccgctggcttcaggctgctgcttctagacagaggtgcactggacgggatagttttatcaagagaatccctaatgtgtcattttaaaccagctgtgctttttattcattctggttgagcgtataggtttacactttacccctttttatacttggaataaatttagttccagcagatctagtagcactccagaaaccaaccccatctgttccccataaaaagaacattttctctgctctccagccacgtgtcttggaatgtaattctgttgtgcctttgtttttatcactctcttcgccccaaaagcaactgctgtaagcttttttctacttgtcttttctagtccccaacctctacctttttcccttttcccagccctaatttctggatgcacttctgtgatccaggtattttaagaaccagttacctcagacctcatgttgaacagtgtcgccatctgggtcctcttgatactgcagacttttaacgtacacatgcaggaaccctgctgagcgtgggcacttgttttaaagcaaaactcttcccaaggactgaagaaagggcttctggcaagctcgtcatggcattgtggtgggatgggtctagagtgtcatctgaatggtgcttcctgtgttcctctttgaattctgccattttcagtattcttgtgtgtctgaataggcaaagcgatttaattggctggtcttgcacgcaaattagttccaaagataagctctttgtaacacatttccagtcgctaatgctcaaatgtagaacattcctttaaatggcaggataaaaaacccactatccaccatagtgcattttgggaagatgtctgtagcatatgttgctgtgaaattaggccttgtgggatatggctgtttgtcattttgatgtattttaaataaatatatatattttttaaagagccttttttaccagttcaaaaagtttaattaaccagcagtcaccgcatctgaatttttgtctctggggcatagatggcagaccaagattaaaagtggtaactcagctatacgagcatgggctaccttcctgggctctcctgcagtcctgtagacctgctgttccgcagaccatgggacacaaggtcagtgtgttcccagtgagggtcccaagtcagtcatcttaagtgtttgttctctgccccattcagtggactgttgacttcagtccctgcaagtgctttagcccgagtggggttttctcagagcactgccacgagttaagtgtgtgtttagccaaataatttctccgtaagggaaaaatgcagtcacccaaattttaccaacaatgacagagatgagagtagaaaagattagcaacatctgagttttaaacttgaaagtgtccaagtcatcatgaaaggccgactgggagcaagtgattattagagattcttcaggagacctcatctgaaaatgttaagactgccagtgaagggaaggaattgttaaat

SEQ ID NO: 182038 - DNA, 1715 bp, Homo Sapiens
ttgggattgatatatacaccagcctatgtcaattggggctaattattttaaatgaccatgtcaaattgaatttggagacaaaatctgttgagagtgcttatgtaattaatgatggttctactaatctaaattttggaaaaggtgataaatagactatactaaaatctctctatgccatagaattggattatcctgtaggtcatctcattgggtataagacaaaactacctactttttttcaaaagtgcactgaaatcacataataaagaggctttacctcttggttggtcctgtgaccctaagttctagtcagatagacacagaggcaatgtgaatttgagtggcatgagcatgattaggttattccttccagcatctagtatagcacctggaatatagaaactgtctaatacatatttattcagtgaatcaatgagcagaagtttgccaggacagtacacattggcaaggcacataccatatgattgaagtgcttcatgccattacagtccatcaggctgataaagtgaattatttctgattatttaattacagaaatatgaatttatcttcaagggtgtagtgtcatactgctgtacaacacagtgctttatttatactaataatttaggagactgatacttccaaatgatagtggacattactatcacaagaatatcacttttcatcaaactgcaaaaatacagaaaggcaaaaaacctgacacttattcttaactgcaaattaaattcctgcccaggggatatattttagaggggatgaatggcagcttttgtgttttttttaacaagcttgaaagggaggtggaaaacaaagaaattatgtaaatggcatatgagttttattatctaggcattcgttagtatggggaaacctgataagaaatgaaaatcccaaatgatttcagccttttcatgatggttgaggttagatttcagagatgtacagagactagagcggtggttagaaagaggatatatgtagtcacagcagaaagacgtgtctaagtttaattttattggctttcaagttcactcatgtatacttagtttgtccatacatatgtctaatcaggaaaaatgcatgtatagattatgacaattcctgaattttgaagtattggttaaaagacaattaaaggccaagaaaaccatggtggaagaagtaagcgaatgaaatgtagaaatatatgtaaaattagcaagtgtcaattttaccaagtagtgttgattttccaaacaatgaatttatatactatgctgagtcacagagaagaatgatcacatgttacttaatgagagcagtttacttttcaaataaaataggtatgatgaatgtcttaaaaatatcttgaagttgaagaaacaaaaatgagttatctcaatatttaccaagttaacctagtgctgtatatatcccaagatattttaggtaaatgtaagtgtttaatcatgccagatttaaactagtctgaaatatagggtatacatatatttctacttacatttctttattttatgaaatatccgaccatgttgcagaaaataatgcaaaacctcatgtaagttaactatgaaagatcctgtgagcacattggcattgagtgacagacaaactaaaaactggcaaacagtattttaatatgggggtcactctgtggcagtattctaatattggattttcaagtagattag

SEQ ID NO: 182039 - DNA, 1163 bp, Homo Sapiens
  misc_feature (228)..(254): n is a, c, g, or t
gaaaacacaaagagagaaagaggctgctgctgttcccagtgagaagttatgtctagccccagaaggcctgatgactgagtcagctcaagcactctcttcatgcactgcaggctcaggaggcattgagttgcttgctttttctatggaattagagagcctattgaaattctagtgcacccctccttttgtttgtcaccaagtcacatggttctgtcttcagtatcctannnnnnnnnnnnnnnnnnnnnnnnnnntgaggaacaaaattggccatttaaataaagttcttttctagtgagtaaagaggtttctcagagccagaaatcactgaaaagagagtctgtcgaccctgcccatggaaaagcccagagatttctctaaccacttcttgccaaacttcctagttttgtgattggatgtttcttggtttagcattgtttggtgctgaatacattttgcaattcttttgttctctgccctagagcttccattaccctggacttcaactcattaccaaattaaagaattcttttagaagatttcttttaagagtcaggtcacaacagaaagggcgccctcctgttctcctaaatctcaagggcatctcaggttgtgtctgctcttacgttgcaccttccttttgttcccttttaatgcagcagcacactggctatagcagaggcagacctgatttgattatctgataccttttccacaaaatcatatatcccctgctcccagccccaactaatcaaataacatcttctagaacaacagaggaaagctccagaatgggtgtatatcctgtgactcctggccagatccaccttgctccctgtcttcctaggggtcacaggtgttgggagcattgtggaggagccccaacaaggaagcaacatatggctttattatgttttctcaggaatcgaaggggttttataaggggcatatctcatttttgacttctgtgctgagagaaaatattgagttttgggcgcaggcagagcacagacaggacagctggtgttcctgtgtgagggaagtacacatagctcaaggctttaggactgaatgtgaaacaaacatacctggaggaaaacttttttcattatcagaattcacaaattcttactgttcatgggttgaaaaagagtatttgccaa

SEQ ID NO: 182040 - DNA, 644 bp, Homo Sapiens
ccacccggatggtgctacccacacccacgcacttgcatgcagttggtgaacatgacgcacacagacatgagcttggagaagaccttcagcagctcggggttggtgagcatgcagtcttcaggcaggtgtccaggaagcctgtgtggtggccaaggacgtcgtcaatgttggaggcggatttcaggtttttctccaggatgtgccaggtcggttccatcacttcgaacatcatgtagtattgaatattctggacgaagttgagcattcgctgccgcagagtgaaagccccagcaaacctgagtgacacggaggacggaggacagccatggaggacgcggccccgacagcgcccaccaagtgacacggaggacggaggacagccatggaggacgttctctggacgtggctatttcctctgcagagcaagcgcccctcccagcacaccagacactcacggccgctgctcctgcgtctgcccagcacaagctgtcaccgtctaccaacctgtgccctgcagggacacccccagccagctggacggtggagactgggacgcgggctccttggtggacggacccctcggagcccacgccaggaaagtgccacacaacagatgcatatttgtgcttcatcatcaagatgag

SEQ ID NO: 182041 - DNA, 1289 bp, Homo Sapiens
ttggctatctctgcagtctgtggtgtgaggcttacacctctttcctaacagttgaattgcccatgaaggtgttttatacttacatcaatccagtaggagatggagtgagtgcttaggacactcttagagccagatgagctcaagggtctgctttgtcatttttagagaacctcatggttgtgaaagctcactcagctttgctcagaggtttatatcctcctcattacttcacagacacctaggactctgttttattacagggttgaataaatattagctttgcaattaaagataacagtgtccattacatgtcagacacgagggccaagcgttgcatatattacctaattgggtttttcattgcagaactattattctctttttaaaaatcaggaaaccgggctttgaaaggtaattttacccagcttacccagcaaatacagtgtagacctggacttccgactcaggtctcattggctctgaggcccctgggctcgccactgctctttgctgactcgttgtctttgattaagacactgagtttcagtctgttcctaggccctgaaaggatggtagataggccacatctgcttttctttcggaggaaacaaatattattttattgcattatgctaaaggctgtcacagatttataaaattgtagcaaagtgcctgaggacatgaagggcctaaatcagaggaatagtagatgaaacttcacaggaatatatcagacaacataggcgtctttagagaaaaggaaggggaaccaagagttccggtcctgctgcccactgtcctgcttggacccacaagtgagccagggcctcctgtggcccctgcttacctctgtgctccctgtcctggaggggtagagtgacttaggtgcttttgatggaacgattaacatcacgcctggcctggcgtggctccgtctcccgtctttctaggagatgggaaataaggtcccagagttttgtggtgctttgactcagctttcggtctgctgagactcactcacaaatgtgtcattccgttctgccatccgctttgttttctttctcttttctcagttctcagaatcttttttcctaattattcaaccaacttgttgacatccttctcatgcctatgacaggaaagcagtcctcaccccagagtggccctaagctatgtctgtggctcggagccctctccacggggcctctgcctgggatggtccctgtgatgagttaagtgaataaatgatgagatatacgtgagagaatttcacctggtaacaccctttg

SEQ ID NO: 182042 - DNA, 1590 bp, Homo Sapiens
  misc_feature (385)..(403): n is a, c, g, or t
ttggccaccgtgcccgggccccacactttgtttttatgttagggcagttggaggaactgaactttgatcctgatcctttatatactcccatggtgaaacttgagcccattttacttaacacaatatatccgtgcattaggaaaacttggtagagaagattatatgcagatataaaatatctaaactcatttgttatgaaccaacgataatgagggaaaacttggacatccacatacagattttcttgaattaaagaaaaaaaccagacactgacaaaggagagctgaactgataaatggtaccctgaaaactgcagaaatgagggaaagaggcagtgggccacaaagaactttgtccttttcagagatccccagagaagccctgnnnnnnnnnnnnnnnnnnntgacagaatgttgtgtttcaaagaatgagcagattaacggatatcaagttgtgtggcctgagctgaggataaagaataatttgcctgaggagttacagtactggctggatcactacaggccttctacttggaatatcttcccatgaaagtaaaaggaatataactaaggaagattaaagttgttgctgttggaaggaagacatactaaagaaactgccgaaggccaggagagaagcaggaagagaaacacggcttgaagttctgtaagaatcagagttgggcaagaactgccaataagggagccagcgtagatctgagtactaaacacctgagcctccgagggtttgtgtgcgagggagagctctgctgatgggacatatgcccagaatcattaactgatttatttgggccatgtcactggtggcattattaaaagactctgccaacatcctgctttatggaaaaaccaagtggccttggaagaggctaagataaagtttcaaacttgggctccacagaagtggaacttaaggctggggctagtaccaggaccttcatgtatcaggttagagattttgatgcttttggtgatttttgtgccaagcatgtactgtcacctgggatcaatctattactctttctatgaaataattattccaaagaggctgacagtccagggaggagatagcccagtggaaggactgtcctacttgttacttatgcaaggccagaagcacctggttcatctgaaggtgaagagaaaccattttgtgaataactttccagtctacagttaccacaatggcctcctggggcaagaatcgcctttcatctcacatgactgccactatgaaggctacatagaaggagtgtcaggttcttttgtttctgtcaacatctgtgcaggtctcaggggcacatcctcctgattaaggaggaaaaatcttacagcattgagcccatggactcttcaagacggtttgaacatgtgttatacaccatggcacatcaagcgtgagtctcctgtggtgtctactagctggcaacaagggagcaggaagcctcatgatctacaggcactgtcctacttgtggtcacacaaaaaaggctgccccggcagaagctcctccagcagtggctccaccaccggccccagaaataaagccagaagcagcagaagtggccac

SEQ ID NO: 182043 - DNA, 1509 bp, Homo Sapiens
  misc_feature (1293)..(1358): n is a, c, g, or t
aaaaagttggagccctgatcccccatgagctcgggcacaacctgggtattcagcacgaccactcggcctgcttttgtaaagataagcacttttgcctcatgcatgaaaatatcacaaaagaaagtggcttcagcagctgcagctctgactacttctaccagttccttcgagaacacaaaggggcctgcctatttaacaagccacggcccaggggccgcaagcgtagggattctgcctgtggaaatggtgtggtggaggacacggagcagtgtgactgtggttctctatgtcagcatcatgcatgctgtgatgaaaactgtatactgaaggcgaaagcagagtgcagtgatggtccatgttgtcataagtgtaaatttcaccgtaagggatatccttgctgtccttctagtcgttcctgtgatctcccagaattttgcaatggtacatctgcattatgccccaacaacaggcataagcaagatggctcaaaatgtcatacaatttacgagtgccttaaagttcattgtatggaccctaataatcagtgcttacaattatatggatatggtgcaaaatcagcctcacaagagtgttacaattcaatgaacagcaaaggggaccaatttggaaactgtggcatttctaccagtcctgggtcacaatatgttcggtgttcagatggtaatatattttgtgggaaacttatatgttcaggtattacaggcttaccaaaaatcaatctccaacatacaatgattcaggtccctcagggagatggctcatgttggagcatggatgcctatatgagtactgacattcctgatgaaggagatgtgcacaatggcacttactgtgcaccaaacaaagtctgcctgaattccgcctgcacagataaaaccccagtgatttctgcctgcaacccagaaaaaacttgtaatgggaagggagtttgtaatgatttagggcactgccactgtaatgaagggcatgccccccctgactgtgttactgcaggaagtggaggtagtgtggacagtggccctcctggtaagctaggtgggacaccttcaggagaaggtgaaaatcacaatatgactcattccagacgtgaagaacatgctgtagacatgatgatattatcattcattatactttttataatattattattaagtacaattatttgatctgcttgcttaaaaaatcaccagaggctgccccggcagaagctcctccagcagtggctccaccaccggccccagaaataaagccagaagcagcagaagtggccannnnnnnnnnnnnnnnnnnnnnnnnnnnnnnnnnnnnnnnnnnnnnnnnnnnnnnnnnnnnnnnnntcagattcctaaggttagaaatagggagatgaagccaagtatatcaaactcctcaagtactgagtgggaatgagatgtttggtgaagtagaaatagatagctttagtggctctgactcagatatactgatgtagaaagaaggattctttca

SEQ ID NO: 182044 - DNA, 875 bp, Homo Sapiens
ttggaaagaaataaacactctatgtaagggttactgaaaggattaaatgaggccatataaacatataggcacagtgctttgtggagggggttctgggtaaagcactggctccttcctcccttctcagctacagggcagggccttgtctgccctggtgtaggtcatggaccgtcttgggtcccccttccattgtcaggctgtactgggttcctcccacagggtctggcctaggagcaggatgtgttgtgagtgtggtgtgactcttagtctctgctttctaaggacttgaaaaatagaggaacccaggtgggcatacttggacagtgttgccctgttgaccacttctcgctgaacttgggaaggagggaatgttttctggatgggaagaatccagtcaggcctcctggagggggtggtaagaatctcaagccttgaaggatgggaaagagcacaataacaacagtgacaaaggatagatcacaaagcatcatggactcacctgactcatgctccgtgccaggctgaggaagtgttttctgctggcagtgagagaaggaagggcattctccaggtagaaggagctgtttgtgcagaagcatgaaggccgctaaaagggggctgctgatagcaatgaggaggctggggctggaggcagggagtctgaggcggcctagtaaattgtccagacctgagatggggccatgactacctggagcacgacagagaggagaattccagagagggcccaattccagagatgtcagaagtagactcgacatccactgtattagacttggccaggccgagggagagagagtagtctgaggcaagcctagttatgggtcttggacactgggaccaagggtgatgttccc

SEQ ID NO: 182045 - DNA, 741 bp, Homo Sapiens
tttgtacaaaaaagttgggtgctggggaccaaagcttttgcagtaccttatattgtagttaaaattttatttaacatatccttcagtgagctcatttcacactgtagcctcttccttaaaatttgtggtgctcctgtaacagtaagaactaattctgaaataaaagacatctcctaatgctgtgcaaacatagtttacatgtattgaaggaggcagttgttaaattgagtgaccaatttaagcaatcagatatttgaaaactgcaccctttagttttgaaactgtgaattagaaacacttttcctgctgtattactacctgctttaacatccaaatatacagtgattttaaatgataacatactgtggttattagattaacagcttgattttgaatgttcagatgataatgcagaagacatcacttctagtaaggattttgactagtgcattgatgttgaagttggtgccatttcaaaatgtggcaggtgataatcttttaccataatttgcataaaactgtaatagaagtttattttgagatgttagtatattatgtactatgcatttctgtggtatagatgttgtggatatatttaagtatttggttacatggttttacaataaattacaatactgcaggctctaggactgaacaggagactgacatgcatatattgtgtgaatgtcttagttgggtaaagttaaatccaaatacttcaactggctttttcttcagttt

SEQ ID NO: 182046 - DNA, 1014 bp, Homo Sapiens
  misc_feature (418)..(477): n is a, c, g, or t
  misc_feature (695)..(712): n is a, c, g, or t
  misc_feature (774)..(832): n is a, c, g, or t
  misc_feature (928)..(937): n is a, c, g, or t
aaatgtttaaaagaaaaaacataaaactcaaacaaaaccttgtgaacagaccagtactttcatccccacagctggaggtgtcttgccccagtcacttacacttgggtgagtggtcctgtagttgtttctctgaggttacatttcgtccattttccagttctgatggttcttttcctgccttgttagttaggacaagacacttccatttaaaataccatgtgagtcaggaagagagcttcttgcctggacacagggacacatgaacacttgttgagtggtgtggtgtatgtgtgtgtgcttgcagtttgaggggagaggaaattggttgatttctgatttgagacaatatggaaccctaacttttttataatggcagtcttctcctttagacttagtgcagctgctgaagacaagattnnnnnnnnnnnnnnnnnnnnnnnnnnnnnnnnnnnnnnnnnnnnnnnnnnnnnnnnnnnngacattcaaagtaagacagggggaggggaatgggcaatattgaggtagcacagattgtagtgtgagaagacaggttagaaatgggggtcattgctgggccatcaccacggggaaatctgctgagaaggttttaagaacaccacacaccagtttaaagcttcttgttttaattaaaaacaagcacatattaacagccacatgtgaatgccaaatgattnnnnnnnnnnnnnnnnnncaagagccatctacactgcagctagggaaagcaaacttcttggcttaagagaagtgagggannnnnnnnnnnnnnnnnnnnnnnnnnnnnnnnnnnnnnnnnnnnnnnnnnnnnnnnnnnttcagaaaagccactccagtctgggaaaataaaagcacagaccatttctaatgactggttttgtttcaccagaagtaaacagagtacttagggtannnnnnnnnnaaatagtaacagttgtactaatttaaaagccttttcattgaagaaggaaaaaatctgtctacagtgagaaaagccaa

SEQ ID NO: 182047 - DNA, 989 bp, Homo Sapiens
  misc_feature (293)..(302): n is a, c, g, or t
ctttgtacaaaaaagttgggtcagaagttccttaaaaaaaattcatatcttaaaaattaaagaaactgattttagctcatgtatattttatatgaaagaaaacactcttatgaattgatgactatatataaaattatattcactacttttgaacacattctgctatgaattatttatataagccaaagctatatgttgtaacttttttttagagaatagctttatcttggtttaactctttagttttattttaagaggggaaaacaaaaatatcttgcaagcagaaccttggnnnnnnnnnngccatgaacacttattctaaatgtaaattaaaagttgagccaaactctttgtgtatatagcatcttaaatatattatcacctttgatgtaagtacctatgtattgtatggtcaccagattaaaaagtatatttttgtggattgccgccaatctggggggaaaaggcgaggtcctttattaagtattcactgtttaatatttactattttgttaaatatactgtactttggattttaattattagcccagttttttcagaggattgtataaaggggtttctcccctcactggtggtgaatgtgtgatgttacattgtaatctttgtgctgtatgggttgagcatcattatatattttgtatgtgtacataaatagcaaagtggcaaaaaaaattggtgttaagttcatcctgcataagtataaaatgtgttgtaacagattttataaggcattatttaaaacttgccttttgtgaggaaaaaatgtagtagaaaaagctgacctaatttaattaatattagagaaaatggcaaaatagtagatgagcacaaatgttttataagtggtaaatgattaggggaaaataatcatggggaaagggatcttttttccttgaccctctgaaaacagaacgatgcagctggttacaaaatcctaccgttatcagctcttctgcacattgcagtga

SEQ ID NO: 182048 - DNA, 1310 bp, Homo Sapiens
ttggcaggaactcagctataatttctttaagctattttattaatagttcttcacccaaatttcaatataggttttgaaagtctcatcttgccaatagtgaaagtagtttcagttttaaatgggcacttttaaaaacctttttaaaaacttaaatcatcaggggaggggaatttcaaatacatggcagttaaaacttaggattcttgtgcagtttatttgtagctgtttgttaagctgtgagctaaagtgaatttgcaagatcatccacctctttgttagaactttactttgtctttggagagttctgccttttgtaggaataccctgcagcaccttctgccccctgcagtccaaaactaaaaatgtgtcaccaagtcagagtcattaaaagggtgggaaaaattcctttaaaaaacacggtgtttagcttaagaggaatattccgtgtttatttcctgtcaaggggaactggctcaattaaggtcaagtcatattttcaaccaaaattacatactacagaggaaagaaagcatacaaagctaaaaatgcttacctttacatttttgttattttaattacttcccctaatatagaagtactgatttttttcaagcatgccattgtttgtaattcatttctgtttttaagattctagattgtctacaagcaaaagaatgtatttctttagtcattcggagtagcctgctgtagtttttgaaaggtggaattaatagcgtttgttatttaattttttttaagttcagaatgatgtttaaatatctgtaaaggccagttctggagctttattgaaccccgtccatctgtgatttaaatattctctatggcttgtgaattcttaaaatttctggcaggattaaagtacttacagccaaaagagcttcctctggggcttgcatattcagtttcctttgtcatgtaatcatttaagactgaactctgcttattgatatgtagtattctattctaggttgagctcaaactggtagctgaaatttaggagacatttttaattcatttagtattaggcatcttttgaccttactaaagtaccagtagtagaaaaatatttttgtgtgatgaaactgaaaacatcagtggtcgtatttaataaaaaggtgactagtactgcccatttaaagtaggtgtctaactttgaataaatgtggatagcaatgaataagaaatgaccatgcatggtgttagcagaaaattttaaacatgtgttttacctttaaaatactaaactggggttcagcgtagtatgtaattttccttcccttatatccatg

SEQ ID NO: 182049 - DNA, 917 bp, Homo Sapiens
cagccgataagcattaattattaataatggcttacaaaactgtacccttttataaaggtttgaaataaagaatcaattgagggtcccaaacatttaagtggaaacccagtttgctcacttagccacaaggcatacatgtgccttgtctcactggaacagctgccaccaattcaagttggaagatactaggttcccggcaatgacatatctccaaagttaggaacatggccctttctccagaacatacttttccttctgccctgttctacctgtaatgacttacaaataaccgcctctccctatgctgtccttctctgactttgaaagtcagttcatcttaataactttggccatgggtcacccaaaggatatatatggcttgaggtcccaggctagggaaaggttaacaaccagtagtcagcaaagaccggtctaggaacataactgagcattccaagagattgaaaagttttcaacattcatagacatcttcagaagctgttgaagttttcttggatttgctctaaacatatggtaataattttcaatgtaaataagagatctataaaaggcatttatatcttgccttttccatccttttggctctaattaaaggctttttgaaaagcagtatcaagcacaaattttagtaagaccacagttagtaaaaggttacagtctttaaaaaatctacaataaggaacaagtgctgggaaataaataacaaagcataacagcaaatagtgccttgatatattaggttaaatatcttttcatttatctcattaaatccatcttttctctaacttggcaaaggttatagcaaaagatgacatttgtcatgtgagtagctcataaaatgggagtggctatgcttctgaatcgcattcacatcaccttctaggcatattacccaa

SEQ ID NO: 182050 - DNA, 868 bp, Homo Sapiens
ttggcaaagtgcaaaaagtaaccttaaagacaattatttctcacatttcttgaaacgtgactaataagaattatctcactaataaatgtaaatacgtcctgaaaaaattctgctctaatcttttccttcttcctccttagtctgttactagcttgtatttcattgattctggctctgatatcaagatatgtcttacaatctgtgatgccttcgtgttttaattggcagcatgtttattctttcttagtgatataagataatggtggaattatttggcaccaattgatggtggcttagatttgaggaagtatatagttttccagctgttcatgggtaactatggcatttaatttccttacttcacaaatctaattatattaaaaactgcctcagaatgtgttacactgatagcctcctcctcttgcctagtcaagtgtgctatttttaaccagatatgaaattgacatgactcaaagaaaaaactatcttgaacctgtgtttgtcattcaatatgtatttgaagtcttatgtcaatgaacttgttattcagcattcttttatacagctttatggatggatcattatttagccaatctctactgatggaaatacaggtcgtcatttttcacccatattttctgatacccttaagggcttttttccttcaatttatgatccatctggaatttattttggtacaaagtagggatccagctaaaattttgtcaaatgcttatccaaatgcatggaggtatttcctaatttataattctatcattatacttggatcttctttatatttcctatttttttcttgttcacatgctgtgctatttagacacagaaattaagtaataatagctggtat

SEQ ID NO: 182051 - DNA, 907 bp, Homo Sapiens
tagagtgtctgtctgcaattttctgtacctttaccaagtctatgatctacagttcatcctttgattttgtgtttttttcttatgttagtttgaagtctgtttctatcacttgctatcaagacagtcttgttaatacagtcttcttagtaaagtccaacagtctcttctcagttttctattatcagttcctctatgggatctgacactgttgaccaaagcttctctttttcttgttaaaaactttctctcccttgtttctttattaaagtactcaatttttcctccacattctctgtacagttcttttggatctccttctctgactcctctttgcccatatagcagataactcccccaaacttaagatcttgctgcaaagatttgttccacctccagcattctttctctgggctaatgacatcagtagatttccttcttcatttttaatgaaatatttcaatataccataggtatataaagaaaaatacaatgaatgcccatgtgttaaccagtcaactaagacaatatattaccaatacagttgaagctatgaacgtctctcctgatccaccagaaataatcactatcctgaataactttgttgtttatttttcccttacctttctttatacttttagaatatatacacatatagactcctcaaccatatagcaatttaaagacactatttcacattttaacaatccctgaaattgtaatacaacttcccttcctagataccacacaatacctgctattatttaaacaatatttttcttttaaattgcatattctgttgattgctggtgaatatgagtcctattatctttgtatattactgatccagcaatcttgctgaaatctcttattaattatagtaatttgtcttcagattctgtggagccaa

SEQ ID NO: 182052 - DNA, 852 bp, Homo Sapiens
ttggcacagatcggctcaaatcctgttcttatttctgagttcagtccattttctgtaatatggatctctctgtgctttgttccttgtcgataataaagtccataataatacctgtaatacctatttcttagagctatgagaatcagatgaatatgaacacaatacctatacaaatttccagttctattatgattattagtagcattcatttaaccacattaccaaagtgttcttttaattcactgtcactttatacaggatttgtgaatacaacagtggatattttatctgttagactccttgtagttatgtttgggttgctctgagaatgagttttacacccttccaattgttggcaaatagtcatactgaagaaaaactgcccatctgttcagatgctagccaaaacatcacaaacagtcaaaatagcagattcaaccctatgtgaattgtgatgagacaatataacaggatataagtcatactgtcatggggtctttggggtgtcacttttctggccggaaacatgtgactggtggtgcccttgcctgagttttgcttggacctgctgggcttgttccacccactcgccctggcaggctgcgctcagctcatgctaccagcctggatcctgtgcttcaaagggagtctggagtcaggcatggagtggtgaggggtgtgtgtcagcaaacgtggggtccgcccactgtgcggtcagacacaccagctgctgctatggtgtgggcagctccaggtgctggcgtgagcaccagctctctgtgaggctgtggctggactgggttcactgcaagcggctttcctgtctggcaccggggaatgtggtgacatccc

SEQ ID NO: 182053 - DNA, 984 bp, Homo Sapiens
cagaaaagacttgggcttgtttcctgagggctctgtgcagaggagggcgtgttctgcactttctagcaggatccttctagctgtgcataggaacaaaccacacctggccttattttatttttaatttctgttcttgtattgctataatttactgatgatttcttacccaaagatcctcggcctgtccccacccaaggggactgccttccaccggggacccctcataagagttactcattaggatggtgttccctggggttcctgtgtgtatgacgccagggcctgtgcaccgcctccatggcccatctccatcagacagagctgggcagtggtgttggccctcgaaatgaggcttgtgccctggcctttcctggcctgggggctgagtgccaaggccacctgtaattaaactgagcttcctatgtttacttagcaagcactgacctctcatttcctggggccctatgctgagtgttccacagctattctttaatctttaaacagcccttgggacgcaggcactattattaacctcacatcacagctgggattacaggtatgagccagcacactaagcctgattcagagctttgaaccctagacatatgaacagactcagcttcgagttccaaaacaccaatgccacctccagaaacagagacaagcctcccaagataggctcaacctggtccagttagtgaccagcacaggagaaaaatctgtttcactcctcaacccagtgtatagttagagacatatataccaccctaccccctaccaaaaaagattttatcctcctttttttaatgctatttgtgagtcactaagctgatttgacagcccgctgggtcatgaccccctgtttgaaaacaacagaaacagatgtccttcctgggtctcagcccctcctgtgtgtcgaggtgtagaggtggggtcaggtgtgggtgaaccccccacccccgtctgtcccagttatgccttgca

SEQ ID NO: 182054 - DNA, 563 bp, Homo Sapiens
ggctaatgcatcagccaacaattccaaaattatcgagcagaagagatgatgtggtgctctattgctgtaaattccaacactcctactttgcttttttgttctatttttccttccaaatttaacctgccttccactaacagttttttctacttacactattaccttttcttctttctcactctccttgcttgctattttttcccatccccttgggttctcaatttattctattattttctttatgattcctctgtagtttgacttttctttgtcctacttacacctcctccgcctttccctctttctgaactgcctcccagtgtgggtcccctttaaggcattcctgtccagcaggagcttggggccagctgcagagagcaatgggtagggacttaccttggctggcaaatggactatagtcaaatgtcagccactggtgagatcaaattgcaaggcaattttaaaccgtcatgaggcccaaatccacagaacagtttgctgcctaccacttaccatgcatggttttcctgctttacagagtcctttaattagtaactatccaa

SEQ ID NO: 182055 - DNA, 894 bp, Homo Sapiens
ttggcccaaagtgctgggattacaggcgtgagccactgcacccagccagaaaggtggttttgagtcaggaaaaaggagtaaccagtcagctgtccctttctactttgtaactataatgcttggtctagattatgtggaggagtgtatacacggaaatgcaaaacaatagaaataataaataataaccttttgagggttgtgggctgctgttaggctgactgaaacagctgcctgggtggtggttagcattggcctttttttgaagctgtaacacttggattattttgaacagttctgctaggttgcagctacctgaacctttcaagcctgattcattgaaagtattcctagggaaaggccgagcgaatttcagcatggggcttaagagtaagcttagtagatagatgtgggttcaacatgtaaatagtatcactaactgctcaggattgaataaagactttcaaaatgagagaacttttgtaaaatccatggaacatctttagtacattgtaggtgctcaacaaatactaataattctggagtagacacagcctttggataatatgggtaccagtattacttttggagcctaaatgacactcaaagcctgctaccttcacaccaaagactccactgctctgtagtagcaacaagaataaagggaactgaacatactgaaatggattccgagataaatggtgaacactaccctactctgggccatttagtatatattcctggcacaggtctaggtcctctgcagtgcagtcattcaccattaattgtcctttctatgtagcaggctctggagatactgagaacagtctccgctttcacgaagttcatagtcaagtaaggaagaccgtaaatgacaatctccgtacagtgatagaa

SEQ ID NO: 182056 - DNA, 869 bp, Homo Sapiens
ttggagctccccctctcccatcccttctcttatcacaaaggctgaggagaagctcaaagagaaattattgttcacttgttcgtttttccatcctttcaatagaaaatgtctctaaactcctttgatactctgtgtctaattttatggctggtcataagataataagctgctagacctacactgagatccacttagcacactaacacttcctgattgaagaagacctcttttgaaaatctcttgaagtctttgcagagttctctaaacatgaccaggaggccaatcatgaggaggagtgagatgttttgagggaaaatagtcaatatacgtaaactaagttcaataccaattctttgacttgaataacgttttatcatcccagcatttttgtcaggttatcgccgaccagacttcatctggaagctcacgaatggctttgcagcattggtaaagtcaggttctcgtggactaacaacactgtttcttgatgtgattgtcctctgaaacttctcctgattatgcctcgagttttgagttgccttctttctctcacatgatctcattcttttcaggatcaagatattttaacttctgtgtttagcgcctttaatagattgagctaagaagtctaagcaatcttcagggctaagaaacaagctgcacttgccagagttggatgttcacaccttggtgatggctgatattaaacagaattcttaatgaacaaatcggccttgaaaagggaacatggtgaagcaagacaaaagaattacaaactttgactgaaactttctcctaccaggaatacagggaccgctcaccaggttgtgatgagaaggatcatctgaaatgctccattgctctcagaa

SEQ ID NO: 182057 - DNA, 775 bp, Homo Sapiens
ttggcacatttttccatttaactaaaaatgtctcgtaactactatgccacaagaacaaacatggatacttatttaaccagccaagactatgcatttctaaatatttatttttttcggttatccgtagacttttccttttgaaatccaacgatctgtatcaaccacgtcttcattttccttttcctgtttgtcttactctccccccaaaaagagtcagtttcctgttttctcaatttctcagtttaaaattagagccctatggcaggtgccatgtacagctgcaaaggtggcaagaagccctgagaaagctcaagaagcaggtcaagggggtgggtaaggaagatgggacgttcaagcagaaacaaaaagaggagctaaaagtgaaagccaccccgccaccagccctcaccagtcacaggtggaattaaagaaatctggcaaaaaataaattttgttatccgtgcttggggcggtgacccttgaccccattcctatttaaacatctggattctctgccataacatcttttgccacctatagctacaataaagtgtcgtcttggagtctgttgtacatttaagaataaacttttgtaaggaagtaaaaaagagtctacagttcagtgcaggatagggatgggtgggccttaattcaggaggtgggaggctcaaaatcaattactctgttgaggagatggaatctcctggaatctcaaaaaggatttcctttagaatcatcagactcatccgactcgtcaagtctttctctgcttgga

SEQ ID NO: 182058 - DNA, 1177 bp, Homo Sapiens
  misc_feature (734)..(796): n is a, c, g, or t
tttgtacatttcattccatccctagttacaactaaagacttgctctttctgccttctatttacaactctaatgcctagcacagtgccttgcacacgaaagattaataaatatttttgatttaatcaactgagagcaaggtgtgcttatttctttgttgggaggaattctgaacacctctaagcatcaagataggcagagtcttcttattgacctctttaggttccaagatccacatctgagaaatggagcatgttaccaatagatagaaatcagacttttaccaactgtcactttgattattcctctgtctaaacaaaatctgagtggttactgcacaaatgccatgtagataataaccattcatgtatctaaaggagtccagagatagggtatcaccgaagtctggagcatgggctctggagcaccactgcctgggcttcagtcctggctctgccacttattagatgtgtaaagctaagcaagttatttaatctctctgggactcagccttttcacctttaaaatggtgatagcaatagtatgtacatcagagtgaggattaaatgaggctcacaaatgagtgagcatttgccaaggacttagaacacagctttgtgcagagtaagaagtaaatgaacattagctgctgttatctagcactgtaaagaaattagcagttttgtataactggattttccagaaaaatggagattaatcctcagtagcaaaactnnnnnnnnnnnnnnnnnnnnnnnnnnnnnnnnnnnnnnnnnnnnnnnnnnnnnnnnnnnnnnnaaagtagatactattatctcaattttaaaggaaactaagattctaagaggctgaagaaataaaaaatacgacaactagaaaataacgtaacatgattcaaatcctactgttgttcttctgactctaaaactcatgctcaaggatgaaagacaactcataggcgagggaaaaatatctacaacacatattacgagggttaaggtttctaacatgcaaggattccaccaaactagatttgaaagcgacaaataggaacacaactttagaataaatggagaatatgatgaagcaattcactgaagagaaaatccaaatgcccaataaagggtttgaagagatccaacttttttgtacaaagttgtcttttatagtaaagcattg

SEQ ID NO: 182059 - DNA, 952 bp, Homo Sapiens
ttgggtttgctttttttccactcatggagacatgggagaggcattatttttaagctggttgaaagctttaaccgataaagcatttttagagaaatgtgaatcaggcagctaagaaagcatactctgtccattacggtaaagaaaatgcacagattattaactctgcagtgtggcattagtgtcctggtcaatattcggatagatatgaataaaatatttaaatggtattgtaaatagttttcaggacatatgctatagcttatttttattatcttttgaaattgctcttaatacatcaaatcctgatgtattcaatttatcagatataaattattctaaatgaagcccagttaaatgtttttgtcttgtcagttatatgttaagtttctgatctctttgtctatgacgtttactaatctgcatttttactgttatgaattattttagacagcagtggtttcaagctttttgccactaaaaataccttttattttctcctcccccagaaaagtctataccttgaagtatctatccaccaaactgtacttctattaagaaatagttattgtgttttcttaatgttttgttattcaaagacatatcaatgaaagctgctgagcagcatgaataacaattatatccacacagatttgatatattttgtgcagccttaacttgatagtataaaatgtcattgctttttaaataatagttagtcaatggacttctatcatagctttcctaaactagttaagatccagagctttggggtcataatatattacatacaattaagttatctttttctaaggctttaaaattcatgagaataaccaaaaaggtatgtggagagttaatacaaacataccatattcttgttgaaacagagatgtggctctgcttgttctccataaggtagaaatactttccagaatttagcctaaactagtaa

SEQ ID NO: 182060 - DNA, 1580 bp, Homo Sapiens
  misc_feature (1390)..(1414): n is a, c, g, or t
cagctttatcaggggaagttaaatataacactccgtttttttcttctttctaataatgatatggatcaacaaatgcaatttgaacttttttaagataactctaaatgtgttttgtttcttaaatgcacaattgattcttctatactgtaatgcttctttgctgacgctggaaaatggtcagactgctgactttgtgcctttaaaatgcattctgctttgacagtggcagactttttggtgctggagaagattcactagcagtcttatgtgtgcttttcaggaaatatctttctacttaaggccttgagagattcaaagtggcatgacttaggcttggaccaaatataagatcttttacattgcaaacaaaatgttgtattgaataaaagggttaaaaaaatcataatgactagtggaaattttgatgggttgttaattatttaaaatgtatttgaaagtatacagactgaaaatttcagtatgaatatcttgaaaattttcagcacttttccttgtttacaaaacatctttctaacttaaaaaaatgactattgccttagaaagttttaaaaggcacagttacccttacataacatatataaggaattaaaatattaatgcatttgctgaactgtaaaagaaaattttaaaccttgatttcagagtgaattggattggctttcacttgagagagtctttaccttattcccaaagaaactgcattaaaaagatgaaactatttctttagactaagtctctgctactccagctcatatatatgtcagatctgctctgtagtatttctgacatggagttgttataagatatgtgaaatcacttagaaaataaaatcagatgtgaatagtttagcaggatgaccaagccagatgcagactccttggcctatggcaaagttctgtgccagtgattttatttggagtctgggaactgatagcttgatataaaatcacctggtgtcaattaaatatacaaatctatctttttttaatagaatgaatcttctttgtttgttcaataattgtaacttattatgtcaggtactaaattaacatccttaaggaggtcacaatctaggaggaacatgggcaaacagttacttattttatggcatacgctaactctgaaagttcagcaatgatgttttaaaatgttattttttattaagggaaaagcaattttaggtaatcattggctgttataaacggaaatgtcactgacaacagggattagagtaaaagtatctccaaactagagggatcccctccccaaccaggtcacatagcatctctctcaggaccccctcttactgcaaaacccagcctctactcaacagttctggtgatggggagcatttattccataacagtgnnnnnnnnnnnnnnnnnnnnnnnnnccccagtgtctcttttaaagaaaacatactttattttggtctaaattgtgaaaatacccaaaacatttgatagaaattgaactctgtcaacagtgttatttatactaagatcacgacagttccttgagatcatactgttttattactaagtttgggcctttgttta

SEQ ID NO: 182061 - DNA, 1155 bp, Homo Sapiens
gagcaaaaaaagtccatgtataaatctcataaggtgttaagaaagtttacgaatttgtgttgggccacattcaaagccatcctgggccgcatgcagcccacgggctgtgggttggacaagcttggactagcagttgccaggggctggggagaggagtgcttggccatcggcggacacacgaggagctcttctttctggcactggggtggtaacacatgactgcacatcacaaagcgcggacagtaatgagggcgaacttaaagaaacaggaagctgacctgagtaacttcagaatatgatgttttgagtggaaattgtaaagctaaagacaaaaggacattaatatcattcctttgttggtaaatttcccacaggggtacaagttaacaattcacatacactgggattgaacagataagtcaacggatggcaaaccatgggaggcaggcttcttgtgttggaggggaaggttatttgtaaataagaggaagtttagactgaaccctgtggtactagatgagaatcagagacatcagtgtgaactcatgtttagctttgcatcgatataaggatggacagatccagagataatctgaagtatgtgttcacacatagggtattatctgcacgcacattacgcagctctcttcactgacagggctggaggcagtgacaccctcgtcccactgagcacacccagcacccaggtttccgtttctaaatatcattctccaatgaggggaaccacggctgattctagggtggatcagagagaagacaagatgagcctggagtatctcatgatatcaaaaagtaaggaaattttcaaaaaaacaaaaggatgggggattgtccaatggacacagatgccaacgtgaaagggctgccaatggccaaagatggaaaaatttgaacaacaaaagaaataatatattggatgattgaattataataaaaaatatacagtaaatatcatgagcccatactggtataaataattgaataaacaagtaaatgtggagaagaggcaaatctttcttactccaaataacatcatatgatcatatgtagcagcccctccaggagatggagtttaactcttccccagccctcccctgaaggtagcacaggcttcgtgactcatcccaaagccaa

SEQ ID NO: 182062 - DNA, 775 bp, Homo Sapiens
  misc_feature (451)..(510): n is a, c, g, or t
ttggctcaggccctgtcatggcctgaaatagtctttgcccctgtctaccactctccagggtccctcttgacacctacttctgctttcccctctcaagacaccttttcttggcattttaagactatttactgactatttattgatataggaaaatgcttacagaatgtattaggagtatcttacactttttaaataattatgtatgtaatacatgaatagattctccttgtaaaaaacaaactcaaacacacagaaaaagttaatgactcccttgatgactgccagtttgaagtgtttttccagaccttaaaaaaatatactttcatacaagcatatgtacatatagaaagatatactttaatggggcatctttcatcataaattggatcataatgtgcaaattgtttcacaacttttattctctgtttgttttcagacagggtctcacttnnnnnnnnnnnnnnnnnnnnnnnnnnnnnnnnnnnnnnnnnnnnnnnnnnnnnnnnnnnngctcaagccatcctcctatctcagcctcctgagtagttgagacaacaggcatgtgccaccatgtctggctaatattttaataaaattttttgtagagacaggttctccatatgttgcccaggctttgattcttctaatgctcggtattaagactctatgactgtgtattatacatagagtttacatgtgagtaagttctgggtggagagacactattccttgctagggccttaagagtctggctgcagctctgctatcacatggg

SEQ ID NO: 182063 - DNA, 1263 bp, Homo Sapiens
  misc_feature (279)..(331): n is a, c, g, or t
ttgggaagctgaaaagcaactgggagccgcggagagggattttatccacacggcctccatcagcttcctcacacccttgcgcaacttcctggagggggactggaagaccatctcgaaggagaggcggctcctccaaaaccggcgtctggacttggatgcctgcaaagcgaggctgaagaaggccaaggctgcagaagccaaagccacgacggtgcctgactttcaggagactagacctcgtaattacattctctcggccagcgcctccgcggtaagcgnnnnnnnnnnnnnnnnnnnnnnnnnnnnnnnnnnnnnnnnnnnnnnnnnnnnnctgcctctgactgcacaggagctagaagccagcttgggtaaggcgggggcactgccatgtgatcaggtcagtcctgagacactggggaggggcagcagcccccacctctgtccacggcctggccccggtgccctgtggccatggagctggacttgtttccctctgcaaaacgctggagctggcggcagggccagccacactgagtagtgtggagaactcagggcggcagctgtcccatccccagggcccctccacctcctgctgtctctgaatgccaggccctggggaggccctgaggatagaggaggaggcctggccgtgcctttctggagttcacagacccctaaagacaggaggcagggatggcgtcgtatgcctggagagcgcctggggggcgggagggcctgaggctgtgcttaaggcccagaggtcctggagcagggcatgtcttgtcctgaggcttaggcagggcccccaggggagttggggcaggaggtggggaggacaggatcgtggaggcttcgcatgtcatggtgtctgttggtttttaggctttcttgggaagtctggtgtttcctatgtagtttggggactaggccacacctctccctcatgcttgtcaccactgctacaccttgtctgcccactttctctccttcccgcccctggaggtgagaccctcacctctctcgtgagcatgctgcctcatgtcttccgtgccgtcgttctgtggctgggtgactgtccctcaggccgccaaccctagttggctctcacagcaacttccagtgctcctggacggggacttcctaagcagcatgggggccacacgggccggccacgcacactggcctgggtccgcattccctatttcaggctgttatctcgggtcagatctccggaagcggcaggagcgctgggtctcctgggtc

SEQ ID NO: 182064 - DNA, 1394 bp, Homo Sapiens
  misc_feature (548)..(584): n is a, c, g, or t
ttggcaaagacccgcatgtgtataaggcagatggaagagggaaaagtgaaggtgctggcagaatattaggagggtataaacaggcacatctttctggagttgtgagaaaaaggaatcaaaggcatccactggattaatttctaagggacgctatacccttggctgaaaaaaaggtaatcttaaagactgttgttgaagattggatcatactcatttcctcaggttaggtaggagtgaatgttatcgatatcaggagggaggtggagaacagaattaggatctgtaatgtctatcaaattatcccttgagtttctgagccattctttagatttcacttaacatcttagctattacccttcgtatttttacttctgtaatgctctcagacgctgagatcttggaattacattggtctagaaagaggaaatgcgagggagctatgctgtccctgtagaatccagattttagagggcaggagtaaggccaggcaaggagctacagtcaacatcagttattctgaaaagataggaattggaaggtacagaatnnnnnnnnnnnnnnnnnnnnnnnnnnnnnnnnnnnnnatgagccactgcgcccggcccagcttctgtaacttttcttactgagacacatttgtaaatttacattttggtcttgaaagtgtacctaggatagagtaatggaaaatggatacaggattgaaagctgtgatctgaagaggttagctagtgcttcacaaactttagcgtgtgttaagaatcacctgaattactgcctctacctgagaaattctgattcagtaggtgtgggctgggacctaagaatttgcatttctaacaagctctgaagtggtacagatgctgccagttcagaagaccacaattggaatgagactgaagtaggtagtcacctttaagggaaggaaaaaaaattactagactaggaagccacagcggtaactagaataatagtggtgatttacactgtagtttgactcttgattatttggaaggcacactgtgggttaagaatggtagaaagaaaagagacttgaaagaaactagacttcctgtagctgtggcctcagtgcagtttattcctgggtaacggagcccttgccctgccagtaccaccctgggagctcctctgctctatggtgctcatcactggatcccttcctttagtggggccaaacttagttggtcaccaaatcttagtctaccacagaaatggtttttgcttttgaatctggtttcccctctctttctccactgccttttgttttttcgggtccctgttatctctcacctggtgtcttgccacaaacttctgactgttctgtttcttttcttcctcttttccttccaagtctgtcctcagcataatcacca

SEQ ID NO: 182065 - DNA, 1446 bp, Homo Sapiens
  misc_feature (508)..(632): n is a, c, g, or t
  misc_feature (885)..(912): n is a, c, g, or t
tttagcagtgatttttaattcaaatacagttgcttcttcacattatacagaaatgctgttaacgaatactgttactaggtacaataataactgaaatggctcttaaacttatcttaagactattccatctatgtaggaagcaaataccgagttttaacaaatgaaatagtgggtattttttaaaacacactctggagcccatacattaaaaaacaaacacacagaaatctaacctgttagagtactgctgggtttttaagtttatttatcagagaatctacttgattttactttaaaatgttctccagacctacaaccattaaaggtttctacctaacattacttcttaaatattttattctaacgactttcataatgaatatctcaaactgcactgccacaaagacatcaattaatcaaaacataaaacctatagaagaacataattaaaagagatgctaaggttctattatagcagggtcccaacctttggggagccacagaatcnnnnnnnnnnnnnnnnnnnnnnnnnnnnnnnnnnnnnnnnnnnnnnnnnnnnnnnnnnnnnnnnnnnnnnnnnnnnnnnnnnnnnnnnnnnnnnnnnnnnnnnnnnnnnnnnnnnnnnnnnnnnngctactgccagaagtctgattatcagtagagggtagggtgctggttttgacagaaattggaaactaattgtgaagaaaaggattcttttgccatacctctgatagcaagtattaagcttttgttcccttttatgaagtagtttaggttatctaaagtgggagtttagatatgagttatgagttatctaattttgtaaaacatatataaaaactatttttgtatatgttttacaaaattagtttggttttaccnnnnnnnnnnnnnnnnnnnnnnnnnnnnctactagttttgtatgttttacaaaattagaagacttaaaccagccaagcctctggctaatttaagtagtagtatagagatagctgttctgtaaggtcatgcagatacgaaaatgtaattaatcaacagcagtcagctacagttctttcgtcaaggcttcaaacctccttaggcataggccagatttgttcccagagtcaaatataaaaatgtgactatcagtagataaaatccaatgccagattttcaacagatatttcccgtttagtcttagcctatcttcacagtactgtgtaagacagtttccaatacacacaagtgaaaatactggagagatgttgtctaaatcagaatgcaaacattctacatggagtgacaaatttttatactttaaccaattgatgcaaagttaacaaaattggaccactttctttatgtgatctaaccctgatcatttcttccgaaactataaagctacccaatgcaaaatgaagctgacattattttacaagcataaagaaaaatagttcccaa

SEQ ID NO: 182066 - DNA, 1481 bp, Homo Sapiens
tataatcataaacaaaaattacttagtttcgttaagctaagattgtgtttgtgttaacttcgacatcaaggagcaaagaactttagaacagactcctcaatcttgtgactttcttattctctaggaaagtaacacttcgtttcatgaagcttttctgtggggcttcgattatttcaagtctggtttctaagtgcagtgtgtttgaagcaaacgaacttccaactcacttatttggcattgggcaacttggccaagtctgctactttggaagatggctctggaggaaactctcatatggctaaaaaggcaggctagtttcttacttctacaggggtagagccttaaaaaagaacgtgctacaaattggttctctttgagggtttctggttctccctgcccccaataccatatactttattgcaattttatttttgcctttacggctctgtgtctttctgcaagaaggcctggcaaaggtatgcctgctgttggtccctcgggataagataaaatataaataaaaccttcagaactgttttggagcaaaagatagcttgtacttggggaaaaaaattctaagttcttttatatgactaatattcttggttagcaagactggaaagaggtgtttttttaaaatgtacataccagaacaaagaacatacagctctctgaacatttattttttgaacagaggtggtttttatgtttggacctggtaatacagatacaaaaactttaatgaggtagcaatgaatattcaactgtttgactgctaagtgtatctgtccatattttagcaagtttacttaataaatcttctgaaccatgttttgtgcctgtttgtattcctttataaaccaaatgttgttggaataaaatacataaggtatcattttgactgtggatatttaattaaaaattatttttctgtgcttgtaggcatcaggtaaaagccaccccaggttagcttgaccatacttttttggcttttcacaatttattttaaattgagatatgtaactagccacattcaatgcggaaaaaaaccaagaagttatccttccatttataaacattgttgtcaggttggttgtcaacaaataaccatatatgatgaaaacagctgtaatatccacccatttgagataatccagtgggagcttgaaaaaccgttgaaatttgatacacaaagaatggggggcccatgggcattttcggggggtgaaagtccacatcttcaatcagatcttaaaagcggatctatggcccaaaaggaattaaaaaaacctctctacacaaaagtaagaaaagcaattatgtcaatttagaagacagtatttttaaaagtaggtatatcaaatttagtcacttttagggggagttacattttattatttattacatacttaagagccaaatacttgaatgatggaagaatcaaaattcaggtatgcattttgaaagagataataccccaa

SEQ ID NO: 182067 - DNA, 828 bp, Homo Sapiens
ataagccactgtgcctggccaggtttctgattatagttttcttaagttgtaatcatcataattaacgtgcgctagagtgttttaactgtgctggcactaatgcttcttggcatataattaactcttgttttgcaaaaagaccatgaagaatgaaaggagggctttaccttaccttagtcattttgggtgaataccgtaaactgggtggcgtaacaaaacacatttatttctcacagttggaggctgagaaaccccaagatcaaagtgccatccagcgcaattcctgatgagggccctcttctggcttcttgctgtattctcacttggcagagagagagagacatcgttactttcctgtctcttcttataagggcactaatctcattcatgagggctccaccctcatgacatgattaccacccagaggccccacctccaaatgccatcactttgtatgttagggcttcaacatatgaatttgcagacgaggaggagaacataagcattcagttcataacatacctataatctaggtcatatcataaacccagagatgataaggattgcctggtaggcctaaccatatatacatatacatgcatgcacacacacatatatgcataatctgccttgttttacattctttgagtcggacttctgtggtccatatgtagagaacatagagcaataaataacctagttcaatctttgagtcttactgaactagtccttaaacagatgggtatcaagatcattttagatattagtgactctcttgtatattagttattttttacacttttaagaacagcatctttgaatcttttc

SEQ ID NO: 182068 - DNA, 1051 bp, Homo Sapiens
  misc_feature (969)..(980): n is a, c, g, or t
ttggatttgtttttattagttacttcttggatgtcttttaactctaactatttaaatagttttaaaattattattataagagggtatattgtttggcaaattgcttttacctgtttgttttgtgcatatcttaggtcacagactatctcgctaagttcctgcaggtcacggactatgtcttctatttcttttgattcattgcctaagttgctaagtacctctcacttgcatttgtgggttagccttagttccatttaaatctctggggctacctacagtttcctgtatagcatgcttttgaatttccacatgttctgttttcctaattcccttaagtttgtatagggaataagagccaatttttaaaatatacttagcagatcatatttaagaaggaagatctgctaaaatacacccagatattattgaattacatacttttttggattatttacgtgaatgggcctttttcatagtgcatatatttgagaggtgccgtgattccatgtttacaatttcacttgagtaccacacagaaacagggttgcccttacacctgaggtgcatttttggaggaacaagaagtagtttagtcattgatgaacagttctaattccacctaactactcctgggcccatgttgctctctgggacctgtccttcaacttaaatctcaacttatcacccagaaagtgagtaataaaaagtcaggtaggtaaggtatatatcttacatattcacttggccaagattgcagatattttagttttatttttaaaatgaatgtttgagattactaaaacattataccacttaataccaatttttattagattttacaaaatattttatgtgtttataatgtaaaacattttggaaaatactgttttttctatatttcagaactaaaaaaattatattttgtgctgtttgattctgacacatagaggtttactgcagtgttaaacnnnnnnnnnnnnaagtaaattgctccctttttatgttattaaccagtgtcaggagagacagcccattaaaggtgtattttttt

SEQ ID NO: 182069 - DNA, 1219 bp, Homo Sapiens
ttgggctgtcttcatcactcactctatgctcagactatgccactgtaaatattcttcctaacatctttaaatcgccttttcctcagttttcaaggggaaggtcatttgtaaagcacgttaggtggttaaatcagttattgcggttttctcttactgcaagcctttttaatcacccccaggctgcattttattctatatcgccttttttcttcaaatctgctccaatcactcacttctctcttataagctaatcctgcctcacaccttaaatctgtttcagtgatcaagggcagaactcattgtggccttatctttctttgttgtaattgttcactgtctctttcttacagaccacttatttctgagtagtagttattcctctctatggagtcatggcaggaatcattacacagtgcttttgttcagagcatggacatgttcctagtgctgctttgctttaacggccacaagtttcctccacttcctaggtttggtatttagttaaggaatcatattaaattaaccaataacaaaagagatacttttgaagaacaaactattccttacccatttttgtagctcaaaaataatttttcaagttcatgaccttattaaaatgaacttgtgtttttttaacaaacgtgtatgttttattttgatagtttctttccgtaagataattgaaatattatactgtaaaccctgttcttttctttttttgaaaagtccaagaatgtacttatacaggcatttttccccacctatttttggccattctcataccacagactaaagagtgaaatgatttgtccattgtagcttattgtttatcagtagttcttttgtcagctgcttacattttttctttcatggttttgtgaatcattttcagtatgtaatttataggaaccttgtcctctggttatagtagactgtgtgccctcctccagtgatggcattattagacatgctggtcatttaccctcagaaagactctcttattaaatggtgagtgcttcagttatagtatgtttgaatttttaaaaaattctgttttagaaatgtatcttatgctctcatgactatgcagtttctaaacatacacatagaagctgagtctctgatccaatatgtttttatttgttccatttaatttatcacatagattgcgaaggcaagctaaaagccttaaaaatgccctttatattttgagtgattt

SEQ ID NO: 182070 - DNA, 1251 bp, Homo Sapiens
ttggcctttttctaaaatgaatttcatggtgttcctagtagttatgtctttcctgaaaacagcatatagtaatgaattaattgctgcgtctggaggcaaattgttttagccttttttagtattcattcattaaaatatagatcatatttaaaggaatatttgatgaacaatttattctaaaataactgaattctgtgaactttctgcaggcagtctcttagtcatcagtatttatatcctaaaattgccttttgcttgtcactgactttagtgcattcgtttagcaataaatatttactgagtgcctgcattgtacacaaagctctgttaggtgccacatagctatggactgtctctcccccaaggagcttcacattaaaatctcaagcaaaaagaagcaaaaattgaaaaagccttaaccagctctccctttgggtaaattctagcctttctagtcagacagccttggcttgatcacttaatgcctttgtcagcttacttggcctctcttaagttgctcgtgtgtttgtaaattggagataacttgcatgattgttgcaatgagatgctgacggatagacagatcccattagacacaaaagatgtaaagtttttaatggcaaccaatgcagaaactgcagagaccatcacacaaagcagaacataatgcaatgtgatgcacctcggtggaggtcctgctgcccaggacccaagattcctctcaggatgtcccactggtggcaccactagtgttgttggttggttggtggcggcaggggggatgttcagcagctgtgaggtgctcctttgctgctgtcatggaggggcgcattcagccttcctctatccagattgttctttagctctggccatgtacctgtctgtattacccagcatgctcctgagtatgtgctctgagatgggtgaggccaaggaaggtgtctgaggagcagccctcagcacactgtggtagcaaaagcccacctgggccacaccagcaaaactagcgcctaactcatggttttgacaattaatgaggtagagctttcagcatagtgtttagtgcaaagtaagtacttaatattttaataccatgactacatccttaaattaattataaattaatacattaatactattattattctcagtgaagtaaaacattcaacattggaaataaaaacattgtttcagagcatcttcttttccaaatatggttatataacatgcttacataacccaatgtatttc

SEQ ID NO: 182071 - DNA, 1031 bp, Homo Sapiens
tgtacaaataagaaggtgttaattgtttggttcttattaaaacctagtagtcatttatagaaaaattatcgataatgttgtaggagaatagtattaaagatagaaagcttataccccctgatttcaccataggaacttaaactttgataaatgaaggcttggctctacttctgcagaaattgcaatatagacaattctagcctaaagtgaggggaaagttgtttctgtttaggtttaaaaattgtgaagcaaaatcttgtaggcctaaataggagttaaaatagaccagtatcttttgcccaatggatctcaaaaataaatgaacaggtactgaaaagaatattctttaatgtcaaatttcaatcttgatctttaataaggttatagcaggaaaattatgaagggccttaagaaaaatcattctgaaaataaatcagacctctgatttccagtctggtatataagcttggaagtcatgccatagccccatcctaataccaagtagaaagcagaacaaactgaaaatcaaaaactctttgtagaaccttcagacaagggaggacgtagggcaagcctctgcatcttggattggagagacagacaggaaaatacagagaattacaacctgccagagtggagagccacaagcagaaacatccggggaaacaagcacaagggcatggaaacctgaactgtaattagtgaattgctgaaggctcagtgtggacaagtctgagagtcaagaactccagggggcccagtcataggggcaccctccaatccttgcaattttgtgagcttcacctctaggagctcagctcttctaagttctcacagtgactgtctgagaaaaatcctctcattcttccagcagagaagaaaaagtaaccattttgaaatatgtcaaaatgtctgttcttgaaaaggcctgcccacaggagaaactatcttcccagtgcctaaccaacctgagggaaggcaaattcctatttccagccccttctagcaatcctgtctcacataagtgggga

SEQ ID NO: 182072 - DNA, 865 bp, Homo Sapiens
  misc_feature (221)..(249): n is a, c, g, or t
  misc_feature (268)..(348): n is a, c, g, or t
  misc_feature (447)..(496): n is a, c, g, or t
ttggcttatgtaaccacaatatagctatcaaaataaaaattaacatcaatacatttttttcaccttgtccttagatcttatttgggttttgcaaattgtcccaataatttcctgtatagcaaaaggatccagtttagaattatatgtccatttagttgtcatatctctttagtttctttgaatctgaaatcattccttggtgtttcctggacttttatggnnnnnnnnnnnnnnnnnnnnnnnnnnnnngagacagaatcttgctctnnnnnnnnnnnnnnnnnnnnnnnnnnnnnnnnnnnnnnnnnnnnnnnnnnnnnnnnnnnnnnnnnnnnnnnnnnnnnnnnnggaaattgtttccaaatatcttttttttaatgattatttttgaatagtcaataatttattccttctttgttccactatttgttcacttaacactcttgnnnnnnnnnnnnnnnnnnnnnnnnnnnnnnnnnnnnnnnnnnnnnnnnnngcacagatgttgaaaaattataaaatatgtacatattcaaatgttagggatcaaattttaatcttggaagcttggaaattaaatatcatttctgtcatatattttaaagcagtgaaaggtatttctttcttttgaggacttcagcaaatatttctaatttcaaagctttctattaaaagtttttagttccatataaagtatatcttttttatgatattttaagcactaatatattatggtagttaaaataatttctagttgacaaatctagagctgatagttcttaagtttaaaatacagtttaagcaaggagtatataaaatctacatgggtttctataaatggtatcgtttaaaatcttatttcagt

SEQ ID NO: 182073 - DNA, 1012 bp, Homo Sapiens
  misc_feature (396)..(499): n is a, c, g, or t
ttttttcattttctaattgtttgatggtagtttttatgaatgtagtcaattttttatattgaccttatacccagcaaccttgctaaataaatttattaattctaatagtttgtagattattttcagtttttcaggtataaaactgtccagaaatacagttttatttctttcaattgtgtataccttttatttatgtttcttcccttattctattgcctagaacttccagcagtgctgactagaagtgcgccccgttcttgacctcaaaggagaactttcaacattttgcatcgtgtttattctagagttttgtagatctcctctgtcaaaattaggaagttccattgtatttctaaatttgctgagaacttttattaaaaatggatgttaggtgtnnnnnnnnnnnnnnnnnnnnnnnnnnnnnnnnnnnnnnnnnnnnnnnnnnnnnnnnnnnnnnnnnnnnnnnnnnnnnnnnnnnnnnnnnnnnnnnnnnnnnnnnaaactgatttggagagatactgagtgatttgcccaggtcacagctggcataaaggcaacacaagtggtcaggctcagctactctggttcctacagactttcccctttgggatagcgtctctcaccatcttgactgcttaccaacagaagcgccaaaaccaaacttgaggatgtccacaagcttgctctacacttctacattcatcctcatcttttttgtgtgtgtttgtggggtaggggaggtgcagtgtttactcagtgatctttctactttctagaaagtgtctgtccttcaaaactatttaagagcctctcattagtcattttttctcttatatgctctggttgagcttgaatagaccagttgttgcttaagaaagaaactgaaaagattttagcttttcagtcctatttggcagaggacttcagctacccttcttatggtctttggctgtgttggtgccctcatgtgctctggggctaagcccacatactaaattgactttttggtttg

SEQ ID NO: 182074 - DNA, 1127 bp, Homo Sapiens
ttggcttaatgagagtacctctaatatatcacttacatgcagtcaactccaggataaatcacgtaaatatatattctagctgtatgatagagtcaactcttagctctctgcaaaaggctaatggtttggatttttaatgagaagaaataaaactggtagaaatacagtaacattgaaagtattttatgaatttttaattatattcaataattttctcaattttaaaagaataatgtgaaacagtatatatgagtcagtctcatatttgaatacttgtatggggtaataagttgtgtaatagttaaattcccaagagaccgaaaaaatgataattacccgcattttaaaacagtaaattgagggtgaaaagactcaatcatttcctcagaatgttttctcgtaactgactcataaataaatacagtcttcctgtagattattttaattttacccaatgaaattcactatagaggttatcactaaacaggacatattcttgcgtttttatcacattgtttttggtgacatttcaagaagccatagtcataatttagtgtggaagttatgtcggtattcacagtaggcagatacacacaaaataatgtcttttgacagaatccaaatgcttctgtccaaatctgctcttatatctaagaagtaattctccttgaaagagcagctttacataagctttaaaaccctaattataagctcagaaactcagctctaaattactttaattacataaaattgatgtaaatcataaagtgcagagaagtcacttttccttttgtctgttggctgcagcaagcatcctaagaactgctccaatgtctaagccagatagaaatagaaaggaatgctgtaaaaatacctaaggatgaaaaattcagagaggaatttctatttgtcctgcaaaacagtgcctgggagatatacacgaatgggcgcgcacatgcgtatatacacctaccccacacccccataagcatatacacatatatgtgtatgctgaccgaaaagaaaatatttctcaacatcatagcactgcagtcatttcaccaatctattactcaacaaattcgtttcctactctaagccaggcattcatttcagggaaataagaa

SEQ ID NO: 182075 - DNA, 1454 bp, Homo Sapiens
  misc_feature (453)..(548): n is a, c, g, or t
ccccaaacctgtgaatatgttgggctacagagtgaagaattaatgttgcagatggaattcaagttactaatcaattgactttaaaagagggagactctcctggatcatccaggcagacccagtgtaatcacaagggtccccaaaactggcagaagaagagaggcagagcaaaatgagattatagaaacaggttcagagagcagcagtgctggctttgaagatggaggatggggccaccagcctaggaatgcgagcagcctctagaggatggaaaaggcaaggaagtagattctctcctgagaacctccaaaaaggaatgaagcccttgattttagctcagggagacctgtgtcagatttttatcctacagaactataagataatagatttatgttatttaagccactgatgttatggtaacttcttgcaggagcaataaaagactaataaacnnnnnnnnnnnnnnnnnnnnnnnnnnnnnnnnnnnnnnnnnnnnnnnnnnnnnnnnnnnnnnnnnnnnnnnnnnnnnnnnnnnnnnnnnnnnnnnngcttagaactatgttgcttaggtaagttctttgccttccctgagcctcaacttcatcaactatcaaataggaaaaccatcacctccttgtaattataacaattacagataatcatgtagagcccctactatgtgttaggcagaaaatgaatggtaggtgccattgagatttttaggtcatttcctaaaacaaatagttccagaacccatgaaaataagtgaattattttataatctttcctaaataaaacacaaaacataaaagccataaacagaatgctaaattctatttttgtagagcagagactccattaaaaactcccaaatgacaaactagaaaaaaaatttacaacactgtgtgaaaatcagagtgtgattttccttaatatacaaagagctcttgcaaaccaacaagaaaaacacaaatacccaaatggaaaaatcaacaaaggacaggaatagttagttttcagaaaaagaaatatgaattaccaataagtgtgaaaatggtgctcaatgccatcatgattaaagaaatgtaaccaaaacagtggtgagcccatttttcatgtggcagattactcaattttagtaatttattctgaaaacaatctcccacaagtgtatacttccacttgtatgcacaaggaagtacatcagcatggtttgtaatagcagaaccccttggaaatacacaaaagttcctcatgggagatcatcaataaaaagaacggaaggatatccaaaacccagtctcaataacgaaatgtagcttgctcccatttcatttgaaaacagaaaagaacacacatatataaatccattgtatgcaaataaaatgcacaatacactctaaaagtgagaatacaatgttgcattgtaaaaattcaaagccaataattaccaa

SEQ ID NO: 182076 - DNA, 1314 bp, Homo Sapiens
  misc_feature (327)..(354): n is a, c, g, or t
ttggcccaaacactgaccgccccatctctctttctaatgagaaggactttgtggtacggcagaggcgggggaaagagagtttgcgtagcagccctcacaaaaaggccttgtaacggggagggcccaggggcaggactgtggagacccgtcctgaacgggcgactgtgtcttgactacctttcaaaaccagcactgtgtgggaatgtccgccaggcagagctcggagcctcattgagacaggggagagagaaagacaaagaggggaccttcttccagatgccttcccagttgtaaccggtaaaactgttaccagatagtgtttgtacnnnnnnnnnnnnnnnnnnnnnnnnnnnnttacctttacagttgagggttgttgaggaaaatgattttctttgtaaatatatagcatcgtgtttggtttgggatgtagagtctatacctggctgctgattgcgtcgtttactacagctttttttaaataagatttttgctttaccatttatcataatgtagtaatgaagcaaaatggtcaaaactgggtgtgtgtgaacagagatacacccatattcgtgtatatacacatccacctacatgttttggtctgtggtttaagagactatttcaaggttccatttttataagctaaaacattctaagttaagatggaagaaagccctaaacacagtagattctgagtttttatgtgtattttaaccagagtttctgatagtactgtatctggctacctatatttccagatctaaagcaagaactactctaagtactgcatttggaatcctcctccattaggaatggccaggacaagtggagctagccattttcattacacggccatcccaatggacactggatccctggtccaactgtctaaaaggccagttgttcctttctgtggatgtggatgtctggccttcacctgaggtagagcggggactataaacacacatcaactttctttctgtttgctttcttttccttcttttcaaactcttaaactcaggcctttatgctgtgagtgactagtccaagaagcacacattttgtagtagtcctgcaccagccctgctcttgaataaaaaggaaaattactggctgcacccaaatctttctagtacttgagtaataagcatcacgcattggaagaggttttaaatttgcttttttgaggaaaagaactgggggtggattttggcatcgtagcatatcgattaaagaataattcaggacatcaggatacattttaatacatagctggggccttatgttgtagatgaagcttgctgttttagc

SEQ ID NO: 182077 - DNA, 1182 bp, Homo Sapiens
ttgggattaagttaacatttctttttctaaaagtatgtactgaaacataatagtgattctgtttcctgttatttctaatatttttagacattgaagtttttatgattttaaacatttatttgtaaatatatataccatgtgattgtaattgttgtgacttttgactaggttaaaatctggtagaacagtctgtttttttgagatgggggtggttttggtcatattaaattcacttttaacaaatacatcttaaaataatcagaagtatgagttttgaatatctttatgatagtcatattatgttaaaagtttggaaacaacataaatgtcttagagtagggaaaatggttaaatatatcatgacacatccatgtgatatgttgttaaaaccatgttttagaaggatttttaatgtcatagatgcttaacatgccgtatgctaagtaaacaaaagataaaaatgcaaatataatatcctaattttattcaagaaaaagtatgctgtcacatgcttgttttaaacccaattacttatgtataatagaaaatatactactagaaataacctcatattaattgaaacctcagaatattaattaaaaactcagaatatttttcaaattttctacattgatcttttgtgacttttaggatcaagaagagttaaaaaattgctcagaaaaaaaatgtgtagcttagtatttgctattacatgtcttgtaatgcttggttttcattttataaggcaggtgagcttcatgtttttttcttcctctttggtaatttattgcgttatgttttgcagatgattaagttaaaatgaatgtgtcatgagaatgggcttaacacatcgttggtttgaaaacttccatttttaaaaatttagagtttagtcattagaaaaaataatggactggaaagttatatttatatccaaatatacctatttcaaagtgtatttgtgaggcctgttttagcctgtgtcttttgtattgtgtgttgctaaagaattctacttttagtaggctaatcaacaatgaaagggttagaaaattgctgtggaacatccaggtgaacttcaggaaagacagtgaaaaatggaaaacgttggagcttctgttgagataatcttcattaggtatatatcttagggatacagccttttctttatcttatagcagg

SEQ ID NO: 182078 - DNA, 1449 bp, Homo Sapiens
  misc_feature (151)..(164): n is a, c, g, or t
  misc_feature (192)..(273): n is a, c, g, or t
  misc_feature (1379)..(1395): n is a, c, g, or t
ttggtacataataatcttcctttttttgttgttttgtatgcattgcacatgtaacttttagaagagtctaaggatcctcagtcatattcaacatctggagttgggactttgttcactttcaatctaagaaaactatgcgtaaaatatgtcnnnnnnnnnnnnnncttcaaagacaggatcccgctctgtctnnnnnnnnnnnnnnnnnnnnnnnnnnnnnnnnnnnnnnnnnnnnnnnnnnnnnnnnnnnnnnnnnnnnnnnnnnnnnnnnnntagcctcctgagtagctaggactgtaggcatgtaccaccgcgcctggcctgtgtctattttatcattcagattaatttaattttgtattttctggctcagatgaacttaaagaagcatcaaacatttcttttttatgaaatgttaaatttaatagcatcacaggccggtaaaatatattcaagtaacagaaatatcaaagtcttttggccacaataaactgaacactttatgaaagcatactcatcatggatcactttgaaatatacgagatctcaacattcaaagtgagaaataaaaagcctttattaaaagtagtgctaggaaacagagaaaataagaataaaatttacccatttgaaatatgtgattttcagactctaaatgaatacagagtttgacagtgtgatgtttacaataatgtcttttctttagaatatctggattatgaaagcaagcacttttttcattaaaaaaattatatactaggaaaaactgtcataatagtattaatgtggggaattttgattatgaaattcagggatatattactgcccgtggtctgtgtcttcaatattgtaagcagcagccatcatgtaatttcagattaataccaattttgttccctgatagatggagcttaaacagtatatgctgctttaaatttctacctctagcagatctttattggagggagtgttcctttgtattttttaatgtatgatattctgtttccagtagcttggaaagtagagatgactaatgttttagccttttcttggagaaaaggaagaactcttcttgaatattttcacagatgattgtgattgctttaaatgacctctgtggcaatttaaattagatggatttaatctcagtaatgtgctggtcgcataaatgtcatgttttaataggaaaagttacttgtaaatctttagacctttgttgtcacttaggctggggagtcactaccctatttggcatcttactagttggggggaccttttccgtgtacagtgatgggacttttgtgacctttactctcactatgcaatagagggtttcatgtagttaatctgacatgtcaaaattgggaagactgtaaccnnnnnnnnnnnnnnnnnaagatttctcttttttgtgtccctcaatacttagcagatgttcatttggtggaa

SEQ ID NO: 182079 - DNA, 527 bp, Homo Sapiens
ccccagtttattaagaaacattaacagatctaacagatggctctcacctcctaggtatctcctggtctctgaattctaaatcaccacttttgtttctgcaacaagagggaaataaccaatacctcaaaccaatttccttcttctctagggaattatattttagtataatttacctcaaattatactacccagaaacatttttctggaaaaaaatatatatatattctgggtttttttgatgactcgaacaatcaagtctaagctcattgtccttatagattttcaatgccttcatggcctaggaggatgtaattacgttttttttctattgaagcgttaaagggcattgctcttctttgcatcggtcatttcccagctcctggcttgtcaatttcacggttgcctcggctcaggggaggatgaactttgctttattgcaaatgaggaagaggactgcttgcaaatttaggaacacattgagccttgggttaagtaaatatttcacttatatgggacacttggcctct

SEQ ID NO: 182080 - DNA, 85 bp, Homo Sapiens
tacaaaaaagttggcttccttggtgcttctttttcctgctcggtgagtttgtttgtttgtttgtttttgagacagagtctcactt

SEQ ID NO: 182081 - DNA, 959 bp, Homo Sapiens
gtacaaaaaagttggctcatctcctgtcaatttccctctcattctgttccaccatcctgactgccttgacttcctcaacagaacaagcctgctcctgcctcagggcctctgtccttattcttcctcttcccaggggtgtgctggtaaaatatttaacaaatagttctccgggacgggggagaaaaccctcatttgtagcatttgcaggtatctatgtgtaaatactctcatcaaggctatttttgagccactaatttgccttcactgaatacagagtttgggaagagatgcatgccatcagaacaaatgcaagccagcaccagcacaccactgcctcttcctgcaactcttgtccatacacaacctcatggctggctggctcacttcctgcaggtctctcctcaaatatcatctgatgagagacacattccctgactatgctttctaaaataggccatatgcccccacattcataccccatctgctgtcattctttattctttttataagtgcattattttcatagcacttatcactacctgttgtatattaatcaatgatcttttcccattagaatgtaagtttcatgaacaggtacttgttttaatactgtatctccagtcctaatgtgtaacaggagcccaataaatgtttgctttcaaatggagaggttaagtaacctgctcaaatcacacagctattaagtggcagaacaggttttcaagcaatgcatctggtggttttaactaagtcgagatagtttttattcctaatgcctaaatcagggcctaggtagtgagctgtgggcacatattaaggtattggttaaactaaaaatattaagcaaatggaacattatctataaaagcctttggtggaaatggctagagctaggggtaagggaaacaaatttggttccccatacctgccctccaaaaaaataaaggtgtccaggaaaa

SEQ ID NO: 182082 - DNA, 905 bp, Homo Sapiens
  misc_feature (126)..(134): n is a, c, g, or t
ttgggttttctgtcacaagtgcttcctggcacacagacagccaatggaggggatcaaattcagtgttgtatgtatgtttatggcaacattttgaaaataaaaattaaatgtttttcttcaagtagnnnnnnnnnaattgctgagagaaaaaaacagtaaagctttctgattaagtaaaatttaaatgggcagtaccataatttaaaaaactaatactttaaagagagagacaaagatattttgtgcctttgacaaattaaatctaatagtggaaaaatgtttcttaattaagcactttactagtgaaaaagatctcacaatttatgccaaatcaggtactgtattttcatgtattaacacataaccttttgtttgaatactatagttttcagtggacagttgctattccaagaaaattaagcttttgagtactttagcaattcccagcgtattacatacacccagtgataaggttctttgcatgttttgtgttatgtattactctgactctttagagattatataaatcctccaaaagttagacgaaacaagatagtacattatgagtcttaattttatcattgtggaaaaatgtgtactaactcctgattttgttaattttataacataggttgaattttagagtggggtttttataagtaatggaggataaaatgggtgggagaaaatggcacacagcacctgaagaaagatggggcagtgacctctagaactcatgcattgccattggaaagcctgtgttgggcatcgatgtcagatcctgaaaatcacctggaaaaaatcccatcctagaggcaaggaggctacaccaaaccatacactacagtactttgtcacatggttgtccattatcatgtattagagtctaaatgattacttgaata

SEQ ID NO: 182083 - DNA, 904 bp, Homo Sapiens
ttggctggtcttttaaagaaatttttgaatgctaatttgcaacactctgaatttattttataatatcacagtggattgtaatcagcagtttgatacaagctgggctgggtaaagcctcagttccttacaccagtgagagaaggtaagtttgtgttctggccggtggggccagggaagcaaatcccatttgttcaatctaggcaggcttttcagagaggatttctggcatcatctcgggatcaaagccaaggatggtccaaagagttgcaggcccaagggtagctggaggaaaaagacttgggaagaagtgctgagccacagcgagagggaaatgagtggatgggggctgcgggcacacttgccaggaaagcaggaggccaggtgtgggagcccaaaggtgagggagatatacaagacaccaggggcggatctcgtgaagctttgtacttgaaacaatagcaaagaatagcagctattctttctccaaggctggtggaggggcgacctccacgaccttgctaaccatacttctgggaatcatctcctacacagggagcaaaaatccttaaccccaaagtcctgtggcttgcactagattctgtgtctcttctaagggactcttcctgttgccctcatgctaagcaaacaaactagagaatgagtgcctcaccaccaaggctaatcccaggtgtctcatttcggttcaggatgtggttagtaccttgaggaactgtagtttgagagagaaagcttcaggcagccagatgggattgagagattagatgcctaggaagagctcaatttaaccctatatttctttctccagggaaaataaaagaagcaaaaacaggccctgctgtgagggaccacgaggcagtgccaggatgaaagagttggagtaacc

SEQ ID NO: 182084 - DNA, 881 bp, Homo Sapiens
cccagcccctccacccgctccagcgacgcgggcttcaccgggctcggggcgcgtctcgccacggggtagcggccactgggcctcaccgagtacgaggccccgccgcccgggcccccggggctgcgctgcgctgaaatggagctcagctcaccgaggctgctgaagagcctgcggagggagaggggtcagcgccaggtgaggggcgcacagccaaggggggacgggcggaggggagcgggcagggtccaggaggaaacgggctggggctgcggctggcgggagtagcccggccagaggaagaaataaagggtgggatcctacggttaccctggcccttttctttggcccctgggaccagagccagcgactggctggaatatgaggaatgactggtggccccctccactccatccaggctccaagtgcagcccaaccaaagaaaagacagcctctcatggcaaagggcgggcttctccctcctgccagcctccgacaccggctctgggcatggcgggatccacagatacccgggacgctgagacttgggcagtacccttcaccgcccaccccccacacagctctgctctcatgagaagacccaggggatcctgggcaggttccagggacagctgagtcgcgataaaggctggcagcagcacgaggttgaacaggtccgtgacacaggagacagacactaggcagggctcgtacccgtatggagcagcagcacatgcagggcaggtgtgaggccgtgcacaccctcaacacaaaggcagcctcctgcacagacggcacacaacagcagcaacggtgcccacacgcgttacagacatgctgcggtggcagcagcacacacacgcagacacgcaacacgcacccaa

SEQ ID NO: 182085 - DNA, 1089 bp, Homo Sapiens
  misc_feature (1012)..(1031): n is a, c, g, or t
ttttttgatcttaccttttgcctctgatgataattaccctttaattaccacccaccaccttgtcatctaaataattatagtaagtgcagcctgcacctctgccagaagatctttaaacaaaatgataaaaacaagttcctaaactgccaattaaaaaaagagacaaaactgacccaaataaaacagtcatgtgcatcccacccacagtggaagacatggacttgtttttcatataaactacagaagaagttgatttattttgaaacaagaaaaagtactgattcagtatttaggaaattgtaaatgtcagaatataaattctgcagtcaggtaggcaaaacaatccaaccacactaaaatccaccttaaattcctcttgggaagagctgcagggtctctgaactatttttcctttatttggagtttccccgattataccggagggagctggataacttctgggtgcattaaaagcaaattatccatttgtgggagaagggcgggcttctcactgaaagcaattagtagttttctaatttcccaggtgggtctccattaaccgcctaacaaacaccaaggctgtcggagtccgacgaatcatgcacctctcttagggggaactggttgcgctactctttagaacgctgttttcccatggtagccttaaaaaaaacttaccaattttctgaattaggtaacacattgaatgggaaaaacctaagatagcacaaaaaggcgtacagcgaaaaattaagactccttcctcccgtcatccgccacctcactgtcctccctagaggcaatcgctggttcacttctttaaactttttattatggaaaatttcagatacacaagtaaagagactgtatgatgagcacatatgctcgcatcacgcagcttcaacgatgaaaaacgttctgccagcttgttttattcctctcccccagttttcataggcgtattttacagtcctgacaccagatcactctgtcaacacatcagtaggtcttnnnnnnnnnnnnnnnnnnnnccataaccacattaccgttaccacacccaacaaagttaatgataattgctcaatccaa

SEQ ID NO: 182086 - DNA, 1616 bp, Homo Sapiens
  misc_feature (354)..(480): n is a, c, g, or t
  misc_feature (572)..(668): n is a, c, g, or t
  misc_feature (890)..(902): n is a, c, g, or t
ttggattttgataccaagagcatataatgaacaaatcagggtgtaatatttaggacatccatccttgaacatttatcatttctttgtgttgagaatatttcaaatcttcttacagctattttgaaatgtacaatacattgttgttaactacagtcaccccactgtgctatcaaacattagaacttattccttctctctgtgggtttgtacccattaacctagctctcttcatccccaccctaccccacacacatacccttcccagctgctggtatctctcattctactctctacctccatgagattcaccttttttagctcccacatatgagaatatgtgatatttttctttcnnnnnnnnnnnnnnnnnnnnnnnnnnnnnnnnnnnnnnnnnnnnnnnnnnnnnnnnnnnnnnnnnnnnnnnnnnnnnnnnnnnnnnnnnnnnnnnnnnnnnnnnnnnnnnnnnnnnnnnnnnnnnnngatgctagacaaacagaggattcatgtccaagacggggcaggacagcacaagatttcattacactactcataatggttcacaatgcaaaaannnnnnnnnnnnnnnnnnnnnnnnnnnnnnnnnnnnnnnnnnnnnnnnnnnnnnnnnnnnnnnnnnnnnnnnnnnnnnnnnnnnnnnnnnnnnnnnncttgtatgtcaacctaggcaagggatcgcttgctaatgactacataaatcacttgtaaggaatgacagtaacttaaactctgcttccttaaacactcagcatttctcctgctaccttgttatatatttgtcatgaagagaccattttcctcataaagctaacctaaaccattcaccatgtgcattagcacacgagccagatgagtagaatctgaattatgannnnnnnnnnnnnaccactttactgataataggcttctaagacgtgccaagcttcctttgactatacacaccactgtgtttaataactgacagacctgagaaataccccttatcgtgagtttacatctcttggtacaggttaaataagccttagaaactattttaaatttaccactggtctgctgctgtatcacttgccaaatcatgacctaccaccagtgcttctccagccccagaaagaacataggcagaggcagtgttcaagaaggaatcgaccagctaacacagctcctctggttccaaccaataccccagagccacggtcaactgaacacaggaatccccatccagaactagtaaagtcactgaattcccactctttctgaccagatccacaacctaggagggaagaagaaaaagatccaggtgcagattagctgagcttctggcactgctggaatatagagtgtggttcaaccccagcccagagggttcttacaagactggtcctttctagagaggataagaacacaggccgctaagaaagatctctgtaagacacaaaagtttggaagacagtcattttgatccttgacttttctagagactcaaaagacgcatctgaggagaaaagctctgggtccctggaatgaccgtgccactcaacatgcctcctggagtggccaaagagagtgtagttaagaaaagaaatattggagtgaacttt

SEQ ID NO: 182087 - DNA, 1563 bp, Homo Sapiens
ttggctttatacactcttaacctgtctcttctcattcctttgtcgccaccggactttaggtaccctaagggtggtattgaggctggtccgcaacattctggtgcccaacgtggggctcgaaagaatctgatgaaggaatgctcgagcgtgtgaaacggagggctgatggacgaaggactcccgaggacgaaaaagtttttaagctctgcaggtaagcagggcacttggagaaagccagggacacaatggggaaaactgaaagtaagtacaccacgtattgagcttgctagggcggctgttgaagcgtgatggcgtaaaagttggtacaaaaaatcgtatgaattaatttcatgctgtagaacaattttgcccttggttccctgaacagggaactttgaaattaagagattgggaaagagttggaaaggacctttaaaaagcacgtagagaaggaaaggaaattcgtttgcctgtttggtcagtttggtcattggtgcgtgccgcactggagccatttgagacaaatgatgaggctgagtcagaggaggagaaggaggagtttgataatcaggactctgaaacgcctctaccgagtactagccaaaaggagagtccggaagtaatttatgccaatccccccagtcttcctaaacctattcagaaactcattcagctcagggttcctcaagaggaatgtccggaatggccacctcctcctcagccgagtgagtgcaggcggagggagcctgagactccgctgccgagactcggctggccgcgctcattattgcccgacccgcagttcattatggagagggggtaattcaggttcgccctgcagttcattacagtgaaggagcaatttcccttaaaatggatgacccagcgccctgtctgggtcgaacagtggcctaaggaaaaattgggggcgctttatgaaatagttaaagaactactagaaaaaggatatatttcacccactttctctccttagaattccccaatagttgtaattaagaaaaagtccggtagatggcacatgctgaccgacttgcgagtggccaacgctgtaattcaaccgatgggagccttacaacctgggctcccatcccccactatgctccttaaagactggctgctcattattatagatttaaaagactgccttgttttacaattcttttagcagaggcagatttcgaaaaatttgcctttactgtccctgccattaaaaacaaagaacctgcagccagatatcattagaaggttttactccggggtatgttaaacagtcccacaatctgtcaaacttttgtaggcagaactatccagcctgttagagatcaatttccagatgtgtgcagcaaaaaatagagatcaacctattcaatgttattcatctttacaaaaggcaattacaaacgctgaattgcgtatagcacctgacaaaattcaaacaaccactccttttcagtatttggggatgcaagtacaaggatacagccattaagcctcaaaagttcaaatttaaaagattatttaaaaccttaaatgatttcaaaa

SEQ ID NO: 182088 - DNA, 2293 bp, Homo Sapiens
gtagatgaactgggaaaataattattttaagtagaattgtttcatttctgctttattcccaccctgccaaatgcatccctttcctaatttactgaaccaaagaggaacctaaacaaaactcaaacgttgtatatattccagctttgaaatgtctcactgccaccttcataacctgttagacctaaacaatttgttcttaagttttgtactttttaaattatctttctttgcaaaagatgacagaggcattcaaaaagaatttttggcttatttatttaaaaaaagtcaaccttatacataaatagaataaaaacaagaactctaaacaatcacaaatgtctctacaaaataataaatatcatggaagttaaacatacatataaaactttactattaaactaatctcctgtatgtatatttttataccctgctccccccaacaaaaggatagtgtcacatgctcaaaccatttaagtcttgcagtgtagttaccctctgttgttactgctacattctaaacataaggttctcattgtgtgttcctatacctaaataaaaaacagctaggaagtgcacttctataatccaaattctggttcagttatgatcatatctgtacctgccataatatacagcagaatgctctctcttaatccatcaaaactaagaaatctcttggttatggtacctgtactaaatgtaaaagatatacttatttaatactaatagtttaagttagatactggcatagtaaatactctaatatctttcactaaagtcagggaagtaaccaaacaatattaaattctaaaaacagaactcctcataggagattctttacaaaacaaaagccaaaaggagtaaaacacaagggtagtcattcacattctagagcaattcaagttctacaatcattaaaatatacattaaacacctatgataaaagggacaccaaaaaattctaggtttatttctaagtttaaatcataatgatttgttaaatcacttagtttttcttacccaacagccttcatcttgatgaaaagagggaaacatgagagaaggggaagagagacagctttgtagcattttctacgatgaatgctgcagctcgatatacaaagcatctgccctctctaagaagccacagtgctggcatccaggactttacacagcagataacaactgtggcttagagaagccagtctcaagtggattgcacagttgagggaggggttaatgtgcagcactctccacaagaccaatggagcacactcctatgtgtgtctggtttagacaatcagttctacttcaaataactgcaacatcatcagagtatcactattgacaagaaaactgaaatactcatcctaatagctctcagcatctcaaataaaaggctcacagtacacttacttttctacttgaaaaacagccaaagataagactttcatggtagcaataatatagtatagattttaattattatatttataggccggaatcctaataattatgctttaaatttcaggttaatgtaacctaaacaatactgttctatgaattaagggcaagcactagtgaatcttattaagcaaagcatcagatacattacttccttgaatctcgtactttttatatataaactatgacctttagcttgaagtaccctaatatttaggcacatcttggtttattaatactttttataaagaggttaacttttaataagcatgttcacattaatgtatgatgactagatactggttgttcccatctttgaaatacctgaaacatttttaggtactaaaaatgttcacagattatgtaaaatataaattttgcatatcctacttgagtactattaagttcagttaatccatatgatttcttgtatactaaatcaatgatagtgttgaatagctgatttccagcctgtattaaaacatctatttcaatattctctctttttaacccatgatcaatcaagcttactgttgcaaagatctacttagcactcaagagttaacaggacactgtgctttgagcggccacttccatttaaagctcttagcagaccagtagaacacactcattcatgtatactgcttctgaaatttcatctttggagctcacttgctttcagttattaagcattaatttatataaagaaattacataagctatatatgtaaaaacaagtacaaaaatcacatagctgcagcctattgcagccacccttggaagccaacccttgctgaattaagcttaaaatttgcttgctataggctac

SEQ ID NO: 182089 - DNA, 1129 bp, Homo Sapiens
  misc_feature (517)..(617): n is a, c, g, or t
ttggagttgtcttcttcattctgtcctagagcaacttctgcacctgaaaagcagcatcaagcgtgagccaccactcccggctaagttagtatttctttaatcttaatgctttaaactaagccactcggatcctgaataatttaaatcttgagctacattggtaagtaataaattatttaaggccaggaattcctgtagttttcatggagtctgtagctttattaaaaaataaatcactgccaggcttcattcttccatatgatcctctaaaaatggacacttcctctgaatgctgtatctcatggcacctggtccaactagaaatggtcaaggaattcatttggctccttgatacatcagtcctcaatattactttctaggtattttatggccagattgcttatatgagtggtcttttggtttggtagtaggtttttatttttaatttctgtactaatgaaattcctgactttaatttctgaaaaccaaaaactctccaagtgtatttatttatatnnnnnnnnnnnnnnnnnnnnnnnnnnnnnnnnnnnnnnnnnnnnnnnnnnnnnnnnnnnnnnnnnnnnnnnnnnnnnnnnnnnnnnnnnnnnnnnnnnnnnatcaatatgagccaccatgccagatttgttcatttttaaacatttttatctcttcaagtcatcttttgatcttttaaaaagcaccttcaaacagctgcaccttccatttgcactaggaaatgaaggtagtgatgggattggcaatgttcctggcagatgtttcagcccaaaagctcttctacagaccggtttagagctggtgccctatgagaatattagggagcttttattttaaattgaactttacccttgtccatgcaaggcattcctcctgaatgcatccatgaatttgtttacttttgcgtcaaacatatgagccattgtcatgctcagcctgtgccaccattgctctgtctgatgtatgtaatcatacaagacctgattttggttctaacacagtggtctttgactatcaacattgatgtttttagagatgggttcttctggtttgatacagactatgcattgcgtttagcagatggggtaaaactgggcctaaaacaagtctttgc

SEQ ID NO: 182090 - DNA, 1472 bp, Homo Sapiens
  misc_feature (252)..(352): n is a, c, g, or t
  misc_feature (882)..(896): n is a, c, g, or t
actttgtacaaaaaagttggctgaatgctgtatctcatggcacctggtccaactagaaatggtcaaggaattcatttggctccttgatacatcagtcctcaatattactttctaggtattttatggccagattgcttatatgagtggtcttttggtttggtagtaggtttttatttttaatttctgtactaatgaaattcctgactttaatttctgaaaaccaaaaactctccaagtgtatttatttatatnnnnnnnnnnnnnnnnnnnnnnnnnnnnnnnnnnnnnnnnnnnnnnnnnnnnnnnnnnnnnnnnnnnnnnnnnnnnnnnnnnnnnnnnnnnnnnnnnnnnnatcaatatgagccaccatgccagatttgttcatttttaaatatttttatctcttcaagtcatcttttgatcttttaaaaagcaccttcaaacagctgcaccttccatttgcactaggaaatgaaggtagtgatgggattggcaatgttcctggcagatgtttcagcccaaaagctcttctacagaccggtttagagctggtgccctatgagaatattagggagcttttattttaaattgaactttacccttgtccatgcaaggcattcctcctgaatgcatccatgaatttgtttacttttgcgtcaaacatatgagccattgtcatgctcagcctgtgccaccattgctctgtctgatgtatgtaatcatacaagacctgattttggttctaacacagtggtctttgactatcaacattgatgtttttagagatgggttcttctggttgatacagactatgcattgcgtttagcagatggggtaaaactggcctaaaacaagtctttgcagaatacatgccaatttccnnnnnnnnnnnnnnntttgttgctcaggtgttgcacaatttttatctaacactgaggctatcagctccaactaaacaacatttcagtgggtgaggctgccctaacttccattaggggccatggtctcactgccatcacttattagccatgagaatttggttgtagttttcaggtaggttggtttcttcctcatttgcagcttgttgatacttgttcctttttatttattaacatcccaatcaatttgcagctgccatcattacataaatatttttctgttataaaaagaagtgtgatctgtttttttagtgatttcctttgtttgggaatagagattggaagcacatactcagacctgttttgttaactagaattctttaaaagctgatgccaaacatctttacagaggaactgtagttcacatccacctgtctgacattgtcccctaaaaacaagtgcagtgtggcagctgctgaatctgtctgttcagtttgtcaaggaggataattatgcttgggagagatctgaaaagaaggtgaatattttgcacttttgatactcttacgaacaaataacttatttggcaaattg

SEQ ID NO: 182091 - DNA, 958 bp, Homo Sapiens
ggctgccataggttgcgtctccagctttcaagtcagtagatctatatcagtaagttcactgctagtgttttactatgcagactcagtttgcctatattaaaaagacttcctgtcttcttacatccgaggagactggctaagcaggagggctaggcgtgttgaatcctagaaactcactgaatacttactgatgaatggactgggtctgggtcacatcttggatctggggaactttagttcacatttacagtcttaggataaggaataatgtcacgtattgcttgttcttcttaccgtgctgtttgattttaataatgatatttagtgaatttaatgaaattaaatgtgatattaaagaataatgatattttaatagcattggttgagtgctgcaatgtggcacacaggtagcgttggaagcctctccatcagttacctcatttaatcctcacactacctctttagagaggtggtactatttccccccatgttttactgaccaggaaattggcaccaggcaggtgacactagaggccacggtcttaatgaccacacaacatggtcttcatcagaatagattccatctccatgatgctttgcactaattaattctttccgcagcagcaccatgaggttggcggttcctttatttgccagctgtttattatttctgtgctaccaacattatgccaggcatggattggagtgtggaatcattcctggaagccaggccatgttcctgagttgtgctgctgtaagaattgggatttaaagttccaaatgtgtggcttccagtattttccttctaaaacagacacacgtcttatcccatttttatggttacatcacaagaatgattcacatttaatcaaacaagtcagcagaatgatagctaatctatctcaggtttgttgcaaatgttatttacacatattgtgatatacctgattgtgtctag

SEQ ID NO: 182092 - DNA, 1702 bp, Homo Sapiens
  misc_feature (134)..(161): n is a, c, g, or t
  misc_feature (165)..(261): n is a, c, g, or t
gagacgtagtctcaagagtgcagtggtgtgatcatggctctctgcaggctcaacctcctgggctcaggcaatcctcttgctttagctacccaagtagctgggactataggtgtgtgccattgcatccagccaannnnnnnnnnnnnnnnnnnnnnnnnnnnaatnnnnnnnnnnnnnnnnnnnnnnnnnnnnnnnnnnnnnnnnnnnnnnnnnnnnnnnnnnnnnnnnnnnnnnnnnnnnnnnnnnnnnnnnnnnnnnnnngtgtgagccaccctgctcagccaaaaagtttattgttaatttgatgtgtatcatggtcttcagccctaatttcaataacctattgggtgcttgggattacttgtacatgtaccacatcctacagttttattatacctaatgatcaagctttgggcaaaggaaaaattcagttttcagtagcatcattggaagtattatgacttgtgcttaaacttttaccagtgcattcttttgataaatagaaatagtaacaaaatatgaattttaaatatgtggggagatacataaagaacattgcttatttgttcttgaaaataacagtgattcaaatatttcattcagatttacctatgcctaatgaaaaaaatgatgcagaacttgattctccaccttcaaagaaaaaaagattaggttttttccagacttatgatacagaatatttaaaagttggttttattatctgtcctggatcaaaagaaagttcaccaaggccacagtgtgtcatttgtggagagatcttatccagtgaaaacatgaagccgcaaatctttctcatcatttgaagacaaaacattcagaattagaaaacaaaccagtagatttttttgaacaaaaatctttagaaatggaatgtcaaaatagttctttaaaaaagtgtttactagttgaaaagtcacttgtgaaagcttcttatttaattgctttccaaactgctgcaagcaagaagccattctccattgctgaagaattaattaaaccatatttagtagaaatgtgttcagaagttttgggttcaagtgctggagacaaaatgaaaactattccactttctaatgttacaattcaacacaggattgatgaactatctgcagacattgaagaccagctgattcaaaaggtcagagagtcaaagtggtttgcccttcagatagatgagtcatcagaaatctcaaatatcacacttcttttgtgctatattcgtttcattgattatgattgtcgtgatgtaaaagaagaattattattttgcattgaaatgcctactcaaataactggctttgaaatatttgaactaataaataaatatattgatagtaaatctctgaattggaaacattgtgttggtctctgtaccgatggggctgcaagcatgactggcaggtattctggtttaaaagcaaaaattcaagaagttgccatgaatacagcggcatttacacattgttttattcaccgtgaacgtttagtggcagaaaagttgtctccatgtttacataaaattcttttgcagtcagcacaaattttaagttttataaaagagcaatgcattaaattcacgtatgttaacaattttgtgtgaagagatgggatctgagcatgtgagtttaccgcttcatgctgaagtacgttggatatcaagagggagaatgttaaaaagatt

SEQ ID NO: 182093 - DNA, 1120 bp, Homo Sapiens
ttgggtcaatatttgagcagtaggatattggcatttgttagttaaaggcttaaatcaaaagaatgtccaatggtaggaatttcaaggtgtaggtcagatatttgagaataggggatttttttgatgtgccttaaattataccaaagattactaattattcctctttgcccaaaatacttgcatccaaggttctagtctctgttgctgtgctggtctttagccccactgcttgcactgatgtccctccttttcacggagacctatctgaggtacaggatggggctggcaccagatgatgtcccaccacagtccctcacctccggcctccacatgacagaaccaatttacactcaaccatgacctcacccctccttggtttctccctcgatctgtggccctttttggatgtattcttatctaacaacacaatccggaaagactgaattgaatatttatactaatggttcatatcctttattgctcaatgatctaattaaagggatcattgccacatttcatgtttatatttctacaatttgtttagaaaacatctcctgaccatatcagtagctcgtgttatctttttatcaactgcttcccagcgtcctaaaacaatagaaattttggattgaaaagttcagcataaggagtttgagtcagtaaaggatgggataaaggaatcgagatgattcaatgaaaagtatcacaaaaaagagattgatcaacaagagaaataaaaaagcccaagaggaagtggtaggggaaggaatttaagaacagcaataagtaaaactcttaagtaactccaaaaagaaaatggtacattttgccaaagaccacttatacttgagaacatggaagaatttgcctgatactctctttggggaaaagagtctctcctcttttcctcaaccccagtacactcagcctctctgccccaccttctcctgactttgtcctcacttgcttctgcagtacattgggaacctgaattgaaagaaagtcttccttgaataattggagtttgtcttgagaggcaatatagccccaagaatcacaagattcgaggaccatgtaggtcttttacgtagcccaatccataaattagtctcactttttg

SEQ ID NO: 182094 - DNA, 790 bp, Homo Sapiens
  misc_feature (611)..(662): n is a, c, g, or t
ctttgtacaaaaaagttggatcaactgcttcccagcgtcctaaaacaatagaaattttggattgaaaagttcagcataaggagtttgagtcagtaaaggatgggataaaggaatcgagatgattcaatgaaaagtatcacaaaaaagagattgatcaacaagagaaataaaaaagcccaagaggaagtggtaggggaaggaatttaagaacagcaataagtaaaactcttaagtaactccaaaaagaaaatggtacattttgccaaagaccacttatacttgagaacatggaagaatttgcctgatactctctttggggaaaagagtctctcctcttttcctcaaaccccagtacactcagcctctctgccccaccttctcctgactttgtcctcacttgcttctgcagtacattggaacctgaattgaaagaaagtcttccttgaataattggagtttgtcttgagaggcaaatatagccccaagaatcacaagattcgaggaccatgtaggtcttttacgtagcccaaatccataaattagtctcactttttgtatttatcgtttcatattaaaccctctatatcaaatgttcatcatgattttgtatnnnnnnnnnnnnnnnnnnnnnnnnnnnnnnnnnnnnnnnnnnnnnnnnnnnnatggtaaattcttaaactgtggaaaccactgaaggtgcttattaactgttctcccagatttgtacaagtattggatgattccttgagtttacagctgtacaaatagtgtggaaaaataaacttttttt

SEQ ID NO: 182095 - DNA, 1687 bp, Homo Sapiens
  misc_feature (322)..(452): n is a, c, g, or t
ttggaaacttgatattgtattaacttaataggaaccctgtgtacaatttaaaatatttgtaaaatatcactgtgaatttacagatgtctttttgtcattctttaacaatgaatttcccctgtgcatagttattaatagtattggtattattaaaaactaatttggcattttaagattggcattttaagcaagttgaggtgcttaggaaacattgtagaataagtttggggaaatgttagctgacagagctgagagatcagattttcatgttctatcactgtaatggaacctcatttagacctctctagacctttgctagctnnnnnnnnnnnnnnnnnnnnnnnnnnnnnnnnnnnnnnnnnnnnnnnnnnnnnnnnnnnnnnnnnnnnnnnnnnnnnnnnnnnnnnnnnnnnnnnnnnnnnnnnnnnnnnnnnnnnnnnnnnnnnnnnnnnagaagaaagtatcagagtgcaaacaaattactcgtctaatatgtagaattcccagtggtctcacagccctagatcaaatgtgtcagacactagatcattataatcttcattggttttgacagctaattaattagtttaataatattgacatggcttcttaagtatttgaattctagattgctaatgatccttatttttgcagtaaaaaagtaacactttatatttttcttgttaactataaatggaatcagagctgtaaatgcctgaaattttaagtgtgaaaaggggtgccacccttttatatactgcacaacaaatttgcatttgtatattctttttaaaaaatctctgaagacttgctcagtgaaatggttctgattttttgcttcaaatgatttgcactaattgattttctggagagcggagttacgttaacaacaaaattcttttatagttcctttgatactatttcaaataaggattacacattgaaagtttttatagaaattatgaaaattggataatcttaactatggtaaccattactattatccatactactttctccccactgaactttcaaatttgaaaattggggtagcttttgtaggtcactttcttataaagatgctgatggtcacagatctcctaagtatccagaataatatttttatcatgagaaggattccacacaaaattggggtcttgcaccccatatttcagaggatctgaacagaaattgtggcttcattgcacattttaaatctctgtagattcttgaaatcacccaacctctcacatttgaaaacccaacggcctggagtattctggtggcactggagccagcactagctttttggaatccaagtggggagagaaacaaaaatagacttttcaagggactgtcccagactacccagggcaaatgtcttcccttcccttcctgaagccacaggaaagcaccctggagtcctttgtataccactatggaaatttttaaggcaagctctcaagacttgaagagttggaattctcggcatttaaatgatgcctgaagtttgttttgaaaaagcaatatttcattgctcttttcaattgtgaagcaactgctcagcaaatattactcatttttttaaaaagttgaattaaagggaaatatatttttaaaaccaaaatagatcaaaatgatcccagttttaaggattttgcctatttggaagaataaaactaaaatg

SEQ ID NO: 182096 - DNA, 1527 bp, Homo Sapiens
  misc_feature (618)..(638): n is a, c, g, or t
gtacaaaaaagttggatccagcggcggcgccagcagttccagtccgttgctttactttttgcttcaccgacatagtcattatgccgaagagaaagtctccagagaatacagagggcaaagatggatccaaagtaactaaacaggagcccacaagacggtctgccagattgtcagcgaaacctgctccaccaaaacctgaacccaaaccaagaaaaacatctgctaaggtaagaagtgctgtttcccacttttggctttttaaacaatgaataaattataattccctacctcagaatcattcaaagaaaggccgtatttaatgatccaaactgaaaccattaccactgttacgggcttgcttaaaggcataaagcacagttttctgcgttaataggagtgtgttttccatttggtcagtgaggcacgggaagtcagagatgttgctctgagaagcctcatgtccgaagggggtttggcagcagcctcgtgaacatgcggttcatgcggcacacagcggggatgagtttgggccctggcagcactgccccactatgggaggaatttgggaaggggcttctgacttcatctaactggatttcgcaggccagtctgaggtcnnnnnnnnnnnnnnnnnnnnngccagcaggtaatattagcatttataaggcccttatagtatggcagataaggttgattgctttactcatatgaccttcacatcaactctgttgaagtagatacaaatatcctgttttgcagatgaggaaactgaggtacagaattcttagggaacttacccaaaatggcttttctgcactctgccctttggtattgtcccatgtgaattgtttaaaacttatgtgtatagtggcatgagtaggtgatttcagaaacagaactcacttttgttgtttggtcttaaaattaggaacttttcttcatctgggcttcatttccctgcaccttcccagctttctagtcatgcaagccacatgtctccacgtgaggggttcattggaaagcagccacagagccaccccctggctgggttcttccccagctctgcttcctccttccccaagtcctgcagctgctctctccatggcagaaccacttctccccttactggaggggaggtccactgaacaaatccaggagaggaatcattgtgttttccacagaagagaaagtacactggactttctgtgcaacctgttactacattttcacagagactcatatttgtgcagtgtaactcagttgaaacccagcaaaattaggctcccgtgtctccataaaggccaccatgatggtaacggttgtacttcaccttgcgtttggacagaggctgattgattttagccatcatcacaccgtgtctaacattctctttcactgtgctttgatcctctgttagaaagaacctgcagcaaagattagcagagtgctaaagggaagaagaggaaaagcagaagctggaaaggaagtactgcaccatctgaaatggtgaaactaaagctgaagagg

SEQ ID NO: 182097 - DNA, 1768 bp, Homo Sapiens
ttggcttcagcgagtcataatctttttgctggtggagggtcttgatactgctggctgttgactaaggtggttactgaaggttggggtggctgtggcagttccttaaaataagatagcgatgaagttttccaaatcaattgacttcctttcacaaatgagatctctgtaacatgtaatactatttaatagcattttacccacagtagaacttctttcaaaatttagagtctgtcatctcaaatcctgatgctcctttatgaactaagtttatagaatattctaaatcctttgttgtcatttcaactatgtttacagcatcttcactgtggaaatgactgtctccagaaaccactttctatacacattcttaagcaacttctcatctattaaagtttgatcatgagattacagcaattcattcacatcttcaggctccacttcttccagactccttttaatgctggaattttgaccgcctcccatgaatcagaatgttcttagtggcatctagaatgctaaatgcttcccagaaggttttcaattgactttgcccagactcttcagaggaatcactagttagggcagctacagccttattaaatgtatttcttaaataaataagacttaaaagtcaaagtgactccttgacccatggactgcagcatagatgttgtggtagctggcacgaagacaacatgaacctccttgtacatctccatcagaactcttaggtgaccaggtaacattgtaatgggcagtaatatttggaaagaaatttgagcacgtctcaaccatacgcttaaatattcaataaaccatgctataaacagatatgctgtcatctaggctttgttattccacttctagagcataggcagagtagatttaacataattcttaagggccttaagatttttggactggtaaataaactctgacttcaacttaaaggcaccaactacactcgctggcattgaacttcttctccccagctatgaagtcctagatgacatctcttctaatagaagaccatttcatcttcacaaactcagttgtttagtgtagtcgccttcagtgatcttagctagatcatctggacaacttcctgctgttgttgtcccttgcactctgacgttaatggggatagtttcatgaaccaacctctgcttgcttccagcttttcttctgtagcatcctcacctctcagtcttcgaagaaagaattgaagaattaattaggctttggcttaagggaatgttgtggcttgtttaatctatatagaccactcagactttctccatctcagcagtaaggctgtttcactttcttgtttgcatgttcactggagttaacactttcaagaactcttcctttgcataacttggctaactggtgtaagaggcatggctttcacctgcctgggctttcaacatgccttcttcactaagctttattatctgtagcttttgatttaaagtgagagacatgtgactcttttacttgcacatttacaggctactgtaggttattaattggcttaatttcgatattgttgtgtctcagggaatagggaggtctaagaagagggagagactggaaaccgctagttggtggaacagttagaatatacacaagatttatcaattaagttcactgtcttatacgggcatggtttgcagtaccctaaaacaattacagtagtaacaaagatcactgatcacagaccaccatgacagatacaagaataaaaacatttgaaatactctaa

SEQ ID NO: 182098 - DNA, 1530 bp, Homo Sapiens
  misc_feature (354)..(382): n is a, c, g, or t
  misc_feature (1088)..(1210): n is a, c, g, or t
  misc_feature (1222)..(1235): n is a, c, g, or t
ttgggggaaatgaattattcacaaagctttgattataaaataaaatagaaacaactgaaatattgtaaattaagaagaataggaaataaagttagttaaagcacagtatgtggtcctttcattgatatttatgttagaccccactcaggctctccctaggagaccacacaactatgacatcaccagatgctcagcctgctaactgagaacttggttttggacaaatcagtgtctaaagcttgactctttactatctctcttatctgacttgaaaaggaccattctttttctgagttacagttaaattacatcatcgaaaggagtgttaagacgagtaagagacatcatccatannnnnnnnnnnnnnnnnnnnnnnnnnnnnctgtctgtgttttcagcaacgtcagttgattacagttcctttgcagacagatgcagcagctggatagagctcattaaactgaaagctcagaccataaggcgtggatcaattaagacaagtaggcggatgtttctaccacattatgataatctgagaaacatatccctgatttcccagtggtgaaagctagaccttactacccagtaataacattgccaatccatcatgtattagagtgtgaaagctgcagactgtaacggtcatttaggaaaagcttttgaaaggcctttagatttattagttttacctatagaattgtgtttttaaaattttcctttttgtgcaggtattcttaaaagtatataaatagatattatatcattctaattggaagtaaattgccaactctcttattgaaaagacattcttccaggacccaaggtactatttagtatgtggcatctgtcggtttattaagtgtgatatgcagagggctaaactaataaagaatttatggtgagaaagtagttattaccttactgctagaatcagaatcattacttatatgttatcttatgccatgtgttttggtaaattttgaggtaaatatatttgagtgaaagagcttaccgtacattaaaagggggaaaaaactacatttcacaggaaataatataggatgtgaaaccagccagatctggttctnnnnnnnnnnnnnnnnnnnnnnnnnnnnnnnnnnnnnnnnnnnnnnnnnnnnnnnnnnnnnnnnnnnnnnnnnnnnnnnnnnnnnnnnnnnnnnnnnnnnnnnnnnnnnnnnnnnnnnnnnnngtaaggattagnnnnnnnnnnnnnngtctggcttatggcagttatttaataagtggtagctattatttttttactttataaacaaccaacttttagctagcagaggtcgttaagcttttaaaattatgagttggttttcaaaaaggtttggaaaaaaccagtatcttacaactagataacataaggtttatctacaagttgacaatgatgaagtcgtctgaaaaagatggaaaaattgcactgggaaatagaacaactttcacactctccttgtaataatttgttcctacagcagataattttaatgctcagccgctttt

SEQ ID NO: 182099 - DNA, 695 bp, Homo Sapiens
  misc_feature (174)..(184): n is a, c, g, or t
  misc_feature (278)..(421): n is a, c, g, or t
ctataaaaggcaactttgtacaaaaaagttggatttcattttttgtgggtttattatttcatgtctgcatttttgtaaaggagataaacccatgtgaaatgagctaaacttttgaaatagtggtataggtattattccaggcaacttgttacattgtggggttgcagcagtggnnnnnnnnnnngtttctgttcccatggttttaaatttagcatagattttctttgtattagtactaaagctacacaatttataactacaacagatggcaagttatnnnnnnnnnnnnnnnnnnnnnnnnnnnnnnnnnnnnnnnnnnnnnnnnnnnnnnnnnnnnnnnnnnnnnnnnnnnnnnnnnnnnnnnnnnnnnnnnnnnnnnnnnnnnnnnnnnnnnnnnnnnnnnnnnnnnnnnnnnnnnnnntttacaaataaatattaaagacttttctacttaagataattcaatgttttctaatgtgacaaaagttgaaaaatatagagaataaatttcaactaaagtttgtgtcatagcttgattgatttaattttttaaagtttgggcaaaaattataatgcatatattagctgtactattttaacatcattattctcagttctactgaaaaaaattatttttgtgattgaaattcactgatttagcattgattaaagggataaggattcatcttcaaaat

SEQ ID NO: 182100 - DNA, 692 bp, Homo Sapiens
tgggccagaagaacaaactgatttaaaatatcagagtttctgaggcaaaaagttaatgtttgtctctagtcatttggaaattgtctaaagtattccagtttaccggagagttttcatcaaagtttaaagttaaaaaatacttgagttttatctctttatttaatccagtgattctccgttcaagatgctccatccccagaggtccacaaggtgataacggaagctcatcattatagttaatatctcaatagcccaaaggatgattatgttttaacatatgtttcactgattagcttaaaatttgaaagcattatttattacttaatagacatgccttctggtttattttaccaataaatattggtggaaaaaagtaataaacactctggacttattaaggtcaagaaccactcctgtgatccaaagtctttattttacaatgagggagaccagtcataaatagggcaagtaatgcaatcagaaaggtttaggtgtcatccccagtcaagaaaacagtgcaagtggctccttcctgcttcctattaatttgaagtccaccctcagtgaaggatcccttgagaatcaaaagaccccaggaagaacctgcttaatacatcagcattaaaattcagttaccctaagttcgggtggaataatttattagaaacttatttctaagttaataatattgg

SEQ ID NO: 182101 - DNA, 767 bp, Homo Sapiens
tctgcataatcactaggtggcattttcccttcatttgtgaaccaagaggggtaaatgatgctacccatacagtgacttctgagttctttaactttgacagaatctccattgtttcattgaatttctcattgtattatatgtctttccaagtgtgcaaactataatatgtagttaatgaaaaatggaaggctgcagattattttgcatgaataattaattgcccattagggctaaggagactgacatgatttttatcggttctgggtaaatgaaaattttaatggaaaactcattcaccatttactagctttgtgcaatattataaaaggtagaagcaaaacactagcacattgtgctttgcttggcttgtaaggatggctttagtaccattacattaaatggacagtgtgcacagtgtattgtaaatgccaactcttgcaaatttacaatacttaaatatgttcaattaacatcctaaagtattaaaagtacagaggaaaaactaagcaagcatttatagcaataccatgaaatctccagtaatcgttttgactgttgccttttgctctttagtgcagcttttctgcattgtaattgtattgctttgtatttcatgttttttacactcatgacttcagagttaagtacttgtacaccaagtattgcaatcacctttctcttgttgtacatgcaatgtaacaacctacagttttggtgcttttaacaatattcctctttttctttaataaaggatatttatttgaatt

SEQ ID NO: 182102 - DNA, 1143 bp, Homo Sapiens
ttggcttccttttacatctcttgtaatgaaattctgctgggatttttagtttttgtctgatttatttctcctcatttatttatacttttaattatcatatagtaacatttactctttctgtgtacagttctatgatttttgacaaatacatagatatttaaccaacactacagttaggataaattaaaaactttatcattcccaataattccttgtgctatcctttttaagtcaaatctttggccatgtataatgtgatcttttaactaactctaatagttttgccattttcagaatgccatatacatggaatcataaagtatgtaggcttttgtttagcttctttcacttagcataatgcgtttgagattcatccattttgttgcatgtatcatagtcttccattgtatggctatactagagttcattagtcaattcaagtgctttccagttcttagcagtgttgaataaagctgctatcaatatttgcaagcacatttttgtgttaacctaagtttttattccatttggtaaatacctagaatttggatttctgggtagtgtatattctatgttattggcaactgcaaaaatgtatgggagttccagtttgtctgcatcttcaccagcactaactagtgttaatgttttcttttaactttacccattttaatagttctgtaatagtatcttattgtggtttgaatatgcatttctctcgtgactaatgatgtttggcttttcatgttcttatttgacattcatgcataatctgtaaacaaggatttgtttaaatatttggcttgtttttaaaaagtgggttgttttgccattatttagttttgtgaattatttatatattctacatatatgtcttttgtcctatatgtgatttgcatatatattctataagtccgtggcttgcttttttattctcttaaccatgtctttcacagagcaaaggttttaaattttgttgaactttatctttttttaatatgaattatgtttttggtgttctatcttagaaatcttcgctttacctgaagtcacaattatattctcctatgttttttctaaagttctataatgttatatttaaaagttaagtctattaccatttcaatttcttatataaatttt

SEQ ID NO: 182103 - DNA, 1183 bp, Homo Sapiens
  misc_feature (208)..(332): n is a, c, g, or t
ttgggagaagaccatactaaccataactgtgtattacagaagtgaatttcactccccaaaaatgcttaagaaacaagcatcctagaacagcccacattgtgatttaacaaacatttaccaaaagcattgctatatgtgggggcacagggctaagagcaggcaggactctggagccaacctgtggggtttgagtccaaattctgccggnnnnnnnnnnnnnnnnnnnnnnnnnnnnnnnnnnnnnnnnnnnnnnnnnnnnnnnnnnnnnnnnnnnnnnnnnnnnnnnnnnnnnnnnnnnnnnnnnnnnnnnnnnnnnnnnnnnnnnnnnnnnntctgcatattctaagtgattggatggtattaactcgtttgatctttgcagtcacccaggagatagtatcaccattttcctgatgccaaactgaggctcagagaggtgaagtaacttcttcaagtcacaacacaactgttgtccaggaatcaggcagtctggctctgctaacccagttttacccactgcattaatgtaccgcatccacttgttcactcagtttcacctgacaaatactaattttgtctctctgtggaacaagttctttgctgggtgcagggaataaagcagaacaccgttcagttcctgccttcccaacgcttgtaaatctagtgcaggtcattcatggccgggctgcagggtgtccatgaatcctgctaaaatcatttgcgaaatgttgtgagcgtgggtcttttcttctggaaagagagtctgtgactctcaggttctgagttgatctgtgatccaaacagaggtgtgaagaagtgttgttttagcagatctgtgcctagtatgcctgatacacagcttgaacttcaaacaaacagcaacaaaattcctactggttggaagaatgaagaacttgtaagagcataataagtgctgcagtagcgtccggagcagggtgctgtggaagagcacacagaaggccacctgcccaggaatgcctcctagaggcagtgaaggcagctgggtgaaggatagggaagcagttcattggaacactgtggtgaccagtctgtccatgtagtgttgagacagaaacaacacgtgaacagctgcagctgttgtaccacttgtgcgcaagtgtaaagtccatggtgccatgaaatcatgtaatggggacaggag

SEQ ID NO: 182104 - DNA, 1146 bp, Homo Sapiens
  misc_feature (610)..(663): n is a, c, g, or t
  misc_feature (667)..(747): n is a, c, g, or t
ttggaccaactatattatctactcattatttctacatttaaaagtaagttgtttgcacaaggtaaattttgtctcttgcatacagaatgaaataaaatagaaaattaagatgattgtcttcaataatctatgtttcggggtatcaaaagataggaatgagatttgggactgcaaactggggaactatcctaaaatctgtatgcagaacaagagatagatgtcagggtccctgccttttcccatggtagtccggacaaattgccctttcctgcagtggcaggagacactggagttagaaggtatattatgtggaaaaggtgaaccatgtagggcctagatttggaaagatcaagcctagcagagactggggagatgccatagtgaaaacagagggctctgtatactgagtgatgatgctctccagttctcttgtgtagctcagtttcagcactgtgacagctgggtcccatatacacatactaccctgtcttggtattcagacaggaatttggaagatttttggccaaagaaacgaaatagagttaaaaatctaaaatccagacctttgggtgtttcccagctcagtcttcaggttcttgtcaaatgatcnnnnnnnnnnnnnnnnnnnnnnnnnnnnnnnnnnnnnnnnnnnnnnnnnnnnnntcannnnnnnnnnnnnnnnnnnnnnnnnnnnnnnnnnnnnnnnnnnnnnnnnnnnnnnnnnnnnnnnnnnnnnnnnnnnnnnnnaatttggctccttaagtctaaaccagtgatgacccacctgtgcctcttgatgcaagatctagctctttgcattatttcaagatgaaggatttgaaaactttcttgttattgctataaatgtttctaggtattagaggctacaaaacagttctcgttttcttgtgatctacttttttgagttgaagaatatctgcccaagttgttacatttcaagaatatacatgatatctcctgtatatttctattttaaaaaagaggaaaaacatggcctataacctcttcttacctaccccacattggcccttgtgtggaaaacatcgttagtgattgtagctgtggaaggagatgggggccatttcagtgcggagagagactgaatcataatgtcattagagtggg

SEQ ID NO: 182105 - DNA, 1558 bp, Homo Sapiens
ttggcttgtattttgtgatgagtctctagaatgattaaatgactatttttttatgaaaaattttttgttaataaaatatctgagggtattttgagtatgtggaaggaatgcctgaatagaagctgatctatcttaacatacctcaagaactccagttttaatatggtgagtgaggagttgactgggaaaaggagagatccaattcttgttctagtccttggcacatacactctctgggttttgagaaaaggatggtcctacaacgattctaagttgttttctcattggtcctacaacaattctaagttgttttctcaaaggcaaaagcatgatttcaaaatgacatcacttgtcagattttctggtgtatggaaagatttaataatcctgcctcttttgaagcctgaaacttacaatttaaagcctgaaatctaccataaggaacttggtaaattgtgtcagataccatgaaaatgcatcttttcatagttaaccacagattgtttatgtaaaggcaaattggtggtcaggttcaaggtaaaatggattattgggttgattagtagccaaaaactaaatgcatgttcaggtcaaaatgaatttgtttgttttagttggtgccattttccttttattattcagaactacagagtgtgcattttattaataggaatgaaagctcatgcttgaggatttgaatagggtggatgtatatattttataaactcaagttgcaaaatatgtaaagtcactactttttaaatagaatataaatgttaaaacagacaaatctatgttatatattttttaatacatgtatcagacttgttagttgaatgcagattactttgctttatggaatttcataacttttaataataaagcagttgttattggattttttctgtagacttgaatactaaatgggatagataccagacctctttttggtttatgacgtaaaagtatttgtacagtagtttctcttcacaaaagactgaattttaaaggattatagaaacaggaacatgtccatttccaaaatgagtgcaacagaatgaagatagtcacttaaaccatctatttaacacatcacctttatgtaatatgtagctagttttagtgttttaataagtcccaactaaagactgagtgttttcagtgaagatggaaatggagacccgggcacttgcttagagttatcgtgagtccgatgttcctgaacttcaagttgtacaattaagggcatactctaagaacttctggatgctttctggagtatacagacagatcaactaatgacttaaatgagtgactcttgaagctgcaagaagaggaaagaaataaccacaagaaggggctatctcagcatctgttattcctgacaggaggaattaaatatgctctgctggtaattctaagcttttctgcaggggatctgcttgccccaggagcaccttagtcctcattgaggcagccattctgccataaaaacgatcatgtctcaagctgttcctgccgtcctacacaactatgttagtagatggttagataaata

SEQ ID NO: 182106 - DNA, 1222 bp, Homo Sapiens
tggataaaaattacccataaatttcacttattccaggacacgctggcatttggactcagtgaaaagggtacctaaagaaaataaggctgactgaatgttttccataattttcacacaataacagtccctttctatccagcttgccttccatttatctctagggttagcttttcaggcaacatccttggtcattgcccagaaagtacctgagctatcagtgattggaatggcacaggaaaccgaatcacatgggtgccctccccttggttttcaagtatcttggagttgtgcacaaaaattaggtcatgccttcagtgtcttgttctttaaacctaccctttgacaatcaggtgctaatgattgtatactattaaaaccagcacataagtattgtaaatgtgtgttcctcctaggttggaagaaatgtctttccttctatctgggtcctgttaaagcgggtgtcagttgtgtcttttcacctcgatttgtgaattaatagaattggggggagaggaaatgatgatgtcaattaagtttcaggtttggcatgatcatcattctcgatgatattctcactttgtcgcaaatctgcccttatcgtaagaacaagtttcagaattttccctccactatacgactccagtattatgtttacaatccattggatgagtgcagcattataagaccttggtgcccagaaaaatctgtcctttttggtaccaaacctgaggtcttttggaagataatgtagaaaaccactacctattgaaggcctgttttggctaatctgtgcaaactctgatgatacctgcttatgtggattcttttccacactgctttcatttttaagtataaagacttagaaaactagaataatgcttttacaaataattaaaagtatgtgatgttctgggttttttccttctttttagaaccctgtatttaaacaagccttctttttaagtcttgtttgaaatttaagtctcagatcttctggataccaaatcaaaaacccaacgcgtaaaacagggcagtatttgtgttcctaattttaaaaagctttatgtatactctataaatatagatgcataaacaacacttccccttgagtagcacatcaacatacagcaattgtacattacaatgaaaatgtgtaacttaaggggtattatatatataaatacatatatacctttgtaacctttatactgtaaataaaaaa

SEQ ID NO: 182107 - DNA, 1187 bp, Homo Sapiens
ttggcatttttatattctacagaatttgttatttcatggtatccattttgagaacagatgataacacagcatgaattgctgcaataaggaagcttgctgattcaaaattaatttgccttctcatataatttcagtagagaactttgttttattaataaaatactaaatagcataaaagcagcatgaactgccccaaaattaggaaattataatgcaaacatagcaaacggagaagagattgcctcttgttacatggctgggttttaatatcagtaaagcccgacagtggtgtacagtaggatcaaggggacgctggtttagcacagagccagatggtttctgcttgggtagctgcagctcagctgagctgtttgataggaaccagagaaataggtccttagtggcaaaccaactgactgtaccatgtgccaaagatatgcatttagcggaagaaatagaggctggtacagtgagatttaggtagaattagggtgacaagaggcacttttctatcatattttctctttcttgcctatgtgtgaatttgagagaaatttttgttatcttagcatctttgatttgtgcacccaaattaaataacagataaactgattaagtttgttttattgcttaaagtggttatttcagtataaccattttgtatttatagttgtgattacatcagcaaaatcaaattgtttgaggtcttttcagaagagtttctacagaaactaagcctttgtggctctaataaagcccatgagtgtaaatcttaacatatctgctcttgttggtgcagttagtgcctctctgatagtaacagaggggagaactattgtttttgcaggaagagacctttcattgagaaatatatgttcatgctgttaagcaaacccagttgttctactcctcctatgtttaggaagtgaatgctagtttgggtgatcattgtattttgatctgacttaatagtcctatgaataacactctatgggctggaatttcagcttttggattcaatttgttaagtagaaatgtaccatttgagtcgctttctaaaatttttacatttgctataaaatttctgtttactgtcttaaatctcgagatcaaaacagtactttggtaactaatgttgagatattatatattccccttcctccctcccctccccttcaccccccccc

SEQ ID NO: 182108 - DNA, 1135 bp, Homo Sapiens
ttggcttttcctggtttcttttgcattatttctatttcattttcacccctattatgttgttagttatacattctaattctttcattgcttaccctagagattataacatgcatccttgacttattgaactgtaatgtaaattagtatattcatcattccccagacaatgcaaagacctttgaatactttaagccttatttatctctcttctgctttttgtgttgcttttaacacacattttaattctatttatatttgaaacccgatgaaacatttttaatttgtttatatttatttatatgtaccaacatatttaccatttatttccagtgtccttcaattcttcctatatttccatgcttccatgtgggataatttttcatctagatttagtatttcttccaatgcagatctggtagtgatgaattctctcagtttttatttatctgaaaacgtctctttctctttcattctttgaaggatatttttgctgggcatagaagtttggatggcaattattttctttcagcactttgaagaaattattgtcttctgattttactgtttcaccatacttcccttctctctgcaatcttagctcatcaaatccttgatgtcttcaaatagacttttctccctctctagctcttctagtagttgttggtgagaggttggtctgataaaagtaatctaccctggctagacatctgctgctaataataaacctactaaataaagtttaagatttatttgcaattttttttaccttagaatttatcccatgagaaatgtagaatcaggttactatattcaaaaattacttgacataattatttttaaaaattttaaaaggtaagaaacaacctttttaaatttaagaattaagagactaagaaattgagaattatttcaaactcaaaaaatgttgaaggctttaaaaatgagtaagataaaatgtaaggtaaatgaaatgaatgtaggcattttgaagattagaaatttagccgtaggtaaagaatacaaaggaaaaataattttaaaatcatcaaccagatcaacaaaatatatgttaatgccgagactttgaattaaagtgcgaattgtatcttaattaaaaagagaaaacccaaactgg

SEQ ID NO: 182109 - DNA, 1536 bp, Homo Sapiens
ccaaactttaaggcatatgctctttccacattcctcaacattatttgcaaacatcatgaaatgacacttccatcaacattcaatgaggaaagtagtgatatagatgagccaaaaagagttttatataaacttatacaatctaaactcttgctcttcctttctgactcctgagggtgagtgtgatggactagaagaggtagccttaaaataagtgagcagctagggaacatgctcaatgggcaagagaaaatgaccactgaccagtcaatacctgtgtcagggggagttaccagtacctatatttatttttaaagtaattaaaaagtagaacacttacaaattttccacctatacatgccatgtcttcctcggggacagtagccacatcttatatatttcccaccatgcataggacccagcacacagtgaagccagtaggcactcagtgttgaatgctcataccaggttttctgcttcctgtagttaccctgctgagcactgcttccatcacaggtgcactgggcctcaacacttctgccatttccccatttgtctcctccatggacactgtcaacaatggtctgtcaacacctgctctgtgccaaagccagggagtaggctggggggatacggaagagaatatctttctccttgatgcctgctgtgccaacagccccctttaagccttgttcacagcctttgctgaaacaagcatcttgaaagcaagccatgttatacaccgcatgaccttcatgctctgggcccagctgactgaactggggcaggccccagagtcatgggcagcctattgtcttgctaatggcctctgacttagcctggagtaaaacactgtccaaacaagactggtggttattcaagcataagaatttgaactaggaagccaagaatgaagcaaccggaccattaccatcaaaaaatgattaaaggatgaagaaggaagccaacattcagagagtatctggttcatgttaataatggtatcatattaaaaggaagatacatgaacttctactccaaaagctcctaaaactgcctttgcccacaatgaacagtgtaccctaggcctggtttctgttcttggattcctagatagtctttcttctttgtcactgtgctgatcatttcagtaaacccccgactaaatcagtgcagctctgtttattgcaactaaaacgatccaaatgaagtctcccttttctagatgttgggttggagggatgctaaaacaaagatgcttaggctccagagttttacagagcttcattcaataacactctactttccaaagaacttaaatatgaggtctgaaggacttggaccaagaggcaaatccaagctacagacaccatgtagtactcagagtgacatctctcctctgacagctcaggatatctctatcaagtccataagctagtcatatctaggactatcttgttaaaaattctctcacagtctcctcagccctcttgtaaacagacttctggaaggtccacttcatcagtttgtatatacttt

SEQ ID NO: 182110 - DNA, 1183 bp, Homo Sapiens
ttttttataatggccaactttgtacaaaaaagttgggtgagttttagaaatagtgttacataccttttcagttgttttcaagaggctttttgttgcctttgtagccctgaaagctgttggtatattttttccctcatggacccaatagaaaagttgtatatttatttggattatatttacattctgtcctttgtaaatgtttggtgtaacttgcacttttttaaatgacccagtttgggtattagcaacttaagaaattccctcatcaagtaattctcaactttttagtctttctcctctcttcaaatcatgtgactttttaaatggaagtttttcattgattaaaatattttagcacctaaaagctagccttaaaaacagctgtaaaagaaaaacatcaggaaattagatatgactagcccagttaattaaaagacgggctcaaaccttgttttattctttttcatcttggatgaagattgaagggaaaataactcaagtgcgtaatatttattttcaatttttaatgagactttatcctcatcacaacattaatactgtacatagtatgccaaaatatccattaatttgtctagaatagtacaagactttttaaagcaattgtcctcacagagaccacatgtaatatactgaaatatgttcatttttaatggctttgttaacatcaaagaaatgctgcctaaatttgatttcagatgaggaaggagaaagtaaagtgtgcatagtaaggctgtaggtgaagagttgtgagataaatagttcactcagttgtacaaagcacaactagaactttttgttgggaggcttacatacatcttgaatattcttaatgtaataatgttgactattaagttggctacacagtcactgtatgtactaggaactggtttccttgacattctagaatcaatggctaggagaggcattaatctttgaggggctgaacatatcatgaagctgagtcagtatggaaaattttcaaataaacagggtgctgaagttccatctgtctcatctgcttatgataagttcttattgattagtgaatgtagcttaagcctttgtatgtgtcctcagggggcagaccgactttaagagggaccagataacgtttgaatggagggattatatttcacgtgttttagcttgaaatttatttttt

SEQ ID NO: 182111 - DNA, 1924 bp, Homo Sapiens
ttggagattccctgatttttaaaaactaaaaatacagctaaacctttcttatgtataaagtatgcctatcatatacagggagaggtgggtaataaacttcctgtaatgacagtgtttggcatttctttatggatggaattggaacatgaacaagaccatgtccagcgtttttactgtgaatgtaaatggaacagcagcccaaagctgttgtctgtgccccagaggtgctacctgtagacagggaccaactccatgtgtgtgtgttaagtgtttgactccaattaagactcccaagcaaatcctgcatattccaaatgtaaagagtactcagtgggaaaaaggttgttacctcaaagtcattgcttctttcctggctgggtcacagggtgaagagatgaaggtgtctgatgtatatagacaattagggaaaaatgagcggcaaaggagctttccccttcagctgcactctaaaggggaacattttaaggaagtactagcagctttgactcttctatgctcctgttggtttacaagccaccaagaatgtcagtgttgagaatacggcctggtaaaatgggagatgtaaaatgactaaatgaaaggaagggtagttttaatgttgaagcaccgtgctgggcactggagctacccagaggaatgcacaacgctcccctcaaggagctcacagtctagcctactccctggctggaagcctcaggaagacgtgctaatttattgtggaattggtagtttgcttttcatgcccctgtcttccttctcatgaccatttccccctttctgtctggcttgcattattgatttccaggaccaagtcctggcttcctcctgccttcctgagatgatgttctgctcagggagaagtggaggggtgagctgtgtgtgtccaccgaggcacggccaggaagaggcagcctttacctgtgaggggctccatgctccagcagcagagcaggttctagtgacaattcaactttttatgctatgaccaggggtggatctaaattttatggggctgaaagcttgaattatttagaaagacttctttaagaaaaacaatgttaatataaaattaggtacagggtcttggaaggggccctgaagattaagcttccttagcgtcacaataagtccgtatctggttgcaattgaaaactgatgcttcagtgagggtatctaaaaaggtaaactggcatatccagggcaaatgtgggctgccaatggctcatctctagggtaattttatgtctgaaagtgtatgcagttgggtcagagcatgacctttaagatagcctctctcagctaacatatttatgaagatgaggcctggtgacccagcaggttcattggatacataagaaatgagaattcctggttcatgggccaacctaggactctggagtatgcagacttggccattcgtccattgtggcctgcgggtcgcaccccaggcatactgaaaggccatactcgtggctggctgcctgcgggcctaagccttcccaggatcttcaggacacttgacagacttgtgttttctggtctgagctgcctccacaggtccctccacaagcctcactgcacctctcccctgctgtttgtgtttggaattttgtcttctttagctgagaccaaattaaaccttggtgcataaagtgagcttaaaacttgccactgtttagtaagttagcccccatagaatgtgaccctgtctgcagagtctcatttacccctctttttctcattgtcatttgttggctttattaaggctgtcttacaggatcatgttggcatttactatcatgtctttatcataaaccatgtttgtttgaggtagaagaatcaccatataattcgtttgcccaaattgggactattgaatagagaaaggtgatgctattaatta

SEQ ID NO: 182112 - DNA, 1283 bp, Homo Sapiens
aagtgttgcttaatgaatcaattttatgaatgatcatcttatcatctctttaaaattttatagcacactgtcctatttctcagagttcaaattaggtatactcccatgtgtatgagagacacaattaatgacttgtaggtcataattaaagattcaaaagattcatttttgttaatagaatgtttacaaatacttattctcattttgctgtataatgagcagtgtctccaattaaagtaattaaaattcaaccaaatgaggtcagtgtgacttgtcatttatgttaacttacatgttccacagcaaaataaagctgggacttaaatatgacactggcttaaataagtaagtactggtaatcatccttgatcatgtgccttgagggtctcatcttaagtgccatgaaagtctaccagtacttcttcatcactaaaagattttcatattattattatttctgtaaaatggtggaatccctcatgaatatgcttccctgcaatgtccttgttaatttgcccttaatcagactcttctttagtgtatatagttgttctgctttgcattgatccctgaaacagccctggtgttgatctctgtaaaaaatttcactcacacagacagtagacttcattaaagatttacatgatagcagatatgggagaggttcacatactaccaatgcaaacaacttcaaatcaaatagtagaaatgaccatttttagatgtcacttatttctcccaataatctattttggcctctctctttttgacttcattgtgtctttaccccattctttctttttgtcactcattttccagcttctgttgcatgagtaaaagtaatgcattttctaatttgattcatagagaggagaattcttcccctgatatttgagcacctgataacatttatgaccaagagtctgctctactctaagtggatttttaatttcttttatcagaaagaacagttcctctcataagaggaattatgataccaatgtaatagcaattatttaatatggtaggtaaacataaactgccattgaaatttagtagaaagcatattatatgcagtgacgataataccttcatgaaattctttacttatcattttttcttttcaaatttgttttacattaaagtaggatgaatgtcttatcctttttactacattgcccaccataatggttctcaaatgcaacaacattttcatttttgatagaactgagtttcatcatttactttgtgttacacttttccctagaccaaggacctatgaa

SEQ ID NO: 182113 - DNA, 1337 bp, Homo Sapiens
  misc_feature (114)..(130): n is a, c, g, or t
ttggatgaataaaaatctggcaatacataggagtaatggagttcttgtagaatttagagacagcttgtaaagaaggtgacatttgagctaggttttgaaaatgggagacagagnnnnnnnnnnnnnnnnngagatggagtctcaaaattctctcattatcaacagcttgcattggtgtggtacacctattacaatgtgaaccaatatcaatacattattaactgaagtctgtggtttaccttggggttcattcttggttttgtatattctgtgggttttgacaaatatatcatgagtaacatatatccattacagcatcatacagagtagtttcattgccccaaaagtcccttgtgctccagttatttattctttttcctggcctgctggcaacaaatcttctcactgtcctatagttttgctgtttccagaatggaatatagttgagaccacatagtatgtagccttttcacattggcttctttcacttagtgatcttcatttaaggttcattcatgtctttgtaggctcgatagcttatttctttttaacgctaaataatattccgttgcgaagatgtacggtgggtttttttcccattcatgtattgaagaccatcttggttgcttcgaagttgtagcaattacaaataaatctcccatggcctttccatgctactcacagaggggtccatacggcgttgttctggattcccgtcgtaacttaaagggaaactttcacaatgtccggagcccttgatgtcctgcaaatgaaggaggaggatgtccttaagttccttgcagcaggaacccacttaggtggcaccaatcttgacttccagatggaacagtacatctataaaaggaaaagtgatggcatctatatcataaatctcaagaggacctgggagaagcttctgctggcagctcgtgcaattgttgccattgaaaaccctgctgatgtcagtgttatatcctccaggaatactggccaggtttgtggaacagtggttagtttttatattatagaaataaagcttacagacattgtgagacatagaaagacataagaaaacagaaataactcaggcgtaagccactgcgcccagcctgtaagaccttttcaacatacatgctgggcatctggcagtatgttgaactttataatttcattttgtgtagacttgtgccactaaatatctagaaattctattaaagtggcttatcacattttcccatagtcaaagtttttaccttaaaacaatgaaatactgggacagaaattttttaagaatcttagccagtcatgacggcatgcacccatagttcccgttaatt

SEQ ID NO: 182114 - DNA, 1616 bp, Homo Sapiens
  misc_feature (1028)..(1107): n is a, c, g, or t
ttgggctttcaaaatccaagccataattggtgaggggggagtttcagaattacatagaaaaattaatatttgaaaaaataattctgaaatttcgaatttaaaaacagatgtgctgcttctgggtgtaggtagtaaaagtataggaaaagaactgtttccttagaagcggactgtggaagggctatgtagaatgtcaaagggcaacaagagcctgtgtttttaatgtcatcctgtactcggcacaaatcaaaggccaatacaagtctgaaaagcagaaataaatatttttccaggtttttgcttgggcacatactaactgctttgggcattctaatctggtctccaaacaccaaagacccatttcgagcctgctattagcctgctgctgactctatcacttggagcaataatgtggggttatggtggtggaatcttgtatatttttgtcaaaaataaaaccttgagttaaggggatagatatagatggaaaaatacacaaataaatacggtatgaaaacacatggaaatgtgtctttgtcaaatatgaatcattattaccatcacaaaaattcttctcttggccaatatctcatttccctatatagtatacaagcaccatttcttctcaatttttaagaagagaaattagtccattaccacaggggttcttgtcactactaattatacaacaatcttttcccaacaaaaagatgtcctccacaacctttgttttcaaagcagacagcatctatgtggccaaatatactttgggttgttcttgaggatactggttttgggctgatgactatggtgggcagcatggatccattgggctccttctgctaaacagccacattgaaatggtttaaaagcaagtcagatcaggtgatttgtaaaattgtatttatctgtacatgtatgggcttttaattcccaccaagaaagagagaaattatctttttagttaaaaccaaatttcacttttcaaaatatcttccaacttatttattggttgtcactcaattgcnnnnnnnnnnnnnnnnnnnnnnnnnnnnnnnnnnnnnnnnnnnnnnnnnnnnnnnnnnnnnnnnnnnnnnnnnnnnnnnnattatcagacataggtttctaacttttagatagaagaggagcaacatctatgccaaatactgtgcattctacaatggtgctaatctcagacctaaatgatactccatttaatttaaaaaagagttttaaataattatctatgtgcctgtatttcccttttgagtgctgcacaacatgttaacatattagtgtaaaagcagatgaaacaaccacgtgttctaaagtctagggattgtgctataatccctatttagttcaaaattaaccagaattcttccatgtgaaatggaccaaactcatattattgttatgtaaatacagagttttaatgcagtatgacatcccacaggggaaaagaatgtctgtagtgggtgactgttatcaatattttatagaatacaatgaacggtgaacagactggtaacttgtttgagttcccatgacaaatttgagacttgtcaatagcaaatcatttttgtatttaaaattttttgtactgatttgaaaaa

SEQ ID NO: 182115 - DNA, 984 bp, Homo Sapiens
ttgggcttattttcttttagaacgtgcctatgcaagtctcttgtccatttttcaactgttttctatttcttatgaatttgtaggagttctttgcagcttctggctatgcatccttcattaattttgtgtgttgcaaatatattcttccattttgtgacttgtctttttagtctcaaaacagaatcttttgatgaaaagaatttcttaattttgatgtaacctcatttatcactcttttccttcatggttggcacttgttgtgtcttgtttgacaatgttgcctatcccaaagtcatgaagattttctcttatgttaacttctaaaagttgtatcatttgtcttttatatttatatctacataatgcacctggaattgagttatatgaatgctgtgaatttgggaggggcgtgtttcctttttttcccacatggatatccaatcaactcagccacatttactgggggaagacatctttttttctaatgcgctgtagtgttaggtttttcaaaacttaggtgtctgtatatgtgtgggtctgtttatgagtctgtctattcttttccactggtctgtttcctacacttgtgccaatgccacactgtcttacttatagctctataagtcttggtattgttaaggaaaaatatttgtaacatttgttaaaaatggcagagaagactttattcaaggaggggaacattgtgataggtagagggactgctgcaacgaggtcttgctgtggtgaggagagagattgggctggagtccaacttctacaaggacaagaggggatttatagtcaagcagcaggtggggtcagtggatggaagaggaaacatcagagacaggggtattcttgctagaccaactcaacagaattcttgctgaagcacgccagggtgataagatatcaagagttacgggtgaggacagataccaacgtggagaattttcactaaaactagtacgattcttgcttaaa

SEQ ID NO: 182116 - DNA, 918 bp, Homo Sapiens
  misc_feature (490)..(539): n is a, c, g, or t
tgtaacaaaaaagttggctcctcatctgtccccaccacaatcaatacgattggaaccagcacaagtacaagtaagttccccggaatccctttaacgtagtctggtttggcgatttgctgtgtatgtggcatgtcctgctgacagtgtctgctccatgcaccctgtgaccctgggagagaaggactgattggaattggctgtgggaaaggtcctttggaccccatatttgttgctctttgactctgcaaagatgaaaatacttgggaaggtaaaagtgactgatggtccaaatttgggttataaacagaccaaaaataaatagacaataaatgaaagaaggaaacttgccgtttccacaatcagaaatgcatttcacccatgtctttcaccctggggttttggatttgctgagacactgagttactgtgtgattctctaaacctaattctaacccatggttaaccaggcagcctcatgggctttgtgcttnnnnnnnnnnnnnnnnnnnnnnnnnnnnnnnnnnnnnnnnnnnnnnnnnncttaaatttcaccctggaatgtttcctccctttgcattttctggttttaatccccaattgttggggcacttttttcctgaccagtgggagcaggtttgctaactgagaatgctgctgtgtgctgtggcctggtgagaatgccatggacttctctcgctcagtccaacaccttaggagaggtgggtcaggaactgctttgtgcgtggggagagcggaggacagccctctgctcttttgaccactaaagcaaagtattgcaccctcagctgggcactggggctgggagtcctctctgtgtctccccactgaggctgagcaaagtgacaaacacaccactggtgtctgtataaagtagcggtgtggaagtgcaccctgtctt

SEQ ID NO: 182117 - DNA, 1493 bp, Homo Sapiens
ttggcaccaagcttccttcctctaaggaaatacattcattacacttctcacttgaatgatattatgttttattttggtagactagcaaataagacatatagtgtcccccaaagtagcatctggggagaagtgctgttgagtgtgagatgccctttggttttcaattaaaaggaaagaatgaacagggcagcagtgagacaaaagaaacctttgtgtcctggtaacattgcagtacaatgaggctccagggataagggctttaactggaaacttggaaagttctgtctagaaaaactgaagaaaagcaggccttccaagtcactgacatctaatacactaatcccaagcatgcaagtagccagagacatgttgagataggaattgaaggattagacatttgtttattgaagctctaagttaggaactgtttctaggctttgcttgattactatatgatatgttgtataataggatacttctgaatacaaataagctgtggtttaaaccatgtaaataacagaactcttgtttcgtctcaggttaaaccagtatttagcagtattgtgtatgttaaaaaacggtgcaattttaagagaatgctgatctaatgaatttcttgagatttttgaggtgtgttttatatctttatttggcaaaatacaaaatttgccgcctttgcccctcatttttttgttggtccataaaacccaagttatccctttttattttatagatgaagaaactcagccactgagagatgaaacagtttgccccaagtcacacattttcatccaggcactgacagtcttccactggttttattagactttggaaagtggacaagatttgataagaggaaggagcactgggaaggctttttctccatggtttctgtgttagactgtagtgcctggctccgctggcacgagcctctgaatgtcaaccaggcatacatttgatccagtagttcccaagacttgaacggcttgatgaatttcagcatttataaggaatattcttctgtggatatcactgctaattattcattgtgcattgtatttcagagattttttttcctacattttaaactgaaacccagaatcttttacacattcgtagtttcagagccaaagcaagtcatctagttggccagccccggttcttcacactcgctcagcgtacttacaacctcagtttcaccacgataggctggtacattttattatttgtcacttatttttgttttaggttagagccacagctgaaacaactacaaacaaaatatgatgaacttaaagagagaaagtcttcccttaggaatgcagcatatttcttatctaatttaaaacagctttatcaagattattcagatgttcaagctcaagaaccaaacgtaaaggaaacgtatgattcatccagcctttccagctctgttatttaaacaagaaacacttctgggagcccgaaagccatctgcgaaatatcaaccatca

SEQ ID NO: 182118 - DNA, 1144 bp, Homo Sapiens
  misc_feature (220)..(330): n is a, c, g, or t
ttggctctatatgagttatgtatttatttttacaacacatacacatactttactgcaacttctgcaatgaatatcatcataaatagatcattgcacagttgtgtaaatatatctgaaagatgaattactagaattaaaattgttgagtcaaataatatgcatactaaataaatgatgttaacaaactggatggcaagattttcatgaatttaatgtgtgnnnnnnnnnnnnnnnnnnnnnnnnnnnnnnnnnnnnnnnnnnnnnnnnnnnnnnnnnnnnnnnnnnnnnnnnnnnnnnnnnnnnnnnnnnnnnnnnnnnnnnnnnnnnnnngctctacacgacagattataaaatatttccaaaatagattgctacatgaaaaaaaataaggtggatagaacaatgtatataatatgctaccatttgtgtaaataaacaaatgtacatatacatctagaattgcagagaataactggaaagttgtaaaaaatatgttggcattagtggttgcttctagacaaagtaactgggtaatatgagatcagagaaagaagagagatttgctttcctctagtaatccatttatgctttatatttgtattactaattgaaaaaataaatagaatttaaacacacactcacagatacatttgatttagccagaaaagtcaacactcttcaaatcctgctttgccccaccagtgttcatatgagacacttaaggggaacatatacacagggaaaatgataaatggggattaaataatatttagtagtataactctggaaatctggcatgaaatacctgccctaaggtgattcctctaagcctacatggatatcttggtatcttgccactctaggtttggctatccacaggagagggtacaggaaagggtacttgagatctttcaggaagcaagtccaggatcaggtgaagtgagcaaaacaaagcatcgcccgtagaaaacttagcgttctgttacccacccactggcaaacatgaagtgactctgaaactgacaaacttctcaaaactctttctccctggagaggggcaaaacttcctggagatcttctctcttccaccatccccatatttacagatgatattactgaaatttcacaagcaagaaaaccaagt

SEQ ID NO: 182119 - DNA, 2140 bp, Homo Sapiens
ttgggtttcagcactcaaaagccgcaaatctgtaaattggattaagaacacctgccctacctacccggcaatagtgtgaatccaaatgctgcaatgtgagatgaggtacaagtaaagagctgtgttttgtaaaccagtgcagctcagcattgactccctctctaagtgaaaattgcagacaggcaagtctgttttcccttgccaccttcctttgggtttggttgctctttggatgaatatgatgaggtcccacatttctgaatttattggtttgaggggaaaggctggttagacgtctttgtattgtcaatggttggtttttctctggcagtgtcagtgttagagctatcatcttccttcttaaatggcatgagcaatgagcaaacttccctcctttcaacattctcacctacatcatgtgccccttggctcacctactgagcttgccaacttctctcaaaaccaatgctgcattttgggagagcagctgtgaatgggcactgcctaaattgcctcttggggtaatctggagggtggaggtgttaactcaaacataaccctatgacttgactcagagatatccattgactttgaggattagtgtgtttgctcaggccagttgtacagccagtgtgcaagagatttggtacctttgcactaatgcacacaccagtgtctatttcattgggtttggaatccactggactctgttgacctaaacagttagggttttgattttttttgatatgcaaatttatattgagatcattttcatattcctgtcttttggtttggctttactaaagcttggctggtggtgctgtgtccctagaattatccctgcaaccaactcccaagttacaagcttcattaagagccttagactcacttttttctagcatcttctgacctgagaaaattccactgggagtaaaggatagtatcttgtgtcatatgggtcttactctccctattttaccaatgagaaaacaaaactcagagaaagatgacttgctaatacatcaaaccgatgtcctttttattgaactatgctgccatttaattaaccgcccttcccctctgagggagtaaggaaacagatcctgagttcacttgagcactttcaaaaaagcaagcagttgattgaatttggtgtcagagaggagcatactttgcaaatcaggaagagtgacagcttaccctgtcctggaacccttatcccacttccaggctgactttagttgataatgcacttctgggtaaatgttgccaacacttcctggttttgcttaggtacagtgaaagggcatagtgagagctatttttagtgattctgttctttctgtcagcaacatgaaggagggacgtttgaataatttttgttgtagaatatttcttcatgaaaggcttttgggtgtctttaacaggtgttgggctagagccccaccaggagttgaactgcctcttgggggtcaggttccctaggagatctgtcacctcttcaggagtatttgagaacattgtgtagttacagcttcactaaatgcacgtgacaggcttctgtgccttgggagccctggcttatgctgaaacttctggctgaccagagcagtacagcaactttgccctgtctgtgttctgcttcctggatgcatccttcagccactaaccagcattgcaagatggagcagggtgaacaagctggagactgaatagtcttttggagtttgcgttttgattattgcaggcgtgttacaatatactggtgatttacctggtactgtggcacctcccagaaagtctggtttttgccccatgtttgatatttactaggcagaaattctttgtcctgttaactgcctcctgggagaaaaagaggcaatacagagttaaatccttaatttgcccactgagacagatgagctgtggtattccaaaagacaaattctatgactagtgtctcctgttcaatgtaagtgagaccctctttggccaatctgcttctagtcaaggctaaatggattggaataaccctagttggccaggctacacattgccagcatgtcccgttgagttttaattgcctcatgtggctgtggactttatgagtcaatcatttgtagctccagtttgcacctag

SEQ ID NO: 182120 - DNA, 1193 bp, Homo Sapiens
ttggttttgttccattctcctcctcctcttcattttaatcaagaaaattatttacagagtgactgcttgcggggcaggactaacccataggcagtgtgccctgagtagccccactctcttcttgcagctagtgtgttgatgagaagttgtatagtatattgcagaatgtccctcagttgggatttatctactatttctctcatgattagacagggaattgtcggtttttgagaggaagatcacacaggtaaagtgccattttcatcataccatgtcatggatgtatactatcagtatgacttgatgttgatcttgatcatctgcttgaggtagagtttgtcaagtttcttcaacaacagctactcttatttcccacttttcatactgtactctttggaatgaagtcataatattaatatatagcccacacttaaggagtggagcattacacctcacctcttttcaggtggagtaactgtgtaaattatgtggaattcttaggcatgggagacttcactcttctccacttatttattcagttatttgcttatatcagtatggactaaatggatattttatgggaatatgtttttaatatggtggaaattaataatataaccagctcccagttgaagttttctcagattacatttttctttgaaacagaaatggagatgtttgttaagatccagttggagcatatgttatctcagattactcattaatagaaaaaaatctcagtcatatctggaaattacacaatctgccagggctcatgtgatagatacctgcctgcacagtatttaagagttcatgcactcttcttgttttgatagatacatgttttcatcactgccgttgttacttcctttctgtcaagaggtgaataacagtaggtggacaaagtttagggagccacatttaccaacttctgtgaatatacccaagaagattctggcaaaacatagattcaaattacagttgatgctgtggatggctatgggttaactactcttctactttgacacggattatttgttgcttttatgtttctaaattctcaattaaaaagaagtgtatccttaatctgggccaactgaaagtgaacttgttcattcacctctaccttgctttcaaaagactgcttaccatggaagtgctctagacgaatcatttgaaacatcttttgtttt

SEQ ID NO: 182121 - DNA, 599 bp, Homo Sapiens
ttggcccagtttcctccatacgccccagtttcctccatacgccccagtttcctccatacgcctcaatttcctctgtatgcttcagtttcctccatacacctcagtttcctccgtctgcctcacagtttcctctataagcctcagtttcctcagtacaccccacagtttcctccctacacctccgtttgcttgttttgcacaaatgactgacaacagaacacttgtgggtgtggacggagctcgcgtctcgaagtgtttctaagatgctattttcagcaggtcactataaacgctttctactctgaagcacacaggggctggggctggccttcggagttacgaggaaacgaggaccaggaccagggattctgcatcagcacagccgccaggagccggccggggccccatccctgacactgctgtcgcccggctgtacctgggtgctgtgtccgcggggcgtctggagacgtcgatgtggtcatagcatggcctggaacggggaggtctggcctgaacagagaaatgaggggcgtatccgcttctccaccctggcctcagatgaaaaggctctgggaggcagagggagtcagacacgtgca

SEQ ID NO: 182122 - DNA, 909 bp, Homo Sapiens
caggccaggccccttgagaaacagagacagcaagcgaaggctcctgggcccaggggctcactcaagcacagatacccgaattccctctgccctgcaggtttggaaaggccccttggattcctggctggggacaatgatgacctggaccctggccagaagagccctggccctccagcaaggcagcacctgctctgatgcacctgtgcacccctggccctcccagccacctgggagcccgaagcttagcctgtaggtggccaagccagtccctactcttgggctgcggccacgtgaggctccgcatcagcagccaggggcgagcactagtggacaaagccagcaaatgcggcgttcctgtgagcagataccctcaaccagccagctgtcaaaagtatttcaagataaaatccaggccaagcaaagcctttaagttcccgtccattctgtgattcccacgctgcttccagctcaccaggtggggtgcctgctgcccaccctgacccacctcagtagggaggagcaggaccctctacatccctgtgggtgcagggcacacgcccctcgttgtctcactgagcccccacagagccgcctgcaaatgagtcaaagcctggccgccctcatcaccacagccccgtgccctggctccttcacacagaacacatccaagtcccacatcctgacaaaaacatgacccctttgatcacttcctgccaaacctccctttcctcaccgactcctccgctgaccctaagtccccctgctgtgcccactgctccatccttggcaacctgaccacgctgctcttagcactgcagtcatcctcttctccaatcagcttctcatcctcatgtgctgcctccgtcaagggcaggcgacactgtgtcctcggccttctttctgccccaa

SEQ ID NO: 182123 - DNA, 1405 bp, Homo Sapiens
ttgggtcttccctgtggcatggcaggtgttttctttcccttactatactctcttttctggggcactctggctcctcctcatcttcatatgtcccaaggtgctgtgtagggcgggcacataggcagctgctgatgagtaaaaatgctgtttctgagttgttgctaagtgcctctgttgttcatgctaagaatggttggcaggtggtgctgctgagccagacaaagaagcagatgttgggcaagtcccaggccctcagctgtgctgatctggagttcactgaggaagctttcctttgctgtcttgtctggagttaggggctcttaactggagggaggtaggagagggtgtccaatgaacctcctaaagttgacgcagaatttggggtatatgtgcattttttatggaaagggtgtctgattgtcagaagtacttgattctaaagaagtttaagaattattagtttaaaacatgattccacatctaactgtcacttggcacaccaatctctgtattttgtttctctgtttctgaaagtttgcctcttttgctctgcattattgagaacacgatctttagagttgggctgactttgtagagttatttagatatttttctatcatgtgctgtatcttcatattatttcttgaaataaaacagtcctcaagtgagtctctgaatatggaattacagcgttgcttctagggttaattgtcctgtccttgaatatagatttcattaaatggctttagctgagttgcaaccattatgctgtcagatttctgtcccagggagactgccagtaacaaatgaaccagtacataagcatgttaggttgtgatgagtaattgtggagaagaagatagtaaggggtggcaagagtcttgtcctagtgtcctggccttttctttagtgcagggagttgctttttttatatatgcagggaggagaagaggctgtcagaagtatgacacctgagcagaggcctggaggaagtgagagactgagctccgaagctgtctgagggcagcacctaggcacagggagcatatcccaagcctgaggagcctgtgaggccggcacttccagcattccagggctctaccagcacagaagctgcggggcttcctaatgaaatcctctgagtagaacccacttttaagcttcatagccacaccccaaatatgctgtgttccttcccattcctgcctctgcatgtgctgttctctctacctagaatgcccttcctggtctgctcatctcaagattatcttcaccttccaggacccaggcatgggggtggttttggtgaagccctggcagtgtgagtaaatctctccatctttactcacacagagctgtgtgagtcatgaatcttcagtcttattatgttgaagtttttggctta

SEQ ID NO: 182124 - DNA, 622 bp, Homo Sapiens
gagagcagttcaattttcttttctccctgcaggtgctgctgtcaagcttgaatgaaaggtatctcatgagccaccacgccctgatgatatacttttgaaaattatattacattttctacagttacactgtctttcctctgaaaaatctgggtgatctgttagaacatttgatctaagctacactccttgataatgtatttgtcgaagtaatgattaatttatgtgcataatttagtcctttgcatacaaaatgcaattttgtttattagaaatattttagataatgctttgtaggatttttgtgttatttttaggtctgaaaaagatgaagaataaaacatggcaagtctagagggaggcactgcttgaagtgcgtgaaacaaatcaagcatcaacaaaaatagaagcccttgagatgaagaacagaaaatctgtgattattatcattattagctttacagggatgttgaagtgatcaggatatcaatgacataattaagtggtattatatttttaaaatttgagaaataaggaaaccattgctttaggatatgtctcttatgtactcagaaaagcttgcttttgtaagttaagcctcaatgatgaataaatagtgcatttg

SEQ ID NO: 182125 - DNA, 322 bp, Homo Sapiens
ttgggaaacattttctttaacattttttatagtgttgttttactggtgatgatttctttcaggttctaagtgcctgaacaaaatctttatttcacctacatcttgaaagatagtttctctgagtctacaattcccagctgacaatgtttatcttccagtactttaaagatgttgcttcattatcttctaattttctttgtttccaataaaatgtttgctggcattttttgttcctctgtgcaaactgtgtttttgtcattggccactttgagaatttttctttatcactagttttaagcaattttattttagtgtattttgt

SEQ ID NO: 182126 - DNA, 1233 bp, Homo Sapiens
ttggcttagatttgattcttcctttaaatatttttctcattgacatttgaaagcacctgaccttatataaaatgaacaattttcataactccataaaaggagaattatggcatcatctatttctttctcttgtctcataaatctaaaccatcaacctgcttatttttgtatactgtcacactgtgtattccctgcattgaatgcctgtctgttgacattatctgtaaaaattgtgggaagttttctgcaccctgaaatttctgttatgcggattaaatatccactatccatgtttttccaagtcttacagtagaaagggtaaatgcagccctcacagcagcctgttgttcgtcctgcaaatgtgtttccatcacattacacaaagcctctttgtcttcgtggttctaccctactaataagttttttaaaaaattatgtaatgtgtgtatatacaaatacctatatgtatgtgtgtacacatacagctgatatctgctgagattatgtatgcatgaactatagaattaacttgtaattttaagaaaataaattattttgtaaagataaatctcatgtttaagaagaggaattacagttgaatcatttagggatgcctcagcctaaacataatatggaaaaagccataaccaaaagtcattttagagtactgctaggttactcaacctatcatcacatttaattaaaatgtcagtttgaaccatggccagtctatgttggttaatatgttatttaaatcaacttgtgaagtcttcattttaaatatagaatttgtgttaatggactggaaaataacattctattgcttggaagatgtgttaaagtctaaagatttatgactttgtaaaagaagaaaaccaggtgatgatcagttggcattagtatatgaggatgtactcatatttggtaatagccattttttctaactagagcaagggagttgggaatgggaggcagaagcaaggacacagacatgtaaaaaatcatagaacaaaactgtattgagttctgagtatgggtctgtgatccatggttcagtttgagaggttcatgtgtcccttatgagaagggacaggaaagccaggaggaaaggagtatgtttgggcctgtgcctctgcttccaccacagaagtcagcagctctacctttctcttttctcctctttatctaataattgtctcctcttcaaatttgggaaatgagcttaatcaaaga

SEQ ID NO: 182127 - DNA, 1234 bp, Homo Sapiens
  misc_feature (645)..(693): n is a, c, g, or t
ccgaaaccaagctttctcatcccaagcgccaacctttatcaagtctagcctagtcctctatcgtctcctaagtgtccctcatgagtgatcacttctgagtcctcctgcgtggagagctcagccactgggggcgtatctttcccattggaaaagtgtggttattggaagtttcctctttttagaaagaacaggattggaggtgctctctggggtatcctcctaccaagctgactgttgaagtccttgtggtgctcagggaggatgggtgacactcgctgttgcttcagcttcatcttgagcccacacagcatctccactacccaggtctcctcaggctcaggggcgagctccttctccggctcctcctcagattcatctgaccactccctcttccttttccagccaagggacctacatggggggctgggatctaccccaggggctgagtaaagaaaccaggccaccgtgtaatgcttctgcatctgatcaccttagaccccgacccaaaaccccaaaccactctctatcctccccagacttgcagactgctggcttctctaagccatctttctgattttctcctctgctcaaccccatgtgccgctccttcccctccccattcttctctctctctgtcctccgaannnnnnnnnnnnnnnnnnnnnnnnnnnnnnnnnnnnnnnnnnnnnnnnngaaagaaagaaaggaaattccccagggaagtacctcggctgatttcataaacaggtaccgaaggaagcagaggcatgtggaggacttccccacctcatgcagctatttgggccgtggcgtctgaaatttattatttcagagtcacccctttgatgaccttggcagtgaactgcagtcatctgtttaggcctttccatggcccacgtcaatgccgttatttctgtttgttgcacatttgatttccttgttgttggcatttagaaggccccctgcttcccagatcacaccacgggcatggaccacagagattgcatcttgtgagtctgtagaaatggtcaaggccttgtcctctcttaggtccagagctcaagtgaatgcagattttcccggccatctgtgctgaagtccctgtggggaggctccctggctggtttcctgtaatagacagctacacgtcctgcccttcattggcttctttttcatgaagctcctgccatctacaaaacatgtctcccttcttgaatcacatctcctgttattg

SEQ ID NO: 182128 - DNA, 1130 bp, Homo Sapiens
  misc_feature (574)..(582): n is a, c, g, or t
  misc_feature (1065)..(1073): n is a, c, g, or t
ttaaaagagaaacgacagcaaccggaatgagaaccaaatatattttgcatttttctctcgggggtatcatcttgagtcaccttacttaggctacacacggaatgaaaaatataaaaagccacgccccactaaatttcgcagcacctcatatagtagcaaaacagagggtacttacgaaaacgtttgctaaggagtgaatgatgaaaagcaaaaagtagttcttgtacacatggtctcaatatcacagacaataaattctgacctttgaattcacataaaagatgcaatggaaaaacattttaacatggatactgtactagaggattaacagctgaattcagtctatttcttaaaaacaaaagaaagacgggaatgcaggcagccagttcggagaaacagccaggacttttttgtatgacatggaaaaaccggcaagtcaacgtgtgaaacgtgcacactcatttctcatcttcttaaaccctaaaaagccccgcaatcttgttagcactaagcctggatgaaattgtgttaagatatctgattagtctcccttagttggcattttccaaagggnnnnnnnnngggaacctgttttatttcagtcagacatggctttgggtatcagtgaaacgaagctctgacagcagctccacctgcagaaggccaggcgcactcctgcagctcatcagaatgcaagcaggaaagcaggccagcaagcgagcatctgtcctgcacccacatccattagccaagtgattacatctccatcagccctggggtgtaataaagcaattgtaatcgggcattgttacaggatcaatgtttcctggtttaaaaataaacatcagcatttatctagcagcagaaagcgattctcccacagtactgttttattcaactgacatcttttaatcaaagcaatccatatcgtggcaacattccaaggtatcataactgcaaatatttatggcaagttagataatagctacatttttgttgctacacttttcttccttttttacggatttaacgcagacattttataataaactaattccattaagnnnnnnnnntttcaagtaattatattcaccaacttttttgtacaaagttggccattaaaaaaaagc

SEQ ID NO: 182129 - DNA, 1252 bp, Homo Sapiens
  misc_feature (710)..(731): n is a, c, g, or t
ttggctaaaaacagtattttactcagatcagtagttatcgtgtctatcagctataaaaaaaatcaactgccagccaagaactttaaaactttaagctgtgtattatagaaccgttttgtgtagcattggaatattgtccattttgtaagtcattgtgaatgttcttaattatcagcttgaaggtatttttgtattaaaagttgacattgaagaacctaagtggatgatgggatttggggccagtagtgaaagtatgtttcctctaaaatatttccctaaacagtggtatacatggttattttattatgagatttgtatatgttctgtgtttctctgtgaacaatgtttcagtctctctgtcaccatatgtaaggggaagtccacaaatatagactacattgcacaaaactaaaattgttaattacaagaaaatataggtgcttaccttttgaaggtttattaatacatatggttgtcacaatacgtatatatgataaatggtgtacatatacagatgtttatggtgtataaatttttctatacccaattagaattatcttcctgattctttattcaataacatgctaattcctcttctatgttctatagtgacagaatgctaacttttcttataccctggcagaggacagaggagtctggtctaggatggggaactgaatttttgaacgaaaaggaaagagaaaggatgnnnnnnnnnnnnnnnnnnnnnncacacgataatgtttcttagtcattttgattggccatttgaacagtctacaagtttaacgttatttccagtgaagtaggatggctgacctagcaatacatgtttcttcaaaagggtaaacatgctttagtgacctaaagctaaattttgtacatttgacatcagggatgttataagtactgcacttaatacaaagctatttctcaattgtgttatttttgagacaaatttttcttcaccattaacttcttgttggtagctttttgttttgtaaaaattgagagatggcaatgcttatctcaaccagattatctttctgcagaattaaggtatgcatctggtaaataaaagacaaatgctccagtttgtctttctcaacctttgagttcttaagctttgagttaaaacctagtctaaatagtgggaatgtcttggtttacagtaaggttttcttgggaaggatcttggttttgtgatctatttgtgaattaaggagtagatgttaaccattattttatagat

SEQ ID NO: 182130 - DNA, 1721 bp, Homo Sapiens
  misc_feature (666)..(677): n is a, c, g, or t
ttggctcaggggctgtttgcttgggtctctctttgtttttctgcttcagccaccagcaaccctggaatgaatcacaactccccacactacctacccaaggtacaaaatgtggccgtgagccctgggcattgagagctatagtacattttctggcattggtctcaagcccttcatcgggctctggggcctctccagctggcagtaactgttgtcttaaaggagatgaggctgagggcatttggaagaggggcagctgttgaaggcattcttgtatcaagggaggtaggagggccctctgatgccaaaggcagccttctcaggctattgctttcttccaggaagccccacccaccccactgcctgctgcctggacaatactcagatcacagccttaccagtctttacaggagagaggcagggaattgggttcagatgaggatgtagaaaggtgggatccagcgatgccccaggcctgagcccccaggagaggaggctgcaggaagagggggcaggcaaagtctgtgtgcaggaggctcccttgccattcccaggagggcaagccacagcctgggtggctagggagtttgagagcaggaagatctgaggatgtacatccctgcaatttgctttaaaattgaccagctggaagtgggagattcaggagannnnnnnnnnnngccagggcccaggctggagatgacaaggacctgcattaagctgtaaggaaacaaagtaccccagggtgcagggggaagtgggagagggacagaggagcatagggaacattggcaaggagagcatatttgaggaggaagttggagtgctgtttgtgatgctgggcagagaggcttataacaggagcctgtgcgttcccccaaacttcatccctaactacttgttccagctcttctgtgactcctgaactatgactctagccttggcaccccaagcaaggctcataaatgtttcctagcatctcagaatcccaggggttttcagcagaaatcctgaagtagtccagctgttgctcatctcatttttggggggtacctcccactgtttgttttttttgaatgttctggttttgcttttgtctttacctggtctggccctgtcatccccagccccgagaaaaggtctccagaaccgctgagaggtcagggctggcccaggaccctcacagctcccagtgagatctgagcctggtacctgtgtcagcagcccatgtggggccccagccaagctgctcactctggtgctgtctccctgttgtgtctcccaccaccttccctgctgcgcctgcccctccccgccccgccccggagtcatgccctctagccccccgctggcggctgcctcctccatgtccctcccggccgctgcccccaccaccagcgtgttctccttctcgcctgtcaacatgatctccgccgtcaaacagaggagcgccttcgcccccgtgctgcgccccccaagctccccaccccaggcctgccccagagcccacggagaggggcttccagaccagtcttttgaggattctgacaagtttcactctccagcccgggggcttcagggcctggcatactcctaattacagtctgcagctgttcccatggagcccggactggaggtccctctgggattcacagccacaccccggatggtggcacagacagatgcaggccagggtcatgggcggacctcacccgtgagctgaa

SEQ ID NO: 182131 - DNA, 1702 bp, Homo Sapiens
tctacaaaaaagttggcttcaccttgccagatttgaattgtcagtagtagaaaacacattgcattcatgacccctaatggttattttaaaacttttgtcactcctagggccaaatctgcagattacctgggacatgttgttattgaaatattgatagcttagtaaggccaatgatagctaggggaagattggggaggaggggtgaagaaatatgtaggggagtcaggtattatcttcaatgtagattcatcaattgtgaattatagggtgataattgcaataagcaccttataatttgctcatcagtttgggtttggggatgatatttatggtatgtaataaacaaaatcatctacacagtccagaacaagaggatctgcagttgaatttgtgggaaataatatgaaatacagtcagatggtcctaatggaggaagatgcagaattttctctagcatctagcttgtaggtcttgtgttttaattccatttgtatgggtgtaatattatgatgctcctgtagagagttggttttagaagatggaatattaaaatatttaggcagcaaccattaatcatcacagttacaggccttatacttggccatttttaaggcaaagttgcttggcctgaacaccctccagaggcaggaatcactgaaatttccagaccacacttactagtggttgactcttagcctggaagtttcacattttacccttcagggaattgctaatatcatagtcctcattttggaaagcaatcaaataaccttagctcaagacagggatttcaggggagaagggaggaaactggaaaccccactaaaattccaatatttgtttggcagtttttggttttgtgactccttgtaagcaccatgcctgaagtcttttgttgttatgataataatgattaaaagtaagtcatcctccttaaaaataatgtagctatggggtatttcaacatatctgtttttcatgtatgggatctgtccttgaaccccaaaaggctgtgtttaaagggtaataatgctttacttgaaaggggctttcacataagctgagtaataccttagataccccagttttctgtagctgctgtgtcatctttgtgcagtgaaaagtcctgaagtaggaggatgatgacaggaacctctgaaggggagaaacctgaaacttgactagcaggaaaagtgacaaggagaattattatttcattgcagatagaaatactctttccatatacattttacatatagtgtttaatatatgtggacatatatacacatgggcttgtttttatatatttgttggaatacagttgtagcaagatgatggtcacttttaaattttatttaaagcaagtgtgacagatgctttaaaaagaaagaggaatctggcttaaatgtccagccaaatgtccaaattcaattataaggtggctcttgacaaaaagattagggtgtaggagaccccgtagctattcaggggatgtctagctaggagttggctcagggagaggcaggaaaaagagacaggagcaaagttggtcccaccaattttaattatagcttgagaatcatttttcctttagcatctctcacctttgcttttggctccaacagctggccttctctggaaatactaacaaagctgacaaggaatgtctcgccctgggatatttagggcctggtgctgatat

SEQ ID NO: 182132 - DNA, 1677 bp, Homo Sapiens
  misc_feature (485)..(511): n is a, c, g, or t
ttggcatctcccccaaatctatgagctggcacctaatgccaaagtggtgggaagatctttaattcattttcttctgataaattctgggaagagggtcaggaagctgggaaaggagacactgatatttaacttcatgcctttgagagaaaggcatactttgtgtttcttacctctgtatccctgtacatgctgtctctctacccagaataccatgaggttccttttccctttaatctttttcttgtgacagtctcctttgtccttcaggagaggtcagctctatctcaagcaaccttctgccttctcacctccccttgtctcctcaccttccccattatggcctggatgcctcttgcttgtgtttccacagtccactttaattacctctatctctgcccttgctgtatagaatggtaatttctcatccatttatctgcatatttcctccatctgacaaaaaaatgccctcacgtgcttgctcattnnnnnnnnnnnnnnnnnnnnnnnnnnngaattatttcaaagcctgatccgatccatattgggtgtctgataaagtggtggtatgtagaacctgtatgtgtatacatatgtctgtgtcaatgatgtgggttctttctgaaacacctgaggtaggtaagaggtagccttacttgtttttccagatcttgctagaatagtagatttttagggtttgctttggattatggaacaatgtatgttgccttgaccattagggaggcttctgggtaatttccatagagattctggttggctctttactgttgtctgaaaaaactagaccaaacattcggggctgggggtaggattcttattctctccaaagcactgatatgaatatgtgtgtggggggctagataggttcatgctcgctcacctcagcattgaggggtgtgaaggttatatgtttgtggtggtaggggtgctaaaaacccttgtattattgcaggataggttaaatagtttttactagtctcagtaaattgttagctgagcttgtggtttggagggaaagatgtggctttatcaactcgaaaaaacaaagccagcttttagagaagttacctcaagctacatagggaccaaaactaataagctggatgccatgtggtctcttatcttatccttgccaccaagagactcttccaaaacaatcatagatccatacagcccaagagcattctttgggctctctgaacctctgcttccaggaaggcggtcatacaaaaatgaaggctgtgagctaatggctgtaaacaaatacacttgcagcaggttatgaggccacctttcaaccttcagcacatccactggaggtaggtatttttgagactactctcaaaaaattttttcttaaggcctacgtgataaaccttgttccctaatggggatgagaattggattaggctgtaagattagcctacgggaacagcacgctgggtggggggttggggacatcctgcttaggggtagccagccaaagtcccccatacaagcccaaccaaggatcatgccacattgaaggtctgcacagtagtgaggcagtgctgtggaatgacatctgccttccaacttcttacgtgagtaagaaggctctccctgaatattcagatggatgttcagccacattctttgctatattttatagggtgggga

SEQ ID NO: 182133 - DNA, 756 bp, Homo Sapiens
cactttgtaccaaaaagttggatgatggttgtctttggatatactacagcgatggctattgaggagtatcctgaggcatgggggtcaggggttgaggtcttggtgagtgttttagtggggttagcgatggaggtaggattggtgctgtgggtgaaagagtatgatggggtggtggttgtggtaaactttaatagtgtaggaagctgaataatttatgaaggagaggggtcagggttgattcgggaggatcctattggtgcgggggctttgtatgattatgggcgttgattagtagtagttactggttgaacattgtttgttggtgtatatattgtaattgagattgctcgggggaataggttatgtgattaggagtagggttaggatgagtgggaagaagaaagagaggaagtaaagtttaattatgcctttttgggttgaggtgatgatggaggtggagatttggtgctgtgaaattgttttaggtaatagcttttctagtcaggttaggtctaggaggagtaggggcaggttttggctcgtaagaaggcctagataggggattgtgcggtgtgtgatgctagggtagaatccgagtatgttggagaaataaaatgtgtatattgggggttttattttaagtttgttggttaggtagttgaggtctagggctgttagaagtcctaggaaagtgacagcgagggctgtgagttttaggtagagggggattgttgtttggaagggggatgcggggga

SEQ ID NO: 182134 - DNA, 288 bp, Homo Sapiens
actttgtacaaaaaagttggatttctgttaccatttcttgaaaacaattacattttcatttttttgctgttgtaaagtcctaaatgatgtgatgcaaattgctaattgcctacctcatcattcattgtcttctttatttagaacaagatcccaattttatttgcagtggccagctataggtgatatttcttagttgccctagcaactctatgtgcccacaaggttgatttctttccagtgacacgtaatgaaaggattgtgtgggacagttctataaaacagtgtgga

SEQ ID NO: 182135 - DNA, 1693 bp, Homo Sapiens
  misc_feature (458)..(466): n is a, c, g, or t
aaaaagttggctcaataatcgacctaaaacacctttttgaaagggtttgcacttggaagagagtttatgttctgttgaaaccaactttgatagggtcctcacctttccgttaaggaggtgccgcactacaagtttcaaattatatggaaaaacctaaaattaaccctctgttggtgatctcataaaatggttttgaccttttggtatcttaatttctatctaaactttatcagaaaattttctttgaatatatcaattagttggctgtgggaattttccctttccacattaataaatgcctttctgtgtttctgaatcagaagcaaatgattagggaaaaatatatgtccaaacaagacaagattagtttaaacagttaagaacatttagtccacattgtcttgtcagccagcaattgtcatggaagctatcatttttaagagtgccactgtgtggannnnnnnnncaagtggttattacattaaaattacctcatactgaggtttttgcactgaaatatcacagtttcagatttcatggttaatgttgtgcgtatgtttgtatgtttttaaaggaaacttgcattttcaatagttgatcctaaatttcataaactgcacttctttactctggtaaagctgatgtttttgtgcttattgtgaattgccgtagtacctttgaatgtcaaactttatttagaaatataaaacttatcctttatgatataaatggttgagtgtatgtacccagtatttctaattaaatttcacatgctaaattaatgaaagtaacaagattgtaattttttaaagtcagttgattaaatgcaataaatattggttgctcaaatatgccacaaataactcgaaatttttcatttactttcaacagcataagattctttaatatttaggattgactgttctttccagttaagcactgaaggattatgtcttgtagcttccccaagagaaggggaaggaaaaaaaagcactatgttaaggataatacagaactcttttgaactattttggtagtaccttttaccatactgtttgctttttgatttgggtaaatatcttaagagcaaagaaaacaatacaccaaatgaaaatgctttgaaagtaaatgaaaacagcgcttttgaaaggctggtatagtatgaccctggagtcagcctttgtgttacagcgaaaatgttggtgctataaattctgattgtttacagatgttgattctgcttatgctccaaagtgtgcatgatgtattttacgtagtactctgaggaagtctctttataaaacctactaccacttagtataaatttgtttgaatttatatcttttgttactgtaaattcagcttattccaattaggttggcacagatttaaactgatacacattccacaaaaaccaattcagtgtataagtattgaagtataagcagtcattgcagcttgatgccagatcatgtatgtaataacaagtggaagttaatagggccttctaatactgtatgggtactcctaagaattatttcattttggatataaagaagttatgaggcctcctgtcacattcacagctggttctccaaataatttggttgtttcaaaacaaatggtaatcatttggttggattctcagtatcatgactagatcatgtggttttacatagttgccaagtggtgg

SEQ ID NO: 182136 - DNA, 1478 bp, Homo Sapiens
  misc_feature (512)..(540): n is a, c, g, or t
  misc_feature (873)..(883): n is a, c, g, or t
ttgggtaagaaattatacagaggagcccataaaactctcgtgatcctcctagtattggacaaccaccaagcctcattatatattactcatctacattactagtgattgataaattctaccctacatttattaaccagatgatctgagattttaagatagctttctttttcccaatttgtattttgaaaaattcaaaactacagaaaaattaaaaggatagtacagtgaatatgcgtatacccatttcctaggtttaacagttgtcaacattttgccccacttgtcttaaatatctacctatccacacttttttcccctctgattagtttgaaagcaattcacaaataagaactgtttcaccctaaatacttcagtgttttttggaagaaccaggacatctgctgtgtaaccacaataccattattactctcaagaaatttaacattaagcaataatattatctactatagtatatagtcacatttccccattagttccaatgacatagattnnnnnnnnnnnnnnnnnnnnnnnnnnnnnatttttggagccttttttaaacctgaatatcagctggagagaaaagagagcaaaataaaacatacatctttgaatttgtaaagtagaaacatgtatttccctatctcatttgaaacttgtaagtgtaatcaagttagaaaagatagtatccagaaacaaggctagttaatacttgtttctacaagtacatgtgggcatatttaggcaaatttgttcttcctttagctaggcatactttattttcatgactaaatttatatcacagctcctgaacatagatgaaaccttttcttggtttatgagacagtttaaaggacttgtatttttcccagnnnnnnnnnnngtatgtatttagaaactaaaaggtattttgtcttttctttctgagctatttgccttatttttgtctcgtaaaaagcaacttgactctaattatagaaacctaataaagataagtacagggatagactttatattatcacagacctgttctgtgttagtctaagtctgaatttggatttggcttcctatgtggttctttctgctagtaggaaagaagatttggtagtgacacaattgtttaagctccacaaagaaactaggccttttggaatgtataaaagcttttagtttctaagtgattgaaagatgatcatattttactttagaagaaagggggaattgcttttggtggacatgtgttttcagtagagtagaaaaattgcacatttatgtttctcagactcctaactgagatggccttctaacacatctctactagttacggattttcttcagtagcacattatgaagtgctgatttattaagcccataacaaagtgctgggattaaaggcgtgagtcaccacccctggccttatagtttatcttctagtggtcttctatcctcatttgaaaatgtgaaaagtgggtacctga

SEQ ID NO: 182137 - DNA, 744 bp, Homo Sapiens
ttggatgtatttaggaagttttacttgactatatttatatttgtgctcgtttgcttaatgtttccacactgtgctccataaagtcagagactgtatccattgtgcttactggaattgctcagggccaggaacccagtaggttttcaataaaatatttgtttattaatgagaacacatcatgaaccagaaaggattgccaagaactttgtattttatttagacactgcccgtcaatgtagtttactgctcgttagtgtagtttaactagagtttaggctatatagacaggtatggttgagagataaggctagacaggtaaaggtacagtgggaccagattgtgatggcccttgaataaaatagtgaggaactgtatgaaacattatttggaaaagatgagaagtgaaaagagggacatttattttaaacatccagaacatagaagacgtagctttcaaaatactaactttgggataggttagggaataaactaaacttgaccaatttaacaaaaggcaacaaaggagaataaaatgatggaatagaaataataaatcaagatagtagaagtaagtacaaaatatatcagaaattatattaaagttatctattgtgatcacaagacaagaacctgtgttatttataatagatgcataaagcaaaattaaatgaatggaaacagctaatatataacagataaaccaaaattaagttttaaaaattttggccgggcacggtggctcat

SEQ ID NO: 182138 - DNA, 870 bp, Homo Sapiens
ttggggcatttgtttagggaaaaaatatgtaggtcactagagaaaaatgttaatttttttcccactgtgaattgccttctgtttgccttatcttttcagatagtctttaaagttgggcaatattcaggcagctatttagaacagtttctcagagtggatttgggtctctcatttgagaaagatttgtagtttcaatgaagtttgtatattataggaatttaagtaaaatcatctgagttaagttttgggcaaatgttaatcagaaagataatctacatccctactttatgtagtcattttggagaaatggaggaaaaggaaaataacaggactttttatagctgtgataaaatgggtaaagaaaaacctccatttaaataaggaaggggagacaaaatggaaggtcctggccttaagtcaaattccagatagtgctttcaatatccaaagcttaggccttgtttacttatagtaatgctatatttttctttatctgccctgtgatttcgcttcgtgtccttcaaagtttttttattgtaattttaaaggaaaaaaacaatgtatttttatttgataactaggcaaaatcatttgccattttttatttcataaatatttatttttctatctcatacaatgatcagttttactttaaaaattctgcatttctcttgcctctcatgtacttcatccagttatttattattgtaaaatgttaactggagatactgcattcaaaaaaaagtcggaccacttaacacttaccaggaatgttagtgtttcagctgttttagtaagtgaccaagtaagctatcaccttgtgatagctaattcaacatctttattgaaaatttgttactttttttaaag

SEQ ID NO: 182139 - DNA, 1601 bp, Homo Sapiens
  misc_feature (517)..(560): n is a, c, g, or t
  misc_feature (733)..(741): n is a, c, g, or t
gtgatcttgttttccccggcagagggcctggggaggcagggagggtggtgggaagggatttcttacattgttctcattgatgggtctgaagggaggagagaaatggggaaacacagcctgcacacactgatgtgctctcacacacacgcacaaacaaaacacagacacaggagagtttcaaacagcttaacactgattggaaaacaagcttgggacatccctctacagtaactccactgctggcaagagcccaggcgtgggatatgaacagaggtcctccaacattttggacatttgaggacagaggtgccaagagggacagatctgcccgaggcccccaccctgcccctctgggtgaaccacttctcacctgggctatcgctgagactccaccaattggttggcctacaggcctcacctcccgactcccctcactgctgggcgacattgaatttgaagttccattgcccagcacctccaaccccgactcccaagttccctaaagaaatgagcaaannnnnnnnnnnnnnnnnnnnnnnnnnnnnnnnnnnnnnnnnnnngtcctgtgttaccactggccaaggaaacgcgagtctcaggattccagggcctggacctggggtaaagggctgctctgggactctgccccccaacctcttggaggaccccgagtgtgggggcaggattgggtgtctgccttgactcacaggatctccccaggtcctaaagctgnnnnnnnnngtgggagaagatccaggaggcaggggtggtggacaaaagtaggagtgagactaaaaagtgggagtgagactagatttgatcacactcaccacccttctgtgccccctggacagcatgctcccctggagcccctgcacaggctcatcagaacaaggcagaatctcctactcactaacctcctgagagccgtttatagggggatcacacttgtccaggagggctgcccctcctgctttcacacaaccactggccccaccatccctctcctggccagtctcagaagacccagggatcctcaaaaaccaggggagaaggaatcctggccattggtgtccacagctttcagagctactggaggagacgctcagatgacatgggtcaaaggcctttcccaaacttaggatgtgatgtatctgtcccttaagcgcctggctaaataagagagccagaacaccgtgatagcaggctgatcaaaccgctcacttcctccctgttttccttcgcaggtcccctctccattgttttctcgcccaatccttccctcttgctccctttgggaaaaagccacgtggagctcactgggcccctcccccagctgaagggacatgaccctcctctgccctcttccctccagacacccagctggacagctggtggcagcacgggactgaacctgctggggtctgcgtcgctgcgatgtccatgactccctggctctttgttgcccatcttctcccagaccctttcccatcccagcccatgttcaaggccagacagcgctctcctggctgacacacagattcaacaataaacaacagtaaaatagattcagggagggagccaacttttttgtacaaagt

SEQ ID NO: 182140 - DNA, 962 bp, Homo Sapiens
  misc_feature (623)..(696): n is a, c, g, or t
ttggtaagaattaataataatccttaatcgcaataataatcgcaaggaggagaagtaagtccctcctccttctgtatgaacttttctcccacatgctgctgtatggtttagtgagagtgaagttctaaagaacatcaatatgattggtgggataatccaaagacattttttcagaatcaaatggcatgtcgaaggtttgtttcttgcatatgtatttactggtccacagcacaaaataaagtgaccacatatacataggaaagttgaatttgtacacatacagcatctgaaatgtatctgatgttcagcatcaagatttcactgaacattgtagaaatgtgtatcttttgcatgtatattttacattgattttctatttatgtacatctagaaagttttaaccctaataaatagttttgtaattttgaataatagtgtcagtttatatgtgagggagtagagacagagaggttagcactggataataattagtaaggccaaaggagaaaatttcatagaaaatattgttgttgtcataatgagtacagcatgaaaggcttcctctacaagacactagtcaaagagttgagagctgcggtttctaatctttgtccattactccnnnnnnnnnnnnnnnnnnnnnnnnnnnnnnnnnnnnnnnnnnnnnnnnnnnnnnnnnnnnnnnnnnnnnnnnnnacttgaaccaaatgacctctagtgttccccttgggtttaaatgtctataaatgttcaatgactagaatgtattgcgtttttctttattctttttgctttgagaaaagagaatgtgatttaagagtaataatttgaataccaattatccacattaaaattgtgtcctctatgtgtaagcatagcacatttagcacacatacataagcacactaagcaccttacaaatatcctcatttattctttacataatcttttgaaattgatta

SEQ ID NO: 182141 - DNA, 1287 bp, Homo Sapiens
ttggcgtctgcaggtcctgaaatttgatgctgtcatagtctttgcagtgggtcggttggaatgattctgggggcagaagctcagagccccttagtaggaatggaggcggcccttctgctgccactgctcagccccctccactgcatgacgaagggtggaggaaattcccagcaacatatggcccaggccttgcagcagtgtggaggtccaacgaaggagctccctgaatggcagagacaagaggaaatcagatgatttggaaaacttgggaggaagccatcaagctgggagatgaggactttccacaagcaagagctaactaggggtaggtgggtgcaagaggacgaattatggggactatccaactgtaggggatggggcagtatgacatgttgatttctgacctgagtactttctttgggccaagtccttgaaagtcacaactcatagagtagagcccgtagaatgtggctttgacattcaggctgccaaagaggtctcgagggttttgcttgtacacgtcaaaggtgaatcgggcgatgtccttgctgtgcttgggcctctcccgtcccaggccatatgacagcactccactctgtaggacacccttgtcagtgcagtagatcctcataccagacacccaccactaatctccatcagcactgggtcagaccctccctcgcttggactttctgtccactgtgtgacatccttgacaattccacaactcctcctgcacctggtccccaggatcagggttaagctagagaggaagcccgggaaagctctaaaggacaggcattggaagcagccccagtataggcctcttacccttgtagggctccagctctgaccagactgcaacaccatcaggcacgtgtcatcctccagcagctggaagaagtcctcactgtccactgcagttccatcctcctctagcaccagggttagcactccattcagcagtagggtctccaatgcctgcccaatggcaagaagcaagaagggcaggtcttatcccatgccccttccctctttagctgcccaacatccatcagttggctctagacattggtcgatgtcccactttgactttctggcactttgatacctcctaaaggttgcagctctccgtgttcttcagtttttgggggatcctagctagaggctgacctttttcctctttgctcctaccatgtcattggcatctccccttgctcccctccaagtcacttctgggtttggaattggaaagcaagccaggttctcacgaagtccacccttctg

SEQ ID NO: 182142 - DNA, 1532 bp, Homo Sapiens
  misc_feature (213)..(225): n is a, c, g, or t
ttggctctctacagtgttttcctgtgaaacttgagtgcttaaactctcttgtgctgtattactgccttggtgaaaactccctgataattcttttagttttaatatctctttaaattgattgtacccagaaagaactggagttagttgaggcactttaaaaatattcaagaaactcacaaattaaccgtgtcagtgcccaagttttgttcaggnnnnnnnnnnnnntccctttaaggaggaagtacttgaacaagaattttcatgagagttctaggatcaagccatttagaaaactgatattctcagaagcttgggagaaatatatctaaattttgatgtaaaattcccttaaaatggcacctaagagctcttggtggcttttgaataataccagtggtgagtgaaactagagagcaataaagtgaaggttcaccgcttatccaggaatccttagagaagcaacgaggtcactcaaccagatactgagagttagaaaattttctataggaataaagccattcactgttagcttatatcaggaaaaagcctatttggctaagcagcaagtttgattttactttggatccagtcttgacttttaaaatatgttaatgcaaaagttcttgagtgtcaaagaaaattgtctaagatttactgagcctgctatgttctccattaggtgtaggaggaaacagaagtgtggttggttcattttatagggtaaagcacacaggtgggagagttaaaaagtttcctaatgcagtgttaattcagatgattaacttacgatgaaagcttgtagaaaatattgtctgatccaaagaatagtgatgctaaaaatactagctttgatattgaagagtaattgttctctctggtttatttatcttcctcattttttagcaggttcaggcaacacctcctcagcccatcaaagtaccacagtttatcccccctcctagactcactccacgtccaaactttcttccacaggttcgacccaagcctgtggcccagaataacattcctattgccccagcaccacctcccatgctcgcagctcctcagcttatccagaggcccgtcatgctgaccaagttcacccccacaacccttcccacatcccagaattccatccaccccgtccgtgtcgtcaatgggcagactgcaaccatagccaaaacgttccccatggcccagctcaccagcattgtgatagctactccagggaccagactcgctggacctcaaactgtacagcttagcaagccaagtcttgaaaaacagacagttaaatctcacacagaaacagatgagaaacaaacagagagccgcaccatcaccccacctgctgcacccaaaccaaaacgggaggagaaccctcagaaacttgccttcatggtgtctctagggttggtaacacatgaccatctagaagaaatccaaagcaagaggcaagagcgaaaaagaagaacaacagcaaatccggtctacagtggagcagtctttgagccagagcgtagaagagtgca

SEQ ID NO: 182143 - DNA, 2764 bp, Homo Sapiens
  misc_feature (999)..(1012): n is a, c, g, or t
  misc_feature (1503)..(1513): n is a, c, g, or t
ttggcaccattcttgggactggtatacataaggcagccgtgaaactggaaagtcattttgatgactgatgtgatacatccagaggtaaaatgcatttaaacatattaaagtatttgccaaagatacaattttcttgctgacataaaaatcacacaaacaagtcccccccaaaccacaactgtctctcaaatagcttaaaaaaattgaaaaacattttaggatttttcaagttttctagattttaaaaagatgttcagctattagaggaatgttaaaaattttatattatctagaacacaggaacatcatcctgggttattcaggaatcagtcacacatgtgtgtgtgtctgagatatagtctaaattagcaaagcacatagtattacatacttgaggggttggtgaacaaaggaaaaatatactttctgcaaaaccaaggactgtgctgcgtaatgagacagctgtgatttcatttgaaactgtgaaaccatgtgccataatagaattttgagaattttgcttttacctaaattcaagaaaatgaaattacacttttaagttagtggtgcttaagcataatttttcctatattaaccagtattaaaatctcaagtaagattttccagtgccagaacatgttaggtggaattttaaaagtgcctcggcatcctgtattacatgtcatagaattgtaaagtcaacatcaattactagtaatcattctgcactcactgggtgcatagcatggttagaggggctagagatggacagtcatcaactggcggatatagcggtacatatgatccttagccaccagggcacaagcttaccagtagacaatacagacagagcttttgttgagctgtaactgagctatggaatagcttctttgatgtacctctttgccttaaattgctttttagttctaagattgtagaatgatcctttcaaattgtaatcttttctaacagagatattttaatatacttgctttcttnnnnnnnnnnnnnnctactgtcagtattaatactgagccagactggcatctacagatttcagatctatcattttattgattcttaagcttgtattaaaaactaggcaatatcatcatggatacataggagaagacacatttacaatcattcattgggccttttatctgtctatccatccatcatcatttgaaggcctaatatatgccaagtactcacatggtatgcattgagacataaaaaagactgtctataacctcaataagtattaaaaatcccattattacccataaggttcatcttatttcatttttagggaataaaattacatgtctatgaaatttcaattttaagcactattgtttttcatgaccataatttatttttaaaaataaattaaaggttaattatatgcatgtatgtatttctaataattaaaaatgtgttcaatccctgaaatgtctgccttttaaatataacacctactatttggttaattttgacgannnnnnnnnnncaattaggaagctaaaaatactactttattccttatatgaacattcatccccctcctggcacctctaaacacacccaaataactcacaagtactgatttaacactctgtattactgaacttctttgaactattttgaactttgaatctcttctctgaataactgccgaaactcaaagataataattagttgatgaaggttatcaattaataaaataacacagaccagtcttaccaaactctaaatacattttaaaaaataggaactggcaatgataaaaagaatgttgagtactgacaggagattggcttttacactaaaaaagacagaaaatggactaaataggaacataatttcagagtttatgagtcagtttacaatatgccatattagcgatctcatgatgattcagaccacagtctgggttaaagatgtcttgacctctgaggctagcataacatatatgagaatacaacttgcctatttccagaaaatctgtatatttttatagaataactttatttacaatttctatcatccaattactcactaggcattatttgtagtactttttttctctttgaaatctcataggatagtcacacttataaacattcccaatattcggattctagaagaaatgcaattcattaaaattttcctggcactgagagttaatctttagcagattgcatgaaaatactgaattcctggtaaggagatattttgttttaaaaataatgtgttttgatacgaatcagtgtattaactgataactaaaaagtactcttttttctatatatacatatttttttgaactcatattcacaatcaacatattcaatcagtgagttaagtctcattcctagctaccaaaattcctgggccacttttaaacactaaacatttcatttatcctctaagctaaaatggtgctgagttatttaaatctgaatgtaaaatgcattaaatcttagcttgtggtatataaacatttaattaatataaaactgcttgctataaactaagtaacatgtcatttggtgttaggtttttagtgaagttttagcttctcccaaatttttcaggaatgttatttgtaagacgtgtaacttttttgaagaactcttattttaaatgctcagacattggctttatgttcctctttgcattctcatattcttttattatacatctatactatgattgcaagattatataaaaatgccttgaataaatgatttcaagtgtc

SEQ ID NO: 182144 - DNA, 1372 bp, Homo Sapiens
  misc_feature (334)..(425): n is a, c, g, or t
tttagtcagatcgtgtcactgccctgctcagaaccccccagagatatcttggttcgtaaatacctacaaggcattataccatctcattttctattacctctcttcttcttccactctcatctccttccactcttccccttttttctctatttctacctcactggctttcttgttgttttcccctaacttgctaggccgcctcccgctgttgtctttttcccttaaacagacacacttcctatcagttttactcaaaagtctctttctcaggaggccttcgcccacatgtcattcctagctgcttttgtgtttgatgtatttaactgcttgttcnnnnnnnnnnnnnnnnnnnnnnnnnnnnnnnnnnnnnnnnnnnnnnnnnnnnnnnnnnnnnnnnnnnnnnnnnnnnnnnnnnnnnnnnnnnngcagcattttaaaaagtaactagtgaacatattggctcatgtattcatcaatcattcacatttctgcctttttgaattacctactcattattttttatatttgtcctttgtcctaattaatatataataactatattaaggatattaatcttatatttgttttatttttctaatgacaaatgttatttgacaagacatcaaatttgtcatttgctaatactttttcatattttgtttgccatttaaactgtattggaaagctgtgaaattttggagagagatacacgcacacacatttttttaaatggcttctcttgagagtgctctcacagctctgcacatcttgtaatcaaagatattgtccatgtagactgtcttttgaaggatgtttgtatagtagatatccttggaatatggtaaccgtgtctcccttaggagtatgggtaggcatgctcactgcctgctataagaaatttgggttccctaaactcaggtttgttcttctgtaatgcatttgactgcatatacagttgccatctggcctctgggttgctctgtgggaactggggctcagcaaactgatacaaatgctgacagtcttgctactcttattgctgtgagtaataagtcccctgtctctgacctaggaatcttgtaccttctgttagcatccatgaaattgcagtagactaactagtaagcttgcaaggaagataaaatctcagacttttacatttctacatatcttcttttaattttatgctctttaggacttttgctatcctgaaatgaaatacagttttatctgaattgtctgaaaatttttaaagtttttatttaattcatttgatgcttctttagtgttgggctgaggcaggtagttaacctgtttttttcctaatagttaaacagttgtcttattgtcatttatttagttgtccatgttt

SEQ ID NO: 182145 - DNA, 1524 bp, Homo Sapiens
ttgggacctcggctttaagctaaataaagtgtcttgggcttcctgctcattagaatagttatgtttcatgttcatttaaggagaaagtgcactaaggaagattttaaatgagttttaatttattaataccaacaggaatacatatatgaaaagtcacatatttaaaaaatcgtagaagacccatgtatgaaagaatactgtttcagagtgttgaacttagtgtgcgcacgaattcatagactgcttgcaatacctcttagtgccacaaggcgccgctagtgacctcgttgagtcttcccacagcctggaggcgggcttccgcagcagtagcaagaggaggtggtgcaggaggcggtgagagcccgcagcaaaaccaggcagctgtaggaaagccctggcaggccggcccaccgagaaccccttttccactcccatagctcttcccgcttctactcctagacagcggagtggaccgccacctgtgagccggtgaccacacctgcactttcacaaagcagctccctcaccccgacctgtgcagtttagggaggctgtgccgagaggggcagccgctctttacggtcctctgctcctcattacctggtgggggggagagtgtgtctgtgcttggttggcaggaagggataggtgaaaaatgtaagtggctagaaattggtgtaggtgactaaattgtgagacccctcggttcttctcaggcctgtgggtgtactcaggaggatgtcgacgaccagggttacatcctgggtgggaagagtccactagactctgaagtcagccaggcctgggctctggccccagctggatcctttagatctgtgatctcaggcaagtctgttactccccctgagacttaactgtaaaatgaagaaaaggcaaattcccacataagcaggttgtaaggattaaaaaagagaacatgtgttccttataaactatccatgtgtgatgcgcagaactccaactctcaatttctccccaagataatgagagtctggactcttagactgcagagcttggcagcaacggaaacacccatacaagcagctgatgtgtcccctgttcctgaagaggtcaccctctgacagatagatctcagaatgtcatgaatgttgcatgctgaaagaggagagccaggctaggagagatgcctggtttgtcaggtccaagggcattgcagaaacctgattacagagagaggaaatactcttggcaaggcagggaagcctgcatcagcagcttgttattttcattcatccattcatttgttcattcattgttcaaccaacattatttttgagtggttacagtgtatgtgtgaggcactgttccaggccatgagaatgcaacagagaacaaagtggacacagtgctgcctacaggatgtttacagtctggggaaaggagctgcacgtctccagaagtggttctagatttgactctctgttttctccttaacaatttctgatttgaagaacaacattagaaccaagttgttgcagtcac

SEQ ID NO: 182146 - DNA, 873 bp, Homo Sapiens
tgagccactgtgtccggccatcaaatgtatttcttaaataataagacttgaaagtgaagtgactccttgatccatggggtacagaatggatgttgtgttagcaggcatgaaaacaacattcatctccttgaacatctccatcagagctcatgggtgaccaggggcatcatgaatcagcataccattgaaaggaatctttttagtctgagcagtaggtctctacagtgggcttaaaatattcagtaagccacattgtaaacagatgtgctgtcatccagctttgctgttctgtttatagagcacaggcagaatagatttagcgtaattcttaagggccctaagaatttggggatgggaaatgaccactggcttcaacttaaagtcaccagctgcattacttcctatcgagagtggcctgtcgtttgaagccttgaaaccaggccttgccttttcctttgtagccatgaaagtcctagatggcatcttccaacataaagctgttttgtgcacattgaaaatctgtttagtgtatccaccttcattactgatctcagctagagcttctagagaacttgctgcagcttctccatcagcacttggtgcttcaccttttacttttatgttacggagacggcttctttccttaaacttcataaaccaacctctgctagcttccaagttttcttctgcatcttcctcacctttctcagccttcatagaattgaagagagttagggcctttctctggattaactttggcttaagggaaggttgtggctggtttgatctatccagactgctgaactttctccatgtcagcaacaagctgttttgctttattattgtttgtgtgttccctggagtagcactttt

SEQ ID NO: 182147 - DNA, 878 bp, Homo Sapiens
ttggctttcttttagtggcttgttatattagtaatttttctgcatatacatgtcagtggacacacttgagaagaaacattgtcatctagctcctgtgttggtgaactgggcttttctttttcttttgataactatcattatttaattacttttctacatatatatgcatgtatcaactgaactagaagcaaattcatatatgtcattaaacatgtatgtatttatgcacttgataagttagcctatgagtagaaagaaaactaacattagtgctttactcaaccagagcatcttttgtgcagcaatcccacctttttaaaacagctcagaacctctaaaaaagcctatttgggcccagattgttaaaattattgtgtaattctcctcacccacctcattacttcttcggtccctcatccacaaacagttcaatctttttttaaaacaaatcagttcaaactgatgcctggtttcccaaaacacagtcaacactaatagcaggtaaaagagggtagttattgcttcaaaaagtcagagctctagtaagaagtgacagcatcctaaatgaaagcaaggacgggccataaaaactataagtcattaacagaggaactccgaaagtgcagctgcccaagaccacttaatttggacccaaatacccagatatccctatatatttcagtagccttagggtaaaataattgggatcagtttacattcggaaacagatattttgttttaaaatagaatttttagaaactttggtattttagaaataacttttacttaccttgaaaagtctcaggaactgctgcttcttaataaggtagggtaaatgaagtattactacagagagtggttgaataaaagaaataata

SEQ ID NO: 182148 - DNA, 644 bp, Homo Sapiens
ttggcaaaaataatgatatatcttggccaactaatggcacttagaaaatttcagcatttattaagtcaaaagttttttgtggataagttaaattgattctttttgaagtgttaatatttagctgagccgaaaattataacatactgatatatttcttccttgacaaaataaattgtgctaatgttccagaaatcatccatatgctattgctctggctctcctgtggctttgagatgaattctcacccagtattttagcaaactgtcttttcagtactgcattaaattaatcacatgagaaatcttgtaataactatggtagtcatatccccttcatgtgtaggaagtgtgattccactttattatcacaattcgtctaaccctgaggtgtagttttctttattttttaaaataacttctttctactggagataccaactacagttaaaattgagacaggagtgtgttttagtggaagtaaagataagattgactgtgagtgtgtgtgtgtctgtgggggagggcatctcttttgtagagtcgatacattgcatgagaatacataatatttttatatatttagaatgataaatcattctaaattttcttggtcataacctcttgacaaatttaaaagtggatcca

SEQ ID NO: 182149 - DNA, 948 bp, Homo Sapiens
  misc_feature (145)..(473): n is a, c, g, or t
caatgcttttctataaaggcaactttgtacaaaaaagttgggtaaaagtgatatcaagagttaatcttagaaacttgctcagtaaaaacattttctagtataacatgttctttaaaaagcaaatgctgccgtctttggaatcttnnnnnnnnnnnnnnnnnnnnnnnnnnnnnnnnnnnnnnnnnnnnnnnnnnnnnnnnnnnnnnnnnnnnnnnnnnnnnnnnnnnnnnnnnnnnnnnnnnnnnnnnnnnnnnnnnnnnnnnnnnnnnnnnnnnnnnnnnnnnnnnnnnnnnnnnnnnnnnnnnnnnnnnnnnnnnnnnnnnnnnnnnnnnnnnnnnnnnnnnnnnnnnnnnnnnnnnnnnnnnnnnnnnnnnnnnnnnnnnnnnnnnnnnnnnnnnnnnnnnnnnnnnnnnnnnnnnnnnnnnnnnnnnnnnnnnnnnnnnnnnnnnnnnnnnnnnnnnnnnnnnnnnnnngttgcattaaacttagttcttgtctctcctttccactcttattcttaaatctgaagctcatcgactaagtgaaatatttaaagaatatgataggccagcaagaagaagtattatgtagtaccatagttagtaattcgtaaaaccttggaagccattatttggtcccacttgcaatttagtgtttttgaagtgtgtagcttcattcagatagctctttaaataattaaaatataaaagcaaacaacccaaactacctgactataaacaggaaaagttaaccctcaaagagagttcttgtgaattctctttatgctggcaaatagctctaggattaaaggcacattaaggtttccttcagtttgtttattctaagcttttactgtgctttttactgaacaagtttctgatgtataaaacttgcatctgatttctttggaaatattttcacaaaagttattttaatcagtatttttac

SEQ ID NO: 182150 - DNA, 881 bp, Homo Sapiens
ttggatttttaaattgcacagaaatttgaagaggctcttctctaagaaagaaggctacaagagaaattccatttaatttagaaacagcatctaagatagatttcagtagcaatgaaactgaaagcatataattagaaaatattaaatggcaggtgaactggataagcattaacagtaaaaacagaaaaagaaaccaagaatgcagtatagtgaaaggcgtaggaacttttattggaatataacttgttaaatatatcagtattttcactttttatttacctgaggtaatactgtaaacatgagatttaaaaatttcttaagcatataaactttgttctggagtcctgtttaattaccaaaaatctaaatctccactgcatagatttacatgtttatttcttaatttttaaaattctttatttttgctatacttctgattccttcttatatggtgtaatttggttgattctttaagcttttatgttccaaatactttataatcttacctaattgctcctagttgctgatttgtataacaaataataacaatagtccacatttatttagtgctttgtactaggccttgttctaactactttatgtgttaacttatttggtcctcctagcaacctggtaaggtaaattctgttatcatccacatgtgcagataaggaaatcacaatacagtaacttttccaagctcacacaactgacaaattatgatttgatcatactcgatttgaattggatttaactgggattcaaattcagtcagtctttatcatctgtgagcttaatcctatcccttccaacctcttagacagatgttcaagtacctataatgtatcattccatgctcagtactggagatgcagtgatga

SEQ ID NO: 182151 - DNA, 1273 bp, Homo Sapiens
  misc_feature (613)..(638): n is a, c, g, or t
  misc_feature (1091)..(1100): n is a, c, g, or t
ttggattttatatcctgagattttgctactgttgcttatcaccttaagaagctttgggcctgagacaatgaggttttctagatgtaggatcaggtcatctgcaaacaaagataatttgacttcctctctttctattagaatactctttatttcttcctctggcctgattttcctggccaaggcttctgatactatattgaatggtagtggtgagagagggcattcttttcttgtgccagttttcaggtggaacgtttccagcttttgcacattcagtatgatattggctgtgggtttgttgtatatggctcttattattttcaggtaagtttcttcacttcctaggttattgagaattttaaacctgaaggaatgctgaattttattggatgctttttctgcatttattgagataatcatgtggctttttatttagttctctttatgtgatgagtcacatttattgatttgcatatgttgaatcaaccttgcatcctggggacaaagccaactccattgttgcggatgaactttttaatgtgctgctggatttggtttgccagtattttattgaggatttttgcacagtgtttaccaaagacattggcatgannnnnnnnnnnnnnnnnnnnnnnnnnagtatctatgttaggttttggtatctggatgatgctggcctgatagaatgagttagagagaacttctttgtcttcaattttttttggatggttttaggagaaaaggtaccatctcctctttgtacctctgctcaaattcagcttgcttggtaggctagtttttactgcctcagtttcagaacacattattgatctattcagggttcagtcttgtggagggtttattttgcaaggaaattgtctatttcttctagattttctggtttatgtgcatacatatgtttatagtgttctctgatttttgttcatatttccatgggatcagtgatgatatctcccttattatttctaattgtgtttggttctcctttcttttcttatttatttgcctagctagtgttccatctagtttattaatttttttcataaaaacagctcctggatttgttgacnnnnnnnnnnggaagagttttcagtgtctctatctccctcagctctactttgatcttggttatttcttgttttctgctacctttctggttagttttcacttggttttctagttcttttaatcaacatgttaggctgttaattttagatcttctagtttctcttttttttcttcttgtggcaga

SEQ ID NO: 182152 - DNA, 1065 bp, Homo Sapiens
  misc_feature (287)..(320): n is a, c, g, or t
  misc_feature (329)..(508): n is a, c, g, or t
  misc_feature (865)..(889): n is a, c, g, or t
ttggatacgctttgtcttatctgtaatggccagtgtttgaagaagaaagaaactagaccctatagattaaaatctttgaggatttttcaaagctttccatgggggagcatttcttacaccccacgtaaggaaatattggtctgggtatttcatggactattgtgttcactcgttagctgaaatgatcagctatcctaagactaaatactagcctaatcattagcttttttaatttcttaaattcctgagattgggatttcatgtactagtagaattgtattttacannnnnnnnnnnnnnnnnnnnnnnnnnnnnnnnnngttcaagcnnnnnnnnnnnnnnnnnnnnnnnnnnnnnnnnnnnnnnnnnnnnnnnnnnnnnnnnnnnnnnnnnnnnnnnnnnnnnnnnnnnnnnnnnnnnnnnnnnnnnnnnnnnnnnnnnnnnnnnnnnnnnnnnnnnnnnnnnnnnnnnnnnnnnnnnnnnnnnnnnnnnnnnnnnnnnnnnnnnntgagccaccgcatccggcctcatgttctttttcattaaagagagaaatcaactattcaggaccggcccccacctttcctcaggagtcatttctgttccgcacaggcctgctgaactgggtgctttatataggacactgtcatctctcaagtacccatcttggagggtacggaccccacatgaggaaaggaccaaccacgccgagctcagttatggcacacacagtgggacctagacaaagggagagggtgaccgacatccccactaaatttcaatggagtgaagttcacgaggcatggagctgacaaccatgaggcctcgggcagccaccgccaccaccgccgccgccaccaccgtnnnnnnnnnnnnnnnnnnnnnnnnnccaagagtaactctgacttacgaatacaaaagccagagagaatgtgatccaatgaaggagacatctggagtgtgcgtgcttcttctaggacgggtgatgggccgattgggaaaagcaccgcaaatgggaaaccttatctttcttttctaaattgatgctaagaaaaattggcgttt

SEQ ID NO: 182153 - DNA, 2074 bp, Homo Sapiens
  misc_feature (245)..(325): n is a, c, g, or t
  misc_feature (657)..(720): n is a, c, g, or t
  misc_feature (975)..(1144): n is a, c, g, or t
  misc_feature (1174)..(1210): n is a, c, g, or t
  misc_feature (1273)..(1404): n is a, c, g, or t
gtacaaaatgctaatatgtacccctggatgtgatacaatgggaaaggcacattatacctatgtagtatttctaccaaaatgcttaatctgaatttaatcatgagaaagtagtcagataaatctaggctgttagacccattctataagacatctggcccgtattctaaaacacacacacccacagacacagattgaaagagagaatgcacaagagcccagatatggcacaattttatcaattattnnnnnnnnnnnnnnnnnnnnnnnnnnnnnnnnnnnnnnnnnnnnnnnnnnnnnnnnnnnnnnnnnnnnnnnnnnnnnnnnnatctttagaggaaaaacagaaagaaacaatattggttaaatttttaaatgttacttttcaaaactaatttttgattttaaagaaatggaaagaaatgggttgaaagccgactttgtgatttttttcaatttaattgaattacagttaagatcaaaggaataatttcctaagtttttgtgtgttctgtttctttaattaagcaggtgcatttattaaaaattatatagctatcagagtcttaagtcatgtgggaagtaatattgctagtagattaagaatacactcttttgtcaaatgagatctgaatttgtacctcaacttggatacatcannnnnnnnnnnnnnnnnnnnnnnnnnnnnnnnnnnnnnnnnnnnnnnnnnnnnnnnnnnnnnnnttcgtatgataatcataatatctttgaacatgctcatgtgtgtgcatcctataacccactaagtaaatatccagtaagtacccagtaaattattatcatcatctttggcatcttttttcctcctatctttcctgtctctctgtaattcttgctggttctcttgttgtcccttttctttaatgttgtaggagatgctgtgggcaaaatgggcaggggagatcaacacctattttcatatgacctcagtttataaannnnnnnnnnnnnnnnnnnnnnnnnnnnnnnnnnnnnnnnnnnnnnnnnnnnnnnnnnnnnnnnnnnnnnnnnnnnnnnnnnnnnnnnnnnnnnnnnnnnnnnnnnnnnnnnnnnnnnnnnnnnnnnnnnnnnnnnnnnnnnnnnnnnnnnnnnnnnnnnnnnnnnnnnntttctgataaaaggataagttaggccctannnnnnnnnnnnnnnnnnnnnnnnnnnnnnnnnnnnncacatgcacgtgtgcatgctcttttgcccttctgcccttccaccatgagatgatgtagcaagnnnnnnnnnnnnnnnnnnnnnnnnnnnnnnnnnnnnnnnnnnnnnnnnnnnnnnnnnnnnnnnnnnnnnnnnnnnnnnnnnnnnnnnnnnnnnnnnnnnnnnnnnnnnnnnnnnnnnnnnnnnnnnnnnnnnatagactaattttgtttctttgttacttacttttaaggagatttgaagcattacttcaaactggaaaaagtcccacttctgaattactgtttgactggggcaccacaaattgcacagttggtgatcttgtggatcttttgatccaaaatgaattttttgctcctgcgagtcttttgctcccagatgctgttcccaaaactgctaatacactaccttctaaagaagctataacagttcagcaaaaacagatgcctttctgtgacaaagacaggacattgatgacacctgtgcagaatcttgaacaaagctatatgccacctgactcctcaagtccagaaaataaaagtttagaagttagtgatacacgttttcacagtttttcattttatgaattgaagaatgtcacaaataactttgatgaacgacccatttctgttggtggtaataaaatgggagagggaggatttggagttgtatataaaggctacgtaaataacacaactgtggcagtgaagaagcttgcagcaatggttgacattactactgaagaactgaaacagcagtttgatcaagaaataaagtaatggcaaagtgtcaacatgaaaacttagtagaactacttggtttctcaagtgatggagatgacctctgcttagtatatgtttacatg

SEQ ID NO: 182154 - DNA, 868 bp, Homo Sapiens
ttggcagatgactgaccttcattttctgttgtcaattatttctcctcttaaccctcaacatttcttttctctccctgattgtctctcctaatctcctttatttttgtcttcttgagacattcactgatctttttcctttcttctttttcctcatcctctatcattgatcagtaaagaccctcaaatctcattgttttcacacatttctagtacagtcattccttgccccactgggttttagtggacttctggggtgtccacatcatgttaatgttgtggacgcaggtagttgtcctagtggatgccggatagacatatgtggattaggagttgcaggaggggtctgacaatgggactttgttggcattaaatgttcaagtctatgcctggaagctgagtttaccctcaatttgcatctcaagtctcggctgaggaagtgtgttgaaactgggcagcacgtgcagggtggttagtccagtgggccgttacaacctagcacttgtccaggcagcttccttgaaaagaatgtttatagaattaatgtgcctgtgtgttacacacatataaactgacctatgttttcaaaagttacatggtgagtgctggttgaaaagacttgaggaaaattttctcagatagctttaaaatgaggcatgtgctgtcattggtagagccttcgtttagtatgcaactgatacttgaaatatgactttctctgttagtggctttaacaggttccagtaatggttgtgtgatactcttcattttattagggttcaacagttcatcaaagggaagagaaatgtaggggctcctatttgaaaaatttatgtgtgtttatttacacataaatatgtacatttgggtc

SEQ ID NO: 182155 - DNA, 1018 bp, Homo Sapiens
taaagaaataaatgtaacaaagggcttattagaggaaagaagaggaactgacaagtgagcctggcatggtcagagacagaggaactgagaacatgtagtgtcacaaagcggatgccgcagtgagtgccactcctcatgacccagatctctatgtgcattagccccgcagtgcaatcatcagggccctcagcttgcatctcaagggcatcttccatctaatgacatagcctgactccctgggatccaggcgtccatttgccaggtctaatgtaatcagggatgctgattctacaatcatgcttttcttgctgtctcaagattttccatctctgaactctccagacaacatacgaggagacacgaggccatttcttccaccagtccaacaaaatcatgcaaacagagaactgggaaaccagtccatcccttaattgtggcaacttgcttaagtgaccaaaaattgtccatgttctcatgggtcaacctaacatcctaaagaaacatttccttctccaagtgagtatcactgactggttgagacattttgttttaaacggtcaggggtgggggagaagggagggatggtgcaagaaaaaaggcctggtggggtgagacagtcctggaattcccaaagcaactgtaaacacggaaagaaggagaaatcccaaaggtagactggtgaagacatctttcatttctgctttcatggactgaattcaatcttagttttcaaagaggtgcaaatcatttcaacaacagctgagaaggcccttgccactttcaggcaattcgtgatttcgacttttgatcactctagtcaagtgacgccagaggatggaaatgtcagttccaagcctggtgtctttattatgacttccgactgtggaggcacagatgttgtacctggaaaaagagagcatgcaaaggagagacagacacagagaaaattcaacagaaagagacaggcagagaaaacaagggataaaaagagtgaaaagggataaaaatagaaagccaa

SEQ ID NO: 182156 - DNA, 1279 bp, Homo Sapiens
  misc_feature (908)..(920): n is a, c, g, or t
ttgggtattctcaatgttagtctggtgttctattctctttcaaagtagcttcttgagatggtatctgttgtagcttgcccaaacctgccatgaggttgtgtgtacactttgaaagggtatgtcctatgctaagatggtggtagagcagggcttgattttaatctattcatataaaagaaggaaaaaactagaattggtctatttggttattcagtggacttaattccacaggaatagttgtctgctgaagcgtggcagcaagagaagtcaaattcaagtttcagttccttccttattcactaagtattttgaaatcttgtagaacttctgattctagcacaggcttttacatggcacattttaccatggtatattcacagcttcgtttaaatgtcagtactttttcccatctgataattttgccattctaatttctcacctttgtagtacaagtgtattcttgaaaataattaaattcatctaagtgtgtcataatttcaatcaaagctatattcatgtgttgccagcgtcagttttttgctatcctcattcagaagggaagcctgcagatcatgagtttccatatgaagaatacaaattccacataaaaatttataaatggtatctttagaattttgatttaaagtaatagctggaattcagggactgatcagaatgcctcttgaattttccaacatgcttatatgaaatgctttattttcctatgcgttaaaaaaaatattcctggaataggttctcagaatgttttatttggtttctaggagatgagatttaaagcagaagctccaagattggcataaaactaactcttgaggtaatcaggaccatgctgttagtcaaatagaagctggagtgctctctgtcacataatgtactgcatgtgtgtnnnnnnnnnnnnncagggaagatcagaaaactggaaatgtaattctgataacacgcaaagtaaattgtgcattaaaagtatgggaattcttggtagcttaaagcttcaggggttaacttcagtgtatgaacacctagtgtgttagaattgcagtgcatagttgtttaaatacaatattccttgtaagtgacaaccaaaaatatgttgtggctggtgccagtatttttgttaatgaaatgttcagtgtctcactacagtctgatcagaactcttggtgtataagcccagccctaaagccattttatagctattggcctaattgtgtaactttttcttttaaaatgttttattataatacttctgtcatttctt

SEQ ID NO: 182157 - DNA, 1557 bp, Homo Sapiens
tttgtacaaaaaagttggattaattattattttgacaacattacttgggtaatatctatataatggtagataaccaatcagttagcttaattaatctaaactatttgaattcagggaaatattagtcaaatctgctgtttgactaaatacaattcaaagcagtgtatttgtgacttggaatatagaacacaaacaaatgtgtaacccatctgcagtatgcattcttccattttaccaccactaaccattgaggctcatacaattttcaagcaacaagcattgcttcccaaaggtaaaataatcaggaatatttctatagtaaatggagtttttaattggcaatactgtttatttttttctagcaaagacaatttatctcagtaaccttaaataggaaaagtactcaaaaattaaagttgacttttggctttttgtagtctctctggaggacttccagaaaattaccactgttggattttaatctgcttccattaaccaatcttacagagatgataaatgaattaactaatattgaccaaatataaattgactgcaaataataagccgcataaaagttgaagtaggaaaactactccaagtttatatattaggcaccttggggaattctcttagtctttccagctaacaaggattttcagcataataagtagatttaatgatggcataaaattcccagatactttcatatacattttttgccaaagtgtaaatcttctccttttgcagtctttttgttattatcccaacatctagctgctcaggccctaatttagaactcattctgatattttcttcttctgtattaattaatacttatgggtcatgaatccctgctcctttgacctttttaatagctcatgaatccatcccattgcctccccaactctgcccacacctgctgcaacactaatgccttgattttcctacctcagtctccttttctattaatccctcttttgcgtggctgcctgagtccactttctcaaacacaaacctcactatgcaactttggaatctctgtaggctcacctttgccatttcttaatattgcattctccaaattgctaatctctatccagtctcttgaactagacttggcacatggagattccgctcagaaagtgctcttcacacttctacctgcttgactaaccccagattatctttcaagactttaatctgatcttgtgtcttagagaagcccccatacctggtagagcatgtaccatcttacatgcttaaataactccacatttatttgtgtttattactctgtgttataaatatacatttgttggtctctctcttggattattttgtttctttgtcctgtaactaccactgaaagggtgcaatacagctttcttgaaatgtgtattgaacggatgaatgtataaataaaaattaaattttgtaaatttctgcttattcttagaaaaagaatctaaattgtgacaaatcagaattgaaaaaagtattctaataaagaaaaacaagcttttataacttcagtatttgcttcttttactttgaaaa

SEQ ID NO: 182158 - DNA, 1213 bp, Homo Sapiens
aactttgtacaaaaaagttggctgataggtgtttccagctactattagaggtgatagtgcttttgtgggggaaaaaattggtcatggtgaatggagatcgaggaagctcgggacaagggaggggtgggctgcctgattttgtccagttttccaaatatccacgcagtgaactggagtatcctaaacatgagaatgtacagttgacagttgtaaaaactagggatctgtagtgaatgctgtgcagccccatatctcatttgggggtaggaaaatagctgaagattcatgtgcattatttgacatttcctttgtcatctgctttttaagcaaaaaagggttttgtgttagaaattctacttgagcagattataaagagctttaaaaaacaactttcggttgccaaaagtttgagcatttgatttcattacctgtgtctccctcactggtgtccagacggtcaactgaatactcctgaaacccagggagcaggtgacttcctggagtgctttgtccccagagtcagccactgcttcctctgtgggggtggagagtttgtctttggccatgcagtgtgcgacagttcaggacgggtagggatgggtcccattctgtctgggtcaagggctctatcagcttcttccatgtgcctttgggaagaaatctcgttactttaagtttgctttcctgttatcttgatgaagtgcccattttagcagacacttgtagtgctgaccacttagggaatgtacaaactcctaagcttctaaagggaggcatggcaaaaacgttggggtcaggatgtctctcacgctgctcatgttaatactattaacacatgatttgagaaataagttttctctaaaatgcatattttgccgccacacactgaacaatattatttccagtgaagtttgatgcctgttcttacgttgtgttcacctgttggttcaccactcagcagatctgattctgcaagaattaatggtagaactagatcatcctttctaacagacgagcctgtgtcctgtgacggcctttcacagcggaatgcagttgtacctcacattacttttgaaacttcactcgttccagttggtacaagtatttgccaaagccatttcctatgttcaccgtggcccctcctgatgtggctgtcagcgcagcgttgttgaacagggctattctttttacaaggtgtgaagtgtggctcttc

SEQ ID NO: 182159 - DNA, 1553 bp, Homo Sapiens
  misc_feature (318)..(353): n is a, c, g, or t
ttgggtcaaacaaacaagcacaaactcaaggcacaggcatacaccacccgctaggaggccatgccaagggtgtggatacatggaagggtgaagaactggactagtctttcaataccacagcccctttcttctctaggcgtggagctgctaggagtgagccccacatcagacatctgtctctggtaggagaagacagtcaagatccagagagatgcaatggaagacaggatgggagaaggtcccaatcattttctagttattaataacagttttggctgtgcttagattgctgcacttgggaggtttggttaatcaacnnnnnnnnnnnnnnnnnnnnnnnnnnnnnnnnnnnnactaggaggtaggctactccacaatccctccaaactcttctttcttgcattaattagtataaactgcatttctggtacttgcaaccaaagggttatgacccatctatactgttttttctagatcagatggtttttatatcaaaagttgctgtccctatcccaatgcaaagcttttttaggttgatttttagggggataaaatctttcatattgaaaataaacattatcacctatatatcacaggttattagtttattaagttaaactgaaccacataagtttcaaataaaagtgttactgaatttgcagtaaaaattacacataattagtgtaaattaggaaagatataaaacagttggcacaaagcaatagcatccatacttttagcccattaattttatccctaggaatttacctcaataaaataatataacaaaagcaaatgctcatatacattacacaatttatgacaactgtgataataataaagggacatgtctaaattaagagaatgtgttaacaaattatgttagtttatcaggatggaatattatgtagtctttatgttaattaagaacattctataaaatttcaaaatccatttatgacgtagtacgtgaaaaagcaaaacaaaatgcaaaattacagggacatccagactaggtatataattttctttttgtacgcagcacaaccattttctttttgtgtgcagtagaaaaaaacatttcaaatctacctgtaattttctcttgttccgctaggagacatgcatcatctttgattaaaattattcttcactgggacctttatttatgcaaaggcaaaattctattctagactcaagaagctcgagccagacatcctaaacatttctgaatagaattatcaaaggctgaatttgtcatgtgcagaattgcatctttttagggttatgatgctgttgcctgtgggtgaggatgtggtggataacgcccttcttgcagtgaggataaggggggttggagaaggtacccaggggactggtggctcatggtaattgatggactaggggaggccacgtagagaggacgccgtggagaggcatggctgatggacagaactccaggagcagtgatagttcatatccagtacagtatttttcttttctcattataattctcctcattattctcaagccaaaagaaattgtcttaaatg

SEQ ID NO: 182160 - DNA, 1424 bp, Homo Sapiens
ttgggttctgccccatagggtgggggagtattcagtgaggccaccgttggaaaccacctgtcaccaggtcaacactgctcagctcaggtcggtaccttcttcccagcactctgctgaggtgggaagaaccatggactgagttgggcaggcccacatgtgagtcccagctctgtgctggggccagtctagatttgggacgagtcctttgtcgctgtgttcctcggtcttctccttgcagtggggatttctgtgctttggaacgtggcagtgctgttgaggtgtaggggtcccctcaaagcttgagccaagtgatccttagttcttctgccatgagctttgttctctagggacatggagtgctctttcacaatcatcttcaacctccacagctgtgatacttaatcttttctgggtctcaggccccttggtgaatctggagaaagctgtggtctctctgtggaaaaatgcggacgtccagatacatacccccatttgcacacagtgtcggagggtttaggactgaccccccaaacatatccagggccccatgtcaggaactttgccctgcagcaggaggtcaggttggggtagaggggcagtggccacctctgaaagtcgttttgcttggctaaaaacaaagtccacaccgtctgtcccgtccccagtgtcacagattgcaaataaactccattacctccagatggaaattttcgtgaggcaagaaatcaatattttctcaaggccaccacacgacagacacctattctgaagaagccactggggagtcaggctatgtgtgttgggcgttgagtctgttacagcctctggcactgttggctaaaggcgcggctccagaagcctttggtatttccaacgtggggagtaagctgatcttactctcaccaagccctgttgagaacagattccctatcaggctcagaactctgatcaagaggggcattcttgccactgctggagtttgtgttggacaagaaaaagcctgaaggaagacccacctttacagttgctcctgaaagccagggctcgcctgcccctcctgggaattctcatgcacgggggatctttctagtacagtgctccgggcgtcagtgtcagcagggacctctgaaaccatcccacccaaccagctcttgtccaggcagaatgtgacttgcccagaggaatcaggctgggctattccaccagctaaagggcaggcaaaggagaagcagcatgcccacggttttttcttccaggccatttggagctggctctaagagctgctgggtaaaaacctggcttcgtagaacttggaccctcatatgtgggtctgcctgatcggggcacagtcccttcccacagctgcttcccagagggcctaggaaactaaagagtgctgggcaggcccagggctctaccctccc

SEQ ID NO: 182161 - DNA, 1300 bp, Homo Sapiens
  misc_feature (992)..(1006): n is a, c, g, or t
  misc_feature (1087)..(1109): n is a, c, g, or t
ctttgtacaaaaaagttggcaaatatactgaataaaattattgattctaatttttaatgcaatcaatattatgtggataaagggattctatgtgctgacgagatgctaaggctgttatagaacactgcttaaaataaatcctgaagagtaagcattaatgtaagaaagcactagcatataccctacagaaaataaataataacaattactgttatcccacattttacaggtgaggaaataaggcttagagggattacacagcttgcccaagatctcacttctgataaaaaacaaattttgttctcttgatttacgctcttaatcattatgttcaaatctattcaataaacttatcacaaaggaaatattttagccaaaaatacaattgaaatgcggagatccacaaagaaagaaatggcttcagaatcttgttttcagcatcctttctcatccctacttgcatggtcccagcacgtaagaacagaacaaaggaatctaatctattagaaagttcccaagaaaactgccatttgtcttctatcctatgacttaatagttaatggtgttaacagagtcattaattaaaaacaatattttatgtggtcattttcaattctcaaaatgttttcacagacattatctcttctttcacctatttatgtttaaatcctacaaagcttattagttcaactctatctgcatgattctaaatattgggtaaaatgcctaggatgagaggaagtgtgaaaattagtcattcaatcatagctagatgctttgcatcctgtatccacatacatatgattgactgatttttcccattctttgaggatgttttgttatatgcctcaatctaacctttaaaaaaacttgaaaatatattcaatatttctcatctggcaggtttcccagatatttcaaatatattttatttactagcatcagaagttaaagtagggtggttctcagtgctataccattcaatcacttcnnnnnnnnnnnnnnnatctattcctacctgctttttgaaaaactcatttattcatctgcccagattcatatcaataaagacacatacatagaaatnnnnnnnnnnnnnnnnnnnnnnntgtctattttccaaatatatgaaataaagtttgtgttggtgtagtccatatgattcattgataaatatttcatatagaaatcatgagccctgatttgtttaatataaaatctataatttgacatactatttggattaaattaacacaatttcattttatcactatgccattaaacatatatttgtttttta

SEQ ID NO: 182162 - DNA, 894 bp, Homo Sapiens
  misc_feature (510)..(544): n is a, c, g, or t
  misc_feature (571)..(605): n is a, c, g, or t
ttgagaagtaacgcctcataatatttgttcccagctttttaaattgaagctggttgcataatctggggaatagtcataatttcatgtgttatacagtttaaaaagcctgcaaaagtgactttgcttgtttactttctgcctcagattgactattttaaccaatattgtcacgactagatcatagctcctagtgaataacatgaggtgttttaaagttaggtctattacagaattaacataagcacaattttaattttatgatatctgatatgcctatctaatacatcttaatgcattaaatgctgcagataagaatcttgctatttttcaagtagacaacattagaaagttgaatcatgaactcattcaattcatcaagtcaaaagcactgagtgttttgctagtctagtgacatgggttattgtatttccgagaagtgcctctcatttctggggagttgtttacatataccctgcatttaaaccaattaaaacaatccaagtttctttnnnnnnnnnnnnnnnnnnnnnnnnnnnnnnnnnnntattttaggcttagaattatctaatgnnnnnnnnnnnnnnnnnnnnnnnnnnnnnnnnnnngtatatcagtatttgcagtatttgctgtgattacttaggtttagactttctcaacttcttagatgactaaatgggctgaagacttgtaactaacttgaataggatagacttcataccctgtgacaaaaaggatggggaagagaatatcattggtcttgccatatacctcctagctaaaaggaaaatggtttgtagttgttcttgggcctactgtgttgcttttcagaaggacataagactttctactttatctgatatggatatcgtctacttcctcattcctttatgc

SEQ ID NO: 182163 - DNA, 949 bp, Homo Sapiens
ctttgtacaaaaaagttggatcttttctgtggatcagaaaaaacagaagccaaactcggggtcatctttgtttttaaagctgaagtgggactgtctggcactctgtgtatttatgcgttccagcatctggaacctcccatccctgccctcctcctgtgtagctgccacctccccgctgggcccagcatggctcacctgtcccgtgggctgtgtttcttgttgtttttctctttgcaaagacatagctaggaaagcgaatgataagggaaaagttctcagggaattgaagtgttgttgctatggtgacgtccttttgctgtgaataaaggtgctctttgcagcaatcctgggggtcctggtcttggctggaggtggggcctaagccccagggcagccagggtcaggagaggcacacaggtgaaggggaggcttggccttgggtgcaccgcatggagcaggtagataggaaacgcttagagacaactattttggaacgaaacctggcgtcactatagctgcctgctggtgactacaggtgcggcccacccagggtcagggtggtcgctggagcgtgagccctgtgcttccaggaggaacaggtctaggatgctgggggctctaggtcccagccaaaagcacaaccccaaggctctggcctggtctggccactggggagcccagcccctgcaggagggacagtgactcctgtgaccgggcctggggcctccttatccaacttcactcctgccacgagctcacagagtccacatcatcgcctcactttgcaggtggggaaactgagcacggagcagctgatgcccaaggtccagcagctcatgctggtgggctggggaggcgctcagactccaagccaggcaggccgtgggtccggccgccccacagctggtaatgctgcacctccctctcctgtgatgtggccccaggcccc

SEQ ID NO: 182164 - DNA, 1134 bp, Homo Sapiens
ttgggagtattataatactattacctattatattacattatattattgtagttctacaggaactacaaggaattctactgtgaattccttaagggtgggatacattttacaatcatcactgtttctctcattagttgtggaatcaaaaaaatgagtgcacgatgaaaaattattcaaacacatacatgctttcattccaattgaaaatgtaaaaatattactgttaaaacaatattaaaggacatgtaatacaattcaaatattcctaccatgcacgattgttttcacttctttgtgcctctttcaccatttatttgtgtgcatactcagcatatttgtttgtgtaacaggatgttaaaaatagaatttgttgcctgtagtttttgctaaagctctactagactggaacagaacaataggtggtaaatactccattcctcagtgagatgctacctacctatgcagagctggaaaagattttgcaacctgaaaacccaatcctttctgagatataaaagaacagaagagtctggaagtgatttcttcggagaaattcattttctgtgagtctcactcctaatcccctatgagatatctgggggtgaagggcaggtgctgttccacacagagagcttgatctgtgcatcttggaagagggaggtaggtagggaacagggtgggctgctttgggacccatgccttaaaactcaggtactggggctggctggttctaatggccaagaggtgagaggtgcacctgtggggaacaaccttcactctcagtttgtcaggatagaggatatgagtcttgccctgaggatgggatgtagactacaagggcaagagagtcagcttaaagaaatctgtagaactatctgccaggactgaggtgaccatagcagagagatgttggaggtattctgttgggaacaagatggtgtgaggtaaagattgtatttgatacctgctggagaagagatcttgcattaaggccagcattaagagaacttcagatgagaaatccctggtgaagcagagtctccaaagaatgcataagagctctgcagtgagaaagagatcacctgaataccttccaaaatcaaagcatggcagtgaccagctaagcagatcttt

SEQ ID NO: 182165 - DNA, 704 bp, Homo Sapiens
  misc_feature (493)..(575): n is a, c, g, or t
tgttcttctagctgggtggtgggtaaatcaggctcagtttctcccctctttacttctttattttaaaaaatatattggaaaacttctatcataagtataaaattaacaaaaatttatctccttttccattgtaatagaagtatccatttttatctaggcaaatagccagctacattagaaacaaacttttcccgcaaaagaccacagaataaatatttcaggctttgtgtgacatgtagtctctgtcaactgttcagctctgccattataggggaaaagcaaccatacacaacatgtaaacaaaacagtgttgctgtattcccataaaattccattgacaaagcaggcagcagaccagatttgtcccgtgggccatagtttgctgaccccggattactgagcacctactatatgccaggcactattttagaagttggcaatgcaatagtgagcaacacagtcaaggtctctgctctcacagagcctggaaaannnnnnnnnnnnnnnnnnnnnnnnnnnnnnnnnnnnnnnnnnnnnnnnnnnnnnnnnnnnnnnnnnnnnnnnnnnnnnnnnnnctggaagtcccccaggcaggaagagatgagccaaaccttgagagtgctaggctagaggaatactctgggaaccttgggatgctaactaacacaaaacaaaacaagctccactagcagtttgattccttg

SEQ ID NO: 182166 - DNA, 2703 bp, Homo Sapiens
ttggctagaaaattaggagtgtacatttgctggcttctttttgagttttgtactgtttattacaggaacatatttgtgtggctaatctctagggtgacagtgagtactaccctgctccttctgcattctagttatccaacacacccagcagattgtgttcagggacagaatgtgtttttagaaatcccttattattgaaatgaataataatatagctataaatatgaatgtctggaggtatccagatgtgccttaacaaatgtaaatggttttcattcagaagtttacatttttattacattataaaatctcatcattgggaactttctaaaccatgaatatcagttcttttaatgaaatttaggtggtgctttatcattttggagaagttgctgtttgggacaatagcatcagtttatcaagaagtgtactcaccatgatattcaacaatgtgttacatttgacaaaacgtgtttagagtaagaaagactaactatactgtctgttatatttatttatgctttttgtagtttagctacatactataattttcattttaaacgttccttagttactacaaataatatttatgttttgcttcttcttagatgtaggcggatgcagaaatagaattatgttagagaaattattaaaagtttaattccagtaggcagttggagaaatctgaaactaatttgaaaaacttttatgctgtagtctcattagaatcattttaaaagcactgttcttgcatttttcctagactacagagagtgttctttgtcattttttttcctattctgttgtgaagtttattgtttcagttatttgagggaaataacctcttaatatgtttattttcctgaactaaagttttcatgtagagaatacaattaaatgttttgtgttatgacccaaactggctggaagtagagttcagagagggagaagggacaagaatcagtgtgggcatctcaggaaagtggcgccagtgctgggctccagccttctccactggcatgatgggtcctcagattctcctctggataatgagggtgttgggcactgtgagctctgacttctggggaggataggccatcatggactccatacacaattttgatgggtatcagttctcataaaatacctgctacaatttatttattttgtagttgtttagaaaactgtgagcagttgggcattagtaaattgtagttatatcttaacgatcttgggaatcattgaaatatgagtttttttccctcactcctatttatttaattaaaaaattagggaagttgttcattcacagctgtatattaatataaaatctctttataaaatgattcagagaaaaggcagtagtggtcacttactgtgctaaaatacctttttctctaaaaatatttaagctttagggtttgtcatagttttactttttaaattatactttgtgtaacaatttacgttaactagaaaaattagatatataataagttttggtactaagaaacatttacattctacactcattagtcaaatgaacttttctttcccagtgctaacagattttgtttcatgtgaagaaaaataaaatacaaatgaaataaaagtctagaaacagcaacaggaaactcaccacagaaataaagacataacccttgataagtttgtgtaagtgccagaattattggaagcaggtgacgaatgattaagaaaagctttattgtggggacatgctttaagaatcagctctgtatttgtgccaaggagatcaggtattggtgtgcaaacagatcccattaatactctgatttgaaccatgaattccacctactctgcgttgaagccctccagtagactgatagatgtaatcaaatgatcagctaccaagtttaattcctttgcctgtgtgtagcaacagttggtagttttacaagttaagttgatggtctggctgcagataagagaaagactcagtgataggtggtttgtgagtgaagtaacttccacactgtcaagagttgacagcatattaattgtgtggcattataattgtgagaaacaaatgagagcaaaatgttaggtcctttgacaagcattttcctcctgtttttaaaaagggctttaagttgtttcctatgtaaggtaatctttcttttttagtattatctaagaaggatggtagattatgtcattttggaaactattgtgtcccttgtattttaaatatttcaggaaaatgcctacgattgttacaaagatgtgtgttttacttataacataagctctgattctccagtggccactgggccttctctgtgctctgtattcaactgcagtatgaattacagaatgctgtgcatgttcgttagtaccaataccatgtgtatgtggtagaagttgtaaccagtttctggatctgtatggtactataaaatacttattttataattctgtaaccgtatggcagtgttatgccaaaaatgtataaagagcaatagtttttgttgcttactgctgtattttaaaatattgtttctaaaataatagagttagagttccttttgagtaattatttttaagaactattgccaaatatacatcctgtaaaactaataaaagccactccatcttagataacattttagcattgtgctagagtacattatggtgaattttgcaccattaaaatatttttaa

SEQ ID NO: 182167 - DNA, 480 bp, Homo Sapiens
attgatgagcaatgcttttttatatatagaacaactttgtacaaaaaagttggcaaagatgtgtgttttacttataacataagctctgattctccagtggccactgggccttctctgtgctctgtattcaactgcagtatgaattacagaatgctgtgcatgttcgttagtaccaataccatgtgtatgtggtagaagttgtaaccagtttctggatctgtatggtactataaaatacttattttataattctgtaaccgtatggcagtgttatgccaaaaatgtataaagagcaatagtttttgttgcttactgctgtattttaaaatattgtttctaaaataatagagttagagttccttttgagtaattatttttaagaactattgccaaatatacatcctgtaaaactaataaaagccactccatcttagataacattttagcattgtgctaaagtacattatggtgattttgcac

SEQ ID NO: 182168 - DNA, 1586 bp, Homo Sapiens
  misc_feature (1279)..(1289): n is a, c, g, or t
ttttccattcaaaggacaggaatatggatgaaggtcaatgaggaccacgttagcatattagccagcatgactttgttatacttcagaagaaaactgctgcatctcaatgttacctccacaataaatcaatatattaggttgaaccacatgaaactgcccatacttgatcattttgccctaccaaaaaaagtcaattacatatgattcaacttagtatgttccaaactctgaaactgcttttccagtaagtgaactgattatagtcctttaaaaactaaataaaatgaacagaaaaaacaccctgaaaactcgttatatttaaaatacagccgaaatgtaatacatacatcactaatcatattaatatgggacatctgtgtttaggtaaaattttggtatccgtcatagccatgaggaaaaatgagaacatatagctggcaatagctcacatacaccaaggaattaaaggatttgatttttagaagaaaatgtgatatttttattcagaattaaacataaacaataactaatatattttaaaaacatccttcctgaatatctctcagttaacttgtactatttgctaatggtcagaaaagacaaatgaagacagaacaggtacaattaaagataaactttggcttcattatgtaaaatccgaccatatctatataagattttttatagtttctaaacagcctgaaaatagaagtataatggttaagtcttttcacaaatttctgacacaatgttctactactcgtcaagtaattttaactatatcatatatttcttggatacagccatatcactaccatcatgttggctttctttcaccaatacctggcaattcagagcaatcaaaatttttggtgttaccttttttcaagacaactaatttctagacattaaacaaacatgcattgagaatacctactaatacactaagcatactcactctctgtttcctgtttgacagcactttcttttcgaggcagtgtagctgtgatggattaggttgcaagcatcaaagacaaagacaagttaataaactgcaatttgcacaaaccatgcacaagaggaagttaaagctctagtttaaaagacacatgcaaagaaccatgagcatcaagtaacaagaagtgcaaacacatgtttagttggtcacctactgtttgagaaattatatgagagaaaaaactttacttttaatgtattgtttttactcaaatattcaggtagaaatatctatgtgtaacccccctacactttaaaatgnnnnnnnnnnnaagtttattaagctggtacacttaaatttaaaagactaaatttgcaagtttgggtttcctgagaaaatataattcaagtaaataaagtggcaatttattagaatgcagctgcagatttagatgtcaacaatcttgtattccctgaaaactcctgaaaggattctccactgactaaataattttatactatatccaacaaaaaattatatgagtggggctttaaaaccactgaaaagttaaaactaattatcaagctgaattacttaatcactggctttgtgagtgctcagaatccaa

SEQ ID NO: 182169 - DNA, 887 bp, Homo Sapiens
aaaaaccataattaacaccaaagatcaacaaccactagctcctacacttaccaccccacccacttcctcaggaaagctcacattcctttaataaaactagacaataaaaaaccaaagacattcttggccgccctctgatgtgacaatacttcttccaaaaccataaagaatttccatttctgcaaatgatctcacagcaagccccagctcttctacctatttatgtcaagaaccccatttcacatgaaggagtcatttttcattgaaaattataccttcctgtgaactacctctcttggaccagactactgcacaatttggtcaatgggtttatcagcctcatgggaaggactctatgctgctctacttgcggtagctatggttgcatgggggagatgacatgctatagaggaactgagaccttatctttcactaggcctgagccacccccaccctccggggagccagcccagcctgtcattctcctcagaggcctcagagactgcagacacaaaagcccaggggacagcacccagctacccagatcagagaccctctggacatactggggtctttaacaagacccagacttctaaggaagcccattgtcacaccctgaagaaagcctagacccagctctcatgtggtaaaaagagctggctatgcagcaagagaagagaaaatagagacccctgtcctcaggggtgtccattctcatacacagcagtggttccctaaggaacagatcttcaggggaggattactcaaaacccaatttgaccccaggatgctcctgagcctccagggacatccacatggctagctctactaacttgatataagtacacaggctagaccagcagtctaagaatcaacaagggcaattc

SEQ ID NO: 182170 - DNA, 2069 bp, Homo Sapiens
  misc_feature (971)..(980): n is a, c, g, or t
  misc_feature (1215)..(1223): n is a, c, g, or t
  misc_feature (1804)..(1814): n is a, c, g, or t
ttgggtatttaagtatgataaatattattaatgtaactttggctataattccagtattttttacagttatgtcagagagtttgtgtccaactcttgttttacagccaaagattgaagtatcagaatttcaactgtaattagaaataatttatgcaggttgaatctagtctaaattctattttatagagttttgtggtatcagctagagcaggagtcagtaaagtatagcccacaggccaaatctggactattgcctgtttttttgaataaagttttattggaacacacttctacttttatattctctactgctacttgggcactagaatggcagagttgagtagttgcaacagaagaccatgtggcccacaaagcctaaactatttactatctggctctttacagaaaagtttgctgactcctgacctagaccataacattctgtcattaattaaaatttgaaatattttgacacaattttatttagattgtatttgctgtagagtgacttaacttgtagctacttgtttttaattgtataaaatacatagaacttaagtttggattatatcaggaggaaggttatttttaggatgcagttcttttaaaaaaatcagtgttacaaactatgttatttatagaaagaatagcagagctgaagagatttagtcatcatttaatctcgggatttcggtcctcactatgctttagaatcacctgggggaggctatgtgtggggccccattcccagagattttgaatttcatttgattgggtgtgggactcaggcgtttgcattttataaatgaggcaactagttttgaaagagattgtgacttgtcaaagcacatacagccattcagtggagggagctggatcagttcagtatttccctgtatcattctgcattctacaacctagactggagttggcagacttactccataaaaggctagatgtcctatgtattnnnnnnnnnnctcacataatttccatatttccatttttttgctatttctgatgtccttcacctaaagttatttattattttggagggacggaagggagactatatatatacacacacacacatgatagaagcattgccacattatgttcaagagactggtgggctgctaatgaaatcttcagcctgtagggttattccctcccctaagcaataattaaggatcagattacttccaggcccagttnnnnnnnnncagttcagatttcaggtgccaggatgaaaaggcacttttcttttttctcgcagtgttaaaatgaataggcattttcagtataaagctgaatccatctatttcttcaaaaccttatagtgaaaatttaagttttatgtagaggataggagaacttgtatgacattcagaattttttatgagttggtttcaggtcagtatttagatgctaccatgagttaatgcgttaaagatacttgatttacttattaagaactaagcttgctcttaataaatttagtcagggtcttcactctgagtaaaatttagtcttttcaaattattatctttgtatttctgatcctactagtctattaacttgaatttgattgagagatatggaaatagtcaactaaatactctgcttggagactaagaggtggtggtggtaacattggaccatctttgacactgttggtttgccagtttccctctgaccttttccagttttgttcatggactatgtcataaaggtttctttcatgagtaaattttgaacccaggttcaaggtgagttcagaatatactcaaattcattcaatccnnnnnnnnnnnaatgcagggttgtacatattttaataattttcttatgtatctggtatttaatgctgacaggattccagtcaatggagaggtttcattgcaagtagctgcaggtgtgtttcatggtagagataaaagttttcagtgaagcagactttcgttgtaaaaaaattacatcctagtaaataatgaatatagatgttgctttttatggggcaatatggtatgctttttatgtgttatgctgtactgctaagtaaaaatttt

SEQ ID NO: 182171 - DNA, 540 bp, Homo Sapiens
ttggcaaagggcctagagccttgagaacctctgaccattagtgttaacaggaaggcagcctgttcccctagctggggagggggttgtgcgtggcaggaagcccgtgcgtctgtgtctctttggagctgtgggttggttgtgtggacgccagctgtgtggtccccagcctcactgagcctgagtttccatactagcggcgggagatgggactagagggtctccaaggctccctgaagctctgcgattctgcttctctgagtcttgaccgcagggctttgttcgcgggggtcacagctctcatggctgcagctagcgtgaccccccctggctccctggagttgctacagcccggcttctccaagaccctcctggggaccaagctggaagccaagtacctgtgctccgcctgcagaaacgtcctccgcaggcccttccaggcgcattgtggccaccggtactgctccttctgcctggccagcatcctcagctctgggcctcagaactgtgctgcctgtgttcacgagggcatatatgaaataa

SEQ ID NO: 182172 - DNA, 1132 bp, Homo Sapiens
gccaactttgtacaaaaaagttgggtgctttttaaatacgtgcttctaaaaatctgagctcaaagcaagaaaaagaaaacaggaaagctgtatccatttgccataatagatgaatcagaattgttttctattaaatatttcatcacgaaatatgatggaggccagaagctatttttaggcttactataacactattatgcatttttataaataagaagaaggctgtagaaagtacttgaaaaatatctaattctctttctgtctaaggaaaactctttctacttggtgcaataatctgaaaatttagaaggtcaaaatatgtcacaggaaatgatcatagacctaaaaatagtttttaaggaaaccagctacacggggcaaccaaccatcttgctgttgaagaaaacagttccaaaaggctaaatcattggcataaaggaaacaaaacccaaagtatgcgttgtaattcttgagccagtattactgaaacaggataaaagttataaaatctaacataggttaatgcaatgtctctgctagtgctacaagtctaaaatatctttgtaacaatgctttcagaaatgccagttttaattacatttcacattgtatatgagagatactgctttatgaatgaatcggaataatacattttcatttaaatcttaattgcttttcattaaatgcgaagtcttaatttcaaaatgaaatcacactaccagcaatagacagttttcttgaaaactctaataaggaacaatagccagttccgtaaataactttaaaattctaaaagtgttggtacactagcaatcacaaatatggtttcttttaatacttttttaatcctgtaaagaagggtttttataaacattctttttattaatcagtcataacatggcgaagtgtgtagttgctgtttctgaaaagtgatccaaactctacatccagagattatgaaaaattcttatagaattttgtaacaagtatttacatgttgggtgaaagaaatttcatagtcgttggagtgccatgaaattaatacttgcaattcagattgcggtagtttacactttttctgtatgtttcaaatcaggtgtgtaccatttgtactgagaacaccacagaatga

SEQ ID NO: 182173 - DNA, 982 bp, Homo Sapiens
taaaagccaactttgtacaaaaaagttggatctgctgtaaatattaacaaagaaatgatataatttccctcagatcttaatttagaaagttggtgattgcagtcatttttgtagtatccctctttctaatcacgttttgtcagatgccggcaccttcttttctctttgaggttctatgaatctttcattcttacctgaataatttcacactctccattactcatgtcctcctaaggtctcctgtggagagtgaatatttccatcgcacttacttgctactttcaatgttctcaatgtcctattggactcactagggcttagctctgtggttgacacatagatatgcagattttcaaatgtctggaatgtgttactctactacatgttttttgaaatggaaacagatggaatgactggctactgtaataatactacagcagctccataatgcatgaaatcctaaaaagtatgtaatattataagtatcttttcaatacaggtttcattgctattattcatcagtttccgtttagattacctgttccgatttaataacctttgataaatttgaaaaatttgtctttcaaacagagcctgttagtattaatgaagaaaatgagggatttgaacataacacacaagttagaaatcaaggaattatagctttgagttaccgtgactgggaggtaaagctctgcctgttgcccctgcatagttctgactctgccttcacttgcagtaagcccagtgcctaaatgttcattattgtctgccaggagattgtgaagacctttgagatttcagagcctgtgattactccaagtcagaggcagcagaagccaagtgcttgatgctagctgaaggactccaatggatagtgaagtccaaacggaaagcggcatgtattgtacatattgtatgattcaacatttttaaaggcagattgttttagtaaaatgtagcttttgatattaataaattt

SEQ ID NO: 182174 - DNA, 860 bp, Homo Sapiens
ttggcaaaatctcaaacattgtgggaggaaaacgccaggcctgctggggagagggagaaggcaggcctcaggattgtgcggagaaccatgttgccatctgcataacgccccagcctatccaagtgccaggaagggaagcactactgaggggggtgctgcctgtgggtctcttcctaacagaacgccaacgaagggggtgccctgtaagaatgagaagtctgccaagtctaaggagatgtccccctccccaagatggtagcagaaactgaagttgtaaagacaaacctctcgcaaagccagaagcagatgctctcaaaaacaggcctaaggaatctgttcccagaagaggcctggggagcagcttttggggctcagaggccagtctggggggaggcaggcagtgtgactgaaggccggcgcaggcctgtttcggactagggtgtagcatatttagtaggatgctcacatgttgtagggatgggtgagggctaaggggcttggctcttgtacgggatggatgatgtgagcgcacagttcgtagggtcaggcgtcttgcggtaggaaaggggcagggttcgatacctctggggtgtggcgtgttctctcttgcccacctccccaagctcctttaaccaggagcttccctcccagagtgagctacgtcttgggaggattgaagcaaggaggtggcagtggctagagttgctcagatcggctcagatgaaggcccaggggtcaaagcatttgctcaccacaactgagtctggaaggcactgtgcagccaaaccctcttgtccaatcacatgcagccccaagcccctcagaaacgccctggtggagggaggagcccaacagatagg

SEQ ID NO: 182175 - DNA, 1708 bp, Homo Sapiens
  misc_feature (59)..(79): n is a, c, g, or t
  misc_feature (492)..(505): n is a, c, g, or t
ttggcatcccttttgttattataattgtctgttacacaatgatcattttgaccttactnnnnnnnnnnnnnnnnnnnnntctgtcaagtcataaaaaggctataggaatgatcatggtcgtgaccgctgcctttttagtcagtttcatgccatatcatattcaacgtaccattcaccttcattttttacacaatgaaactaaaccctgtgattctgtccttagaatgcagaagtccgtggtcataaccttgtctctggctgcatccaattgttgctttgaccctctcctatatttcttttctgggggtaactttaggaaaaggctgtctacatttagaaagcattctttgtccagcgtgacttatgtacccagaaagaaggcctctttgccagaaaaaggagaagaaatatgtaaagtatagtttaaacccatttccagtccaaaccaatgaaaatagtttcccaaataagtattttgtcaaatcatttacnnnnnnnnnnnnnnttttacttaatattttacaaatacttaactatttgggcctacaactctatctcatttatgcatccacatgattagatatttatagatattttaagtgctaaaaattcggtccacaactatgaactgaattataaataattttgaccactcaccagaatttggagaatatttttatctttgcactataaaatatgtcttatattaaagttttcctcttcaaataaaagctttacaaacgataaaatatataaaattagtcaataaaaatacatgcaagctaaaagttataaaatataaaactagatataaaattggcaaatagttctgaatcattctaacatattcctttgcatgcatgccatcagatgagaactggagatgactcaggagctacataaaacgtactgtcacccttctttgtagtactgattcgctaggcaaattagggccatttcttccaaaagagaatgtaaaagtgctagaacagactagtattcagctaaagggtcctaaaagcaccatacaatgttcaatatggcaacaggagaaatctggtcaaaagccagtttgtctccagttttcttctgcctttgcctcaggctcccaaaattgaatagtggagttttagctgctcagtgaggttcctgtagagatttctctccatccatgacatacaattcttccttaagaagccagacaactggcactcctatatataaatagaagtaattaaaaacttatctgaagaagagaaaaggaaaaggaatctacttttctatatgccaattgctgggatcaaaataaactacaaaggatttatgaagaaaattgtgaatgttcacgttacaaattcttttaagaagtgcatacatttatgtatatgtatacaactatatgtaagagattttgctgtatgatatgcattatgggtgaaagttcacgataagttttattattgctttattactttttattggtatgttgacaggaatatcatggatatgtttacagtgacttttatattacagtggacgctttgatcttaaaacagccacaacaactcatctacggctgaaatataatatgcgtggacaagcttttgctgaagtgtagtgtgtcctttaagtttgtttttaaaaagtaacttacctcagagaaataaatgataactataaagaaaaagaaagctttgggaaaattttc

SEQ ID NO: 182176 - DNA, 947 bp, Homo Sapiens
  misc_feature (126)..(134): n is a, c, g, or t
gagagagagagaataggggaagactaagcaggaaggctgtgtctcccttccccacactgtattccaaccagacagctcccttctattttatatgttgggctagtatgaaaaacaattctgctaggnnnnnnnnntttttttagaagtttgaaagctagtgatttgacccaagttcctcattttacagctggggaaactaaggcctagagagaggcaagtgatatttgtttcatggcagggctgggctgagatcctgcttttctgggtctgtctttttgctcttttgggtctgatgcagttctcagcccaaagagtagaaatctgttgcttctggcctcagctgtgccccagcttactcagtgacctcttgcaagtcctgccctctctggtctcagtttcttcatctgaaccaggggtaccctggaacaagctgctctctgcaggatctgccacctgaaaccttgacctaagagaaaactacctgtggggtgatctgggtttgctacagaaactaacggacactggcaaggggtcagaggcattcaacccaattctacaacacaggcaggtggtcaaaaccaacctttccaaccagaatcagcctgatatggatagatgctgtcccttatggagggacacagacttcagaactgtgcccatgactgctgactgccaccaccaaggccctcaggtacacagcctgcctcctgcaggatgatgtgggcagatttcagccctagttaacagaagagtcccccaggaggtagggggcccccatcactggagacatgccagcagagcctctggccacctaaccaggaggtcttctgaaatgactatacgaggtaaagaagtagtaccagatggtcccaaagttcccctttaccctgaaagcttttctttgtccctccttagtgaatctgtgttcccagccctactctaaagtt

SEQ ID NO: 182177 - DNA, 844 bp, Homo Sapiens
  misc_feature (113)..(127): n is a, c, g, or t
ccctaaagccaactttgtacaaaaaagttggattattttgaaattgtgtatgtaaaagttatatttttacatgtagactcttgttattatgtgttttaatacattgtatcagnnnnnnnnnnnnnnnaaaaactgtggtttaaaaagaagtctcatttaaatgaaatagctacaagaatcagaattttatgttcatttctgaaaatgtaagaacaaataagatagttaccacgtggtcatcttttacaaacccataaacattttgattagctgtgtgtgtgttgaaaaactgtaaatatgttcagtagcgataaaactaaaataactttgatttgttgataagttcctaaaatgtggaggtggattaaaaccttaggagaatagcagaaatcaaacttcatgaaaagttattttggggctttcctgtgaaatgtatgaacaaagaggctcagagaaggacatggaagacaataatgtatactctctcctcctccctgaataatgaaaaccatgtgtatttgttccctccgtatgttaaagatttccttttagtggtacattctgcactcattttgtatagtctaccaaggcgggtatccctaggaacaatattatataggaagcaggtatactctgatcacattcaggataagtgtacagaagaaaatacggtgtttactctttagggaactggaaacactccctgcattgatgtacattttaagaatggcacttttgatacatgttatcataaaggtgcttaatagagctgaattaaagtttttcaaatctgtaaacaaatcgaaaaagtaaattgtagtcatttgattattttttaaattgg

SEQ ID NO: 182178 - DNA, 1546 bp, Homo Sapiens
  misc_feature (224)..(286): n is a, c, g, or t
  misc_feature (944)..(952): n is a, c, g, or t
ttggcttcggtaaattctggcagcagcccgcctgttcattgtcctgtgtgcccagaggaaagaactactcatttttcgtgatcaagctaggggaggcaggagcaataatggccctgctataggactggcttttatttgaattccaactcttctgccaccttaaccagctgtatccagattttaaaagttaatctatccgagcctcttattaaatattaggttgnnnnnnnnnnnnnnnnnnnnnnnnnnnnnnnnnnnnnnnnnnnnnnnnnnnnnnnnnnnnnnnaagtaaaagtaaggaaaagctatggggatgtattgagtatctctttgcccaatgacgtattagtcgtattaaatatggaaagtgcctttgattcgccgtgcccatgggagaaggcataggaatggccttttcccacctgtaatcagagagcaggtgtttcaagaacgcctcaatatgtttgcgatctctcacgcagcctttcaggctcctaattcctacgaagtttccgcttttattcaaattggctcactcctttttgcagggctttgtactgaatgagtattcttttaagggtggtggacaagcaaaggtttggtagcatcacatttttaatttcacagggaaaatgggtatgaaacatcttcccaagtacatcttagactgccagctgacagcaagccataatgctccccagctcttgggccctacaccccctctcccccatccccgctttagttctttgtcattgctcatggacagctggtttggggaccaggtgcagatgatgggaggtgtctgaaaaacagcaagtgagaaatgctagttttgttgttttaagttgcactgatgactccagtagttatctgtgctgcttgtgataatttataaggcaatgataacgaattaaacatacaaaagattattatcttccacaggnnnnnnnnnctgcaaacttgtgacaccatttatgatccacttagtcttgagatactgagtaatagaactttctccttttaggctgagttatgaacttcggtttggtttctttctgcaatccctgcagggccataaattcttggcccttaagactgggtggcccataacagactcagtgataccatcagtaaccacaattcacactggagtcaagttatctgattcccacaccagttggagaactggagattccttagaacttttaactgtcatgttttcaaagttgacatggaaaattttacatgaagcttaaaaatacaactaatctgtggtgatagagacgagaagagttaagctctaaaattagaagagcagttcgttttgaggcagcactgattgggagggagcatggagtatataattacacatttctatgtaatgtaaaaatgtatagattttaagatttatgcattttatgtaaattttactacaataaaacgaaaatgaaagaagacagatcatagtttaatcaaatattgtgtacaaagtaatttctgttaaacatttatatttttatgtgtatatgtatcttttacatgtatg

SEQ ID NO: 182179 - DNA, 1547 bp, Homo Sapiens
ttggattaaattaggtggcataattgatgtggtacttactcataattaatgtacatttttaattatattggattcaagtcaaagacttgggtaacaccagagctatataattgaatatagtgtaaaagaaaataaccagaaacataaagtaaaatagcaaagcacagttaactttgcagagatctgggtagactgcctgggaaaccagggacaaagaaagcccaatagacataattcacactggcaaatgtggcagctgctagtaagtgctcttactgattgcttcctgggtgccaggagtcttgtttcatttggttctcatagtatttctgtaaggtatttattagtctcagttgtattgatgaggtttaaataacttgcccaaggtgcttaactagtatgcaaagctgtatttggacctcaggactatgtgtgactgtgtggactgtatttttaaccactatcctaaacagcccaccagaggttactattcaggctagatggaggtattgagagcttagggagaagatgaaagagcttatcttgcaatcgccacgagaatgagcaagtcaagccttagactaagctttaaacctactcagcagggagaagctcaataacgaaagagagactgttagtaaaaagcataccccttactcaaaccccaatgctataggtgtagcctactgaaacttttgtgtaaattcctctttggtgatgactggctatgaatgtaaggtggcaccatttttaagaagggaagggcaataacagttcccagcaatgatgtagataggacagcaatgaggctgaattttaaaagggagaaaaggaagcaggaccgtatagaaatagtacgtattaaaatagtcagtgtattaactattctgtgcctggtctctacaatccctttattatgcatctagcatttggaaacacttctatcaggactccagatactcctcggccttaattagctcaggtagacagaatgtgggcaagtagttagggcgaggagaatgacaatgaaaataagtaaaactgttccttgagtttgctttgagagatacccagaactgacatttcagacactcgcatttttaaaaattaatgttttctcacctttgtgttctaaaagtcccttctatttattgtatctcagaatttaattcttcacttttttacatgtgtttttgtttatagcttctgctggcactataggaagggtaaacaactatttactgatggtgcttccaattttgctgttacatgactcaaacaaactgggttttatgagatctttttagaaaaatactaataaattattcattttcaaatattatctctaatagtgtgcataggatcttaatatggccacactttggttacataagtcatgattaagcagaatatacagtggccacatagtagtataataacttgatactgcttttttgtaagataataagataaaaaacaattacataatattaattattggactaaaatgacatctttttatatacattcatcatatagactttttt

SEQ ID NO: 182180 - DNA, 547 bp, Homo Sapiens
  misc_feature (205)..(286): n is a, c, g, or t
  misc_feature (291)..(329): n is a, c, g, or t
  misc_feature (402)..(422): n is a, c, g, or t
ttggcctgataccaaatcctgacagacataatgaaaactacagatcatcatctcttgtgattatagacacagaaatcctgaggaaatattttcagatcaaatccatcaacatatgtaaaggattacataccaggtacaaatgggatttaccccagtaatgcaagattgatttgacacataaaaagtaatgtaatatgtgaataannnnnnnnnnnnnnnnnnnnnnnnnnnnnnnnnnnnnnnnnnnnnnnnnnnnnnnnnnnnnnnnnnnnnnnnnnnnnnnnnnagaannnnnnnnnnnnnnnnnnnnnnnnnnnnnnnnnnnnnnntgagccactgcgtccagccggtaggtgctatttttaacatacccattttataagtgaggaaaatgaggcacgnnnnnnnnnnnnnnnnnnnnntagctaaataacctgatcccgactacctggctgatgactggtggaaccaggactcaaacacaggcattctgactctagaatcaatcaatctatctatctatttttttgaaatggagtttcatcct

SEQ ID NO: 182181 - DNA, 1131 bp, Homo Sapiens
gaataaaagcccaactcctccctcactctttgcgttcttaatatatgatggccaaccttgcttgttttaaggcgattttcttcagataaaggttaccgtgatcagtcattaaccatatccagtttctgcccacaagaataaagtccaaattccttagctgcacatttaagactactcacaatctggtcctaagctacccttccaaacttaggttcagtgattccttttgatatgtaccaaactcaacaaactatttgctattcgttgaaacaaaacaaatatgggaccggcttccaagcttttgttcatggagtccttgctgcctagaatgctcctccatccattctgtttcctttaacagcatgtattgagcaaacattctgccaggcaatatcacagacaatggaaatctattggtggccaaatacacacagttcctgaatgaagggagcttacaatttactcaacatctacaccatcctttgaggttcagcaagaattactccattctatatcagataagactgaaattccagtgtctaatgtagtgccagggccccatgaggcacacaggaataaataggagctttaaggatataaataaaatgaactttaaagataaatcatgaaataattatgttgctattaaagaaatattcagccctccattcatccagttgtctatgtcatttgtcctagacacagtgtctggcaagcagtaagccatcaatacatcttcatttaattgtaaacaggaaaggacatatttccttccttcaaggagcttaaaatcttatagaaatgtataagatgtaaacacacaggcaagaaatacatactaaagtatgtatttctacatacatatttctaagtatgtagaagtacatactaaaaagcttattggaaaaacaatgttggcaaggaaaatgacatgctgcaaagtaaaataaatgtaaactttgtttagtgactgctcctaaaaggtacatttgaaggaaggctgcttcatgattactaagggaatcgaatgcaccaaactacaggaatcaaaactaattcaaacttattttctaaatgcaatgtaatgtttgattcagttaaaagagatgatatgatttggaattgagccaa

SEQ ID NO: 182182 - DNA, 499 bp, Homo Sapiens
aggcatttttagttgtcccaaggaggggcaactcctagaatctagtgcacggaagtgaaggatgctattaaacatcctataagatacagaatagcccccaacaacaaagaattatctggcctatgatgtcaataatattgagtttgagaaactctggtcttagagaagaggacctaatcttaattctgaaagtaggtttatctgatgtgtaggtaaatctgttctttgcagtgactggtttaacaataagtgtatgattcactctaggccaatgaaacacaagaagttgctgagggcttcttaaaaggtccttccctctggtgctgccaggtgaaggtgtgagccttgacccatgtcactgccagccctgggagtaaattgaagccaagggaatggcagggaaatggaccagagccactggactcatcaatcctgaagtacatcttttggctctacttccagagctaggagtctctttcttgattaagcaggtttgaga

SEQ ID NO: 182183 - DNA, 1069 bp, Homo Sapiens
ttggctcactttaaaaaataataacaataattttttcctctgctggtttagagtgaggctggctgggggagcctgggctcctctgtcctccccgaggtggcagtggctgatgtctgctcaggtgtgagggggtgctgccatcctctgggcctgaggctgcctggcccagcccctcctaactccctggactcttccacggtgtcttcaggcccctacaccatcctttgtgtaaggggaggtggcagcatagagatgatgggggaactgccccatgtgccaaggaaagctcacccatctgtgcgaaatgctctggttgacattgggtttttgcgcaccaaactgggccatgaccaaggtttataaccaaggtgtctccgggcatgggcactttggctcttgtagaaaccaccccactggcaggagacggcggtagctgtggtcattgaaaacaagctcctgctgataaatctcagacaccagacacagaagaacctggagaccctgccagagagcttgaggcaaatggatggactgttggagcagctgagggtgaagcagcacaaactcctcaaagttgaatagcaaagcagccaccagagatggacaagaaaaatgaacaaagaaaattagcagaaatcaaaggcagatgctaaagcagtgcaaaatcattcattcaatgatagaaatgaaattgatgaaggagtctggaaaatgaatgacagaagagaattaaacagcagtgaccatagtaaggtcctgacgattctggtccactgaatcccatcatccctaagacagtaaatatcatcacagtcaccacccgcaagttaccaccacagcatttcctgtttgttccaaaatgaataaagatgattctcatcacaagggcaaatacaaagtagtttagtatgtttttaactaaacttcaggtgtttggtttactttttctaagttctcataattctgaaaatgcagttgacacttgtgtggctcatgatgtttttaatagtctaatgctacttgaattgttcaaaaaccactgtattttaaattaagatgaataaacggt

SEQ ID NO: 182184 - DNA, 1572 bp, Homo Sapiens
  misc_feature (78)..(136): n is a, c, g, or t
  misc_feature (290)..(572): n is a, c, g, or t
  misc_feature (919)..(963): n is a, c, g, or t
ttggcctgactctaatacctgagccaagaatggaagcttgtgaggagacggactctatgttgcccaggctgttatggnnnnnnnnnnnnnnnnnnnnnnnnnnnnnnnnnnnnnnnnnnnnnnnnnnnnnnnnnnntcacctaccacatccagcctacacgtatttgttaatatctaacataggactaaccagccactgccctctcttaggcccctcatttaaaaacggttatactataaaatctgcttttcacactgggtgataataacttggacaaattctatgtgtnnnnnnnnnnnnnnnnnnnnnnnnnnnnnnnnnnnnnnnnnnnnnnnnnnnnnnnnnnnnnnnnnnnnnnnnnnnnnnnnnnnnnnnnnnnnnnnnnnnnnnnnnnnnnnnnnnnnnnnnnnnnnnnnnnnnnnnnnnnnnnnnnnnnnnnnnnnnnnnnnnnnnnnnnnnnnnnnnnnnnnnnnnnnnnnnnnnnnnnnnnnnnnnnnnnnnnnnnnnnnnnnnnnnnnnnnnnnnnnnnnnnnnnnnnnnnnnnnnnnnnnnnnnnnnnnnnnnnnnnnnnaaaggtgtgagccaccatgcctggccctatgtgtgttttttaactactaaaaattatttttgtaatgattgagtcttctttatggaaacaactggcctcagcccttgcgcccttactgtgattcctggcttcattttttgctgatggttccccctcgtcccaaatctctctcccagtacaccagttgttcctcccccacctcagccctctcctgcatcctcctgtacccgcaacgaaggcctgggctttcccaccctccctccttagcaggtgccgtgctgggacaccatacgggttggtttcacctcctcagtcccttgcctaccccagtgagagtctgatcttgnnnnnnnnnnnnnnnnnnnnnnnnnnnnnnnnnnnnnnnnnnnnnaaactctagttcttgttttgtctctccgaatgaagaagtatgtactttcattaggccaagtctgcgggaaggctggggcagcagcatgaagtgtttgaggaagtgggttgggtatgtcagtttccatctcctctctgagcctgtcagggtgtttctggagtgcagagcaggagcaccctgctggagaggccaaggcatagctgtgggcaggctcgggcttcagtttttccatgcccaccatttgcccctttgtcctagggtactttgaccagcagggtatgttggtgctcatactccccaccctacatgttcccaggttctgtcccatggcacaggtgatggtctccctctcagctctgggtccatctccctggcctagttctccagcatctgctcacaggttcgagccacatcactgagcttgaggcgggcatagtccactcgcttcagagccatctgacagtccttcctcgaagagtagctggagccctcatggggctgccctgtggccacctacaagacagactatcaatggagcaccatctcctttaccctaactccaaccaggcatcaggtctcgtctcatttcttccctgagtttgaatccaa

SEQ ID NO: 182185 - DNA, 1414 bp, Homo Sapiens
  misc_feature (268)..(283): n is a, c, g, or t
ttggatttcttataagaagcatgtataatttgggcatttttaatgctaaaaaataaatggttgacacgtatatcctgtggcctgtcatatttcacaacgcaaagacacaggtagacaggagtccttgagctggtactgtgaagtgctaagacctttggcaagaggaatgtgtgttccaagtcttggcttcctctcagtgcatttctgtgttttctgtgaataaccctttttaacttccactggccttctgcctctccagtgatgagcnnnnnnnnnnnnnnnnaacctggctggagcactcttgaactgttccatcagtctgtttttttgtttccctattcccgtcttcctgtgagatctgcctcactcttggattcagtatttggctctaatttacccagtacttcagttcctaggaaccttccccttctctgacctcttccctcttttttcacattcatcatcagcactagcaaaggactttcttttcagagccatttttcacaaagaagcaaagttttatcacttcataaaagttactacatactcaactgagtgggacccaccctgctgtctggagctgcaagttctgaggggaccgccaggctcactcattcataggcagagtgagctgcctcggcctaacccccaggagtgcaatttaaagttatgccttagcaaaatgacaaattacatgtcatgggccttttggtcattcatgagtattcaaaatcaccagagctaacttatcatctgctctgaaaaccacatttatcttgtggccttacagtgtcagcactgtttttccactcttcatagcagtgtttgtcgtgagcaagccagagccttccctctgacgtgctgtacatcacacagcatgtagctgagacctgtcttcttctgcttaccactgtaaataaacaggcctttataaaaagcgattgcacatccactcaattattagcataggggagaactaagaagatgtttacttgcactttagttcatttcttttgtttgtagtgcacttacagtttgtcagttggtaatcgaagttgaaaaagctagaggtaatctctttttggagaggaataagaaaaaatcagtatctataaagaaatacctcaataactgtgaaactccccttgccttgtcttagcaagaatttcattattattgcattattcctgggagataacatacctataattttaataccagaacttttacttgtgtcatcttttaaagaaactaacatgttgccaccgttgtcagatgagttgctgtacacctcagctctatacacaaaaatgtgtaactgtacccagttcatacattaagatccagaaagatctaacgaaaagtattgtttggcagcctgacttggttcagattcaaaggtaagttttaaaaa

SEQ ID NO: 182186 - DNA, 1007 bp, Homo Sapiens
ttggctaaagtgcttttcaaaaatggagaaagttgtgcttccaaacattattgccaatgagtatttatcttgcatttttgacgacattgagtattgcttttattcttgaacattgttgcctgtcaaattaggctacatttctttaactagaaaggttctttttccaaatgcttatggcccatttgcatttttgcaaattgttggttcctgtcgcttgcctgtttttatgttgagatagtaatgtttctctgttgctttgtatgagctcattctaaattaaggctattaacacttttcatgaaatataggatacaaacttgttttaactttttcatttgattttttaacagtgttaaatttttctgagtgttaagtacagaaattgtttccctttatgatttttccattgtttttatgcttaggaaggccttgcccatctcaagataagttaactttcacttagattttaaaaatactaactgccctttgagtttaatgttttttagaactgttattcttgaatcaatatgtaatttatttgggcatatgatactgaggatagttcgatttaagatctgcccaaatagcgagttatctcgatgctgtgtcaacagggacattgtcagtttctctgagagaaatctttgtgccccgcccttctgtgggagtgccacttattgtatccacttgggcacagcatggagaatgtcttaaatgcaccagataagtctgaaacagactgttgctttgcaccattgagtcaaaaataagcctactaaattataagtgacagaatgtgaaaagcagaattgtgggaatcatatactgtgcctctaaaaaatactttatcaatgactttgtcttacagttcccagggagacaggtgatttttttgttttctgattcccatcatttatgcttcttctgaacaatttgtggtgcatctgcatcaaagttaaatcagctgctatttaccttctgcaagtgctttatataagacatggaag

SEQ ID NO: 182187 - DNA, 923 bp, Homo Sapiens
  misc_feature (605)..(625): n is a, c, g, or t
ttggggttaagagatggcactttcctttccgggcccagagctggatttctctgaggtttgaccatctcaggactcagacagactccagtgctattttctggacatttgtggtgaagcctcagccaccatgttcaaggtggtttgaatgaaaacatactcagattgtcacatttatagcagggaaataaaaactcaaattaggcatcctgcagcaggctactctgaaaataacattaggcaacatcagagcttcacttgcaaagaaatgttaaaatcattttagggaaatcagtgaagtctctttagaaacagacatcttgtgtatggcgtaacccagtcttggggccctcacggagaagagggggaagtcttttcattgattggtcaaaacaaatctctcatttgcctgatttgaagcatttcaacagtgcctggagagtacattattttcaggggaaaaaaaggagagagtcttttttatatgccagctgggatcatgggaacttcgaatgccaggaatttactactgtttctggtaattctgtgtgtagtcatttgaaatgttgaagtgtgaaaagagaagaaattgggcacttcttgcggcnnnnnnnnnnnnnnnnnnnnncggtggctttccagattttatgccagttgcaccagcatgcagaatatttgtaatgcatttcaaagtggatataatggcaccctttgtcagaatcacaaagctcactgcggcactgctacaagaggacactgaggaaaatctggccctatgaacctagtcaaccccaagcaaaaagaatgactatgtgtgtgagtgcagcacatggccagtttcgtttctcactgttttggaaagccctgtgtgccaaccaaggacgtgtctttcaaggaaaggttaattttccgaagtttattaaaat

SEQ ID NO: 182188 - DNA, 1099 bp, Homo Sapiens
  misc_feature (402)..(536): n is a, c, g, or t
  misc_feature (920)..(960): n is a, c, g, or t
  misc_feature (967)..(991): n is a, c, g, or t
cccgctcctcaccccagccactggtgtcagcagctccccatggctcgccgtctgccctgcccctcctggctggtgcccagctgcagtttcctcatgtgccgcaccacagccgtggcattgaaggcttgctggcattgaaggcattgaagggagaggggagaaaggacttttgagagagtcaagtcatggggcaggggcgcagtgggattcttgcaattgttctgttattttcattcaggagttattttattaattcccctaaagccccccaaaaacctctacaaggctttattatatatttacacacacacacgcacatatgttagatgtatgtgtatctatatatataaatagaaacataactataattcatattaatatgtaatagcaaacactatagcnnnnnnnnnnnnnnnnnnnnnnnnnnnnnnnnnnnnnnnnnnnnnnnnnnnnnnnnnnnnnnnnnnnnnnnnnnnnnnnnnnnnnnnnnnnnnnnnnnnnnnnnnnnnnnnnnnnnnnnnnnnnnnnnnnnnnnntgtgtctctattcaatatctccacctaggtgtcccacacacccctcaaattcaccatgtctaaaactaaaaccatccccccaaaacatgtttctgtccctgtgataaccatctcagtcatggtaccaccaccatccattctgttcccagccacagtcttgggccagcccttgacatctctttcccccaacatccattgcatcgtcatgtcttgtcagtttcacctcctaaatgactcctggatcaaccactgttctctgccccctgttgctgctactgtggttccaaacccttaccatctcctgcctgtatctctgccacagcctcctaatgcgtcacccagtctttactccatgccattctctgcatcctgagagctctttcnnnnnnnnnnnnnnnnnnnnnnnnnnnnnnnnnnnnnnnnncgtctcnnnnnnnnnnnnnnnnnnnnnnnnngttgttcttgactaatctcagtgcattcacactgatgataaacgatagtagcttcacaggtttgcttcttaatagggggcacaaaaggagccaacttttttgtacaaa

SEQ ID NO: 182189 - DNA, 527 bp, Homo Sapiens
ttggatttttttctaatgagaaagccaggcccccgccagcacacatgctgtttttaatgcgctgtagttcttgtgtgtctgctgtgctgtgcaaatggagattcagttcaaaataaaatcatttaaaaacctacataaaaagaactctaaacccacccctgcaacaaaagtcactacataaactgttcagcagtattcacctatcagagtatttgttgtgagtatagattatcaattgaaaacactactcttgttttcttaattgtacagttttcaatgtccctttcttaaagagacagtatatttctcttcacccctagcccatcttccctcaccctcctgaatgacatcaggaggtatatccagggtgtctccttccttcctactctcttgaccagaagttaacagactatactgtctctttaaaaataaaatttaaaaagctttgttgtcttttcagacatacatatgcatatatgttttagatgttcttataagagaaaagatggtttttaaatgtgccaagt

SEQ ID NO: 182190 - DNA, 701 bp, Homo Sapiens
gactctcaggttaaatcgtgttcgatataaaagtctatatcgatatagacttttcgatataaaagtctatctccctttgacaggtctgatcgaccctccttcctataaagacaaaagttgtcttaacatctaagaggaaccatattgcggtgaaaggggtgctacgaatcctgggttttagctcttgcactacgtctcagtgtgacattggatcccaatttcctcaccaccaaagccaacgggctattataactcccttagaagtagctttaatccctaaagacaagactaaaaatattaacagtgcttgagcctctggaaccgaaccagcactggagttttgtttggtcgtcccctctcttccccctcaagattaacgatctggagggaattctggtgagttcgagttctcgtaacttgttagggactaaccagaagcccggcgagcagccagtaacacaatctctgggtattccttcagcctcatcagtacatctcttcctacctcgccttcctccgctgcagcttctttcaagtccacatctgcgtctccgtcagtttcctctgggattccatcggtgtcggtagcccccgggtccccgggcacagcggccgtctcatccgactcccctgtctctccacctttgtcggagggcgactcgtgggcatcgtccatcacggatccaacttttttgtacaaa

SEQ ID NO: 182191 - DNA, 1255 bp, Homo Sapiens
ttggcagaggccttgcttggacagctattctcgatggaccctctggagtggacagtgggtgattcagccagaggccgcagggcctgccctgtcctggcagagccaaattggtgacagtgcccatctgctcccacaggggccctaaccacccaggatgaaaatggccagaccaagcgcaagttgcaggcaggcaagaagagtcaggacaagcagaaaaagcggcagcgagaccgcatggtggaaaggtaaccagcttccctccacccctctgcctctgcctcgctgtggggctgccgccaggagagcagggccatagctctgccagctcgccgccctctggcctcccttgggagccgccacctgctcggccgtgcatggaccctgcttcccgccaggcccagctcccaaggcctgactcatcccctgcccctctgcggccgcctggcgaccgctggcgtctgtgggccgagacctgacaccgctcggcaccgttgctcagaagctctggcgctaggtcactcggcgcacgaaccccaaggtgcactgggggcctgatgcccctgagggagggggccagctcatcagagactcaaggtccaaggcgcctgtgccgccccagctagctgccaagaggccaccgccgtgcccaggagagatggcagcacctgtgggctgtggcagcctcgggcctgccttctgccctgcccgccggccctgtcaggccgggcctgtctgcggctgagcccttcacgccccttggtcgggtctgtctgccctcagggctcccgcactggcgcttgcctcctccgcctcagactcttgctcttgctggaccttcctcagcctcgccggcgcccggcccctgggctctccagacaaagctgaccccgtggcccagataaggacgtccggcagaggtagggacccgccccgaggtctcggtggcggctggcctcctccgccccttgccacggcggcctgctccggcccaggccccagaccccgggcttctactgtggacaccaggcccagacagagcacctcgcccaggtgactccaggctgccctctggcaggccgagcgggcgccctccttccagctcagactggtctcttcttggaagaggaagatgaggcagcagtgcccaggcctgctgcctctcatccctcccgacaccacccccaagcattctgagcagaggatgggctgggcctttgagtcccccagatcccagaaggaagatgcagcacctttt

SEQ ID NO: 182192 - DNA, 1295 bp, Homo Sapiens
  misc_feature (789)..(902): n is a, c, g, or t
  misc_feature (1019)..(1035): n is a, c, g, or t
ttggctgcaaagtatattttgcagacccaggctggcttctccttctgttcatggttcacccagtgccgtgtgtgctcagtgcatcctgtgcacgggtcactgtgctgtgtgcgctggcctgggtgagcatcattcttcggggagaacctttctgaaaacaaagctgcaatccaaaaagttaaaaccatgctacttactgtactgaggtaaaaattaaaagacctaggggactcttccaaaagttaaaacgtaaataaatatcttggaacattaatatacacctgacgatgtcctgagtgaacacgccccactttaaaacaaaacaaaacattactattattctaaaatattaatttaggattgttatgcaaatatgtactatttaaatatttattgatgaataacatgcatacagcaatataggaacaaaatatttatggaatgcttgatgaattattactaaataaatacacttgtgtatgtaagaatcagatttgctcatgcccttgacactttctccttcccaaaggtaaccaagaccttaagagctaagtgtagataaactttgtcattttctacacgtgttttattacagaacattaaaaacgtatacataatacaaaaaaaagataacagaccagtcacccagatttaacagctgctagtcatgtgtcatttttgtttcacctatacttccagccattcccaccccaatttcattattttttagcctttttggataaaatgtatattcattgcaaggtacaatgtgaactgtgaatagtagannnnnnnnnnnnnnnnnnnnnnnnnnnnnnnnnnnnnnnnnnnnnnnnnnnnnnnnnnnnnnnnnnnnnnnnnnnnnnnnnnnnnnnnnnnnnnnnnnnnnnnnnnnnnnnnnncctgagaattcatacttctaagaaagtacaaatccatagggcacatgagaactgcaatgtctatctacagtaaatacagtttgataaataaaatgaaaggcaattgacctaaggtgnnnnnnnnnnnnnnnnncaatcaaagcatgggtactatgtgtcatctgtaggagcatttggttaagaataacaaacaaaccagttttattgttttaatagccgaaattggcaaaatttctagtttttctttcataggaatgctctttgcaagaaaaaattttcatatagtgagagcaaaaatggcaaccatttgcaagtaaatgtcttatgaaattaagtagcagatatcaagctcatgaccttcagatagttacccctaactcaatcacttacata

SEQ ID NO: 182193 - DNA, 957 bp, Homo Sapiens
  misc_feature (391)..(426): n is a, c, g, or t
ttggatcttccaaaacccccctttttgctaaataccttggtgtctggtggtcaccactttactctctactttaatgggattaagtttcttagaatccctgtgtaagtaaaatcatgaaaaataatctttgtgtctggctcatgtagacaaatatgatgtcctccaggttaattcatgtgattgaaaataatagaaatttcttttttaaagacgaagagtattccattgtgtatatgtaccacattgtctttatttactcataaatgttgaactgttgattgtatattttggtaattgtgaagagtgttgcaaacaacatagaagcataaatgtttcttcattctgatttcacttgttttggatatataacagtaaaattgctgtattgtgnnnnnnnnnnnnnnnnnnnnnnnnnnnnnnnnnnnncatagtgactctcctcattcacattcaaaccaacagtgtgcaagcattccttttcttcatactttgactaacactttcttttctttttaataagagtaattctaacaggagtgagttgataatctcctggtttttctttttgctttcctgattatagttgatattgagcattttttatatatcttgaccatttgtcttttcttgaaaaatatttaagccttttgctcatttttaatagttatttgtcttctgttgtatagtcatttaagttgtttatatgtttctgttattaaccctttgtcccacgtatgatttgcaaatattttctcccatttttttcagttgtctcattttgttgattgtatcagattccatgaagcagctttttaatttcaagtaatgtaacgtatctatttttcttttgatttccttggattttgaggttaaataataaaagtcacagcctagatcaatgttatgggctttcaatctatatttttatagtaatttctgagttttaagccttacatt

SEQ ID NO: 182194 - DNA, 1837 bp, Homo Sapiens
  misc_feature (419)..(483): n is a, c, g, or t
ttggctatttacacaactattcacacaagttattctctgggcctgcagcagaaacatgattaacaattttaatgcccagagtaaacaacagaaatttttcttaaattaaaggaatagtgtgaaaatgctgtaagtacagaaaatgcaacctccattccagtagaacaatttcctttgccttgtccttggctctccaaaactgttcatttattgtggtgtcttttagattttagtgccctgggacaaagatctaatttccccaccctacttttgactctatcctggactacctttcctcacctctatctctctcaaccagactaactctttattccttagacttgatgatgcatccctctttagagatccaaagacaccccaagcatccccctctctcagcaataatcacattgtatagnnnnnnnnnnnnnnnnnnnnnnnnnnnnnnnnnnnnnnnnnnnnnnnnnnnnnnnnnnnnnnnnngaattgattttgggttcccactcctgacctaaccagaatatctgagaacataggcaggaatttacatttttgacaagctcctcatgattctgatgcaccaaaaattttaatgaataatcatcttccctactagactgaacaccttgagaggaaggactgtgtcttttattgttgttatattgttaatacctggcacagtgcttggaacattagcttggctaatgtttattgaatgaatgtatgaatgaaaaaatgcattatgaaagtttcctcttgtactctcatgttcgtagtgatgtttgttacttcctgggcagaaaagcttggttactactccatttgagctgtattaattctattttgcagagatatcaaggctcctacataataaatgatcattgtcctcctcaaaaactctttggcagttatcttggggaaatgtctttggagcatatggcaccattgttttcagtaacatttcagtcttgtcaaactttgttgtttgaaggtggatttacatttcggttatagccaaaaatcactcaaagctaagcctacttaaaaaagtggggaattaaactgggtttggagtaagcaatgaagtttgactctgaagtcccaaattctgagtcaaacagtgaaaaatgacttctaagatacaacatggtgacaaagtacttagtgggggtgcgatgggccccagatatttacttcagttaacttggcttttatagaatcctggcaatgccatggaccttaagagaagtaattggctacctctagctaaacccagctggacaaagagaataggacttgtatttaacattttcaaagaaggtgactgcataagcttttgttgttgttgctctactcaacctgttctccacaactgtttctaccagaagattattttatgtctgcaatttatgcttgtttccactttttatattgtcttattgaagaaagcacaaaaataatcaaaaataaagtaaaacctgttttgagagtatgaaagaaattttaatgccacattgaggttctggctacttgtaagtaagagtaactgcatctggatgtgtttttattatacaattctatgtgtatctttagatgcagtgaaattcagattgcagcaaaatcacttatctgttcttttcggctaaaacactctaggtgaattttctaaacttccatggtttacatatttatatatgactaccaagatggagcaatccacgggatggactttttgaataaactcaaatatttgatactgcttcctccaaggaatggagagtgtcaggcaggtaggtaagaaccactccctaacacttatttctagctcttgaagcca

SEQ ID NO: 182195 - DNA, 1206 bp, Homo Sapiens
ttgggtgggagaagcagccttaggttttcattctagagatgccggctttcccacctgatcggcttagagttcacgattgactgttttgggcttcatttcaccctctacataacaagcgggtggactagatgccttagcaagggtccgtgttgtgtggtgtctccagccacgcactcagctcaatcttagcacagttaaaaaatgcctttctagcaagttatctgcccagtgcctgaaaagtatcatttcttgtgttcaataaaaagcctcctaatttaatcaaggacctatgagataactgtcttttagttgtggcattgcaaggatacaaatgcagagatattttaaagtgatccttctgtaagagtgaaccaacgatatgatctgaaagcaacttcacaggtaattcaggcttatgattttactgtgtatgtatttgggagaagaaattctgtcagctcccaaaggataaaccagcagttgctttattggtcttcagatgtggctgcaaacacttgagactgaactaagcttaaaacacggtacttagcaatcgggttgccagcaaagcactggatgcaagccttgccttccagaagcttaccagtcgggttgccagcaaagcagtggatgcaagacttgccctccaggagcttaccatcacaacgaagaagacaaataaatgcataatatatagacgacataaatccatactgtacacatttaagaataaacagtccagtagtaagaggcagtacatattcaatctgctgagaaatgtagacaataactactataagaatcctaatgctacagaagtcactggctgctgggaaaccggggaaaacttggctatggacgtgggggcttgtgtcggactctgaataaagagcagaatgattggcgtcctactgagatacatagtaaagggggcgagggcagggaggaagtggcaagaataacatttgtgaagatgtccaggtgagaaatagaggttttaatgctcaagatgtttccttttcccttttaaatctgacctgtgatttccagcattgctatttcgaatatcactgattgtttttaactttaaaggcaatgctgatgaatatatctgatccgcaccaagatccactaaagaaggagatcaaaaatttgaagataaagcagaaagggagtgggggagaaaacacgtccattgtctgaatt

SEQ ID NO: 182196 - DNA, 1665 bp, Homo Sapiens
  misc_feature (255)..(265): n is a, c, g, or t
ttgggttgaaaaccagcagaatcttgtacagtcagatggaaatctgcatgtcttagattgtggatctttaggtatctttatacagtaaaatctcactgaccactgtatatgaactagtattgttcataatacttcatcagtactcattccttgaaagaacataatcatcttcctaagtccctgagggcataaaagacatctaactgagtctccatctgcactcagtgtgggtcactaattttacacagggcttcnnnnnnnnnnnctttagtgtgacgccgtcatgaaaagtaggttggtacgtttttaatcacaaaaatagacataatatttgaaacctgtaaataaaaatattttacaattctttgaaattaaatatttcagactgctttgccagcaacatgctcaattcccgatcatcgctcaaagtggtaagtttctaaaatttagcactgtgggttttaaagaaaggtaaacatttatgtaacataaggaatagtctaattttctagcctcgttgaattaaaatacaaatgtttgagttaaaattttacacatctagaaaattgacaacttctttgtgtactatgtgatatgactgactaattttttcttctttatgaacaagacctattctctttgaaccattccctggtatctttcattctccctacgctcacagaaccaaactaagacatgggaaaaagccttgacttttgggactgcttctcttccataagaattttcagtagataaaattttaaaagtgctgcaccttccctgagtgaaaattccctaaggatgcatggttagcatttcagttctaattaaggcagactggatcctggctaactggagtcatggggtatactttcattcatgagtggaacagcagtgtcttagcagcactacatctgcaatgttcattgtgaagtggagtcaggacctcgttggaagacttcgttctgcgtcatgccaactgcattttatggtgataacattctccaaatagcacctctacaatcatttttcagtcgttacccttttaactcagcaggaaaggctattacagatacttctttaaatcagtgtttattgacagggaaaagcaccagcaatacacacttaaccaaatccttgcaaatgtcatctattaaatatcttcatccttattagtctgttttactttgaatatcttctgagtgaaattgagtgcattcccatatcttttcaccaattatatttgttttcctatgacccaatttgttcatttttctattcaatgaaccctctccccagagagttccccatgtgccaatttttctactcaattatttacctgttttgcattaaacttataatatcttttttaaaaattaaccctttatcataagtgctgcaaacacttagttgaagtttgccatatcttttgactttgtaaaaacttttggcatatgagttgtatatttcatgtagtcaaacagtaatcttttcctttatggattccaatttttaaatggtttatatttttagctaaattttcagagtgaaaagaaaaagaggaacaagaaacccctctcacgcaatcatgtacaggtaatttgacttagtttttatagctttgcatttcttcatacagagtccttatttaaaccagtctgaatg

SEQ ID NO: 182197 - DNA, 1528 bp, Homo Sapiens
ttgggagcaatctcacgtttaggataaatttagtctggcagtgcctacaaattaagtctgaggtgaactacttttgaacagttgagttagaaagtatttggtagccaccagggaaaagagatcttatttcaagaaaataattagtgaaactcagtaaagtagaagggagattagaaggaacaaagggaggcagagatgggatagagactggttgcaacttaactaaatttggaagctgggattaagcccttgatttatcttttgaaatgccatataagatagcataagatgtaccattaaattcaggaaactgggctaataatcagaaatatgtgttagaaataaagaccatggtaaaaatggaagggttgtacaagagaataaaattattcaggttttgtctgtggatttgcataatgatatttatttgctgtgtgccacatggcagaaaaggaagtgaaataacacccctctgtcccgtccttttccccagaaagaaatcactggcttcatttgttggtttgtttagctggcagcttgagttggtagaacagacgagtagattgtctagctttagacgtaggtattagtgtactgtttcttgatcattgatgtttgagacctggaatttgtagcattattgatttgacctctgttttaaattttagcggcttccacaaagactgagttagtaaggaatacaactatgtaagtaatatgttttactagctaatttgtctaggcaattatttttaccctgtattcattccttcttaatcaagagtaaggcaggtattctttgctttgggaaattcttctttctgtcctcccttccctcactttttccaaattctgggcacaacagcagctctctctcttctgtggcaggtgtgcatcctattggctggctggtatttcttgttttttttcccccttattctttttaaatgggggtgggggtataaaaatatgtgtatggggtacatgcaataatgttgtaatgtttcttgttgtttaatggataattaattgcaaaataattgttttaattataacatgtttgagtaaatgctaaattagtatttttttctaatataataatgaatttgaaatctagcattcctgtaacaatgtgtctatgtttgtctgtctgtgtctgtctaatagtaattaatatctgtggtccgtacctggaagaggaagtacagctttaaaggaataacaaaagactttgtgtcttagacccttcgcaggtgttacagtcgggtgaaagaacatggtgttgggaaaagaaagagcagttacacatttgaacagttggaacaggtgtttggtcagggaggatgggatgctcagccctgccagcctgtacttattaacagtagtggcttgtaccaggagctggagtcagatggcagcactatggaggactattcacaggaggactggggaaaccacagtcagatctccatggctatccaacagatcagaattggatgaaatacctgtcacaaagagaacattaaaa

SEQ ID NO: 182198 - DNA, 1015 bp, Homo Sapiens
taaagagtcaatgaataaaattatttctctaatcctaggcatttaaggtatactttactacttccaaaccaataaagagttaaatctttcagaggatggtttaccatcctcccaagttatggcttgtctaaattaggattcaatcaaatgtttttaatgttgaaaaatattctgtgctatttgagtactgttacaaaacattccccatttctttaaaaagttaaaaataataagcattttttctactctgaaatcagtggttaacacaatatcgctgaaccacaaatttaaataacaatcagatttaaggtcttcaataagcattttaggaattacatactttaataaacttttattctaggtaattttaatctggttttcagtataagtcaactcacatgcacttccattcacattcaatgacttaagaatccagaaactggaggcacaaaaccagagaaattacagataataggagttttaataaaaacaatcaaagaacagggatagtaaaaggcaattttgatgtagcttaaaatgtttttgcatgaatagcatactcaggaatcttagaaacattaagaagctcaccattaagaagtcagctgcctctactgactttaagtccaatgtaaagaaagaggatagaaacctcaaaattcaaaacctgaggcaatcgtcctaacgcaaatgagcaaactgatttagttgacaaaaatcccaatgaggaaacatgaactagttcagcactccccatttaagcccattccttaaatgccactgtttgggcctggctctgaaggctgggggtagaaaagcatgtttctttgagagacgattccacactcccaaaatatttgggttgagaaagcttttattttctattcctctcaaaagtgcctttgcttgatttatttcccttacatactaaattatctactatcaggtacggccaaagaataataaatgaaatgttgattccattcagcaagtatttcttaaatatctaccccaa

SEQ ID NO: 182199 - DNA, 1139 bp, Homo Sapiens
gagcacttccacttctggaagcagaacgggattcctacacgtagatgttaaaagtttaatttgcacactttctgggcaactttaaaaacaaataagctgctgtgagataaatggtgagggacagcaatccccttccaagataagaaaatataggtaagggcaggaactgaatatacctggtgttaatagtttcattgctccaaatgacataagtcaattaacttgtcctttcttccacctttttggagcagggataagagttatttgaccccacttccttcagaaaggggtgccaaagtcaagcagttaagggaactgtccaaggactgtgtttcagaatgttactccataaagactagggtgaggcggaaccttattaactatgacacctatactttatacctatttcaatcaagttgcaatcaataaaacaaaatcctatataatttatataatttacttaaaaaaatgcttgatttttaaaaagaccttgacctttcaagttactacttataattcagtgataagagataaagatgatgatctcagtttcaaatcctagagaaaagcagaaacctagtggaaagcaaaggctagcttgaaggacactaaaccctgtaaaaccctattgcatctaaccatggtgggaggccccctaaaaaactgaaagcaaccagatggagctacaacagaacagcgaactacacacaaataagagtagagagggtgtcagagatcctccacagcttctccagctaaatggagatgagccagggcaaacttatggaaaaccaggaattaacctaacttacctagttacttaagtacacatcaaaaccaggcagctaaatcaggagctcctaacctagggcccaggaagcaaaagagtacagaaactacatacaaaagccaaagtttaggtaaacattgtgtactcatagctttcccaaccaaaactgggattggctggcaggttaaggggggatttgtaatgaaaaatagcaaaggaatggtaaccaggataactaggtcaccaacgagctaaagacacataatcaacaaaagggtatactaagtaatgaaaccaaggaaaagttctgccaaggcaccaaaacagtagatgaggaaaggacagccaa

SEQ ID NO: 182200 - DNA, 868 bp, Homo Sapiens
ttgggtggatggatgtgtgttgagagagagaatggatgtgtgtgtgtttacgaataaacttggaggggagggggcaacaggggtgggttttcgggctgagaaatgggaacactgtggggctgctgcaagcaggacttgggccttaaacattccaggagagtgttctcgggagtagccccgggaaggactttaacagaggttgggaattacatctctggcacagttttgcaagcagagggggagcttagttaaaggagcaaagaatgcaagtggaagatgccagcatctcggtctggaaaggatttattaactagttgaagagggctggtggattaaaacactcagcaccctaagaagcttgggagattcgattattatgttgcgctttagacaggagggcaggagaaagggcgttcttttctcgatttcttagaagagtctccggttacttttctgtggtgagaacgggttaacacagaaatctgcctcctgggccatgccgcttctaaggcctgtttcttctcatgagccccagactcctccccgtcagggtcagctcagccatggactttggacctggataagaagagagaagctgcactttggtggatctgatttgggattctcagttttgaaaatggagtgctgaatggggatttgatgatctcctggagagcaactgagacaagagaagaaaggtgcatggctgcctcctaatcccatagtccagaggaggcatccctaggactgcgggcaagggagccgggcaagcccagggcagccttgaaccgtcccctggcctgccctccccggtgggggccaggatgctgaagaagcagtctgcagggcttgtgctgtggggcgctat

SEQ ID NO: 182201 - DNA, 924 bp, Homo Sapiens
  misc_feature (605)..(653): n is a, c, g, or t
gtaatatgtactcagatttaaaagccagggcttctctttccctacataatgcccttgggcagtgtcacccgtggctgcagctgaacgccatgatgactgaccttgaccggcaagcatccctatgtctgtttccctatttcctgccttctttgtctccagacaggtcgccctgcctttagccctcctctgcattgtggtcagagtgatccttctaacatgcagttctggtgatgtcaccttcctgattaaaattctccgatggctccctcggcaatcaaatgtgggctcctggttccttgccttggcagcggcacgtcctgttgctctcccctgcccgtcttcaccctggctgtgctcagctcattgtcgttctccagagatcctgtacgctcttatgtccctgcaccaggaactgactgttctgtctggaaaatgccctcttgtctttcagatgtgtctgccgggtaaactgttattcatccttcaggacttggctcacatgttccctgattgacacagacatgggatcatcttcttcccagcttccagggccccttgtggattagagctggtgtcacgttgttttataatggtctcgtcccaannnnnnnnnnnnnnnnnnnnnnnnnnnnnnnnnnnnnnnnnnnnnnnnntctcaacttgacatttctagcccagctcagcacctggactcactatccacactgtaataccacaaaggcagagaacatattcaccactgctattgccattgcctggcatagggcctggcctgtggagcattcatttcatatttgttgaaagcattaattatgggtgtttttaaatatcatactgtaatggtttagctcagaattgcaacctgaagggcatcatcaagccatagccgtcttttgtatggcctcatagtattttaagtttttt

SEQ ID NO: 182202 - DNA, 1372 bp, Homo Sapiens
  misc_feature (177)..(424): n is a, c, g, or t
  misc_feature (434)..(474): n is a, c, g, or t
  misc_feature (653)..(780): n is a, c, g, or t
  misc_feature (864)..(971): n is a, c, g, or t
  misc_feature (980)..(1025): n is a, c, g, or t
agcaatgcttttttataatgccaactttgtacaaaaaagttgggtctcttctgcatgttgcagacaaaaagtgggtaagctgacactgaaactaataattaggcaatgtcaagcaaatacaaattcaggttgacagtctgcaaagtaacatccatgtactcttcaacaatggatcgnnnnnnnnnnnnnnnnnnnnnnnnnnnnnnnnnnnnnnnnnnnnnnnnnnnnnnnnnnnnnnnnnnnnnnnnnnnnnnnnnnnnnnnnnnnnnnnnnnnnnnnnnnnnnnnnnnnnnnnnnnnnnnnnnnnnnnnnnnnnnnnnnnnnnnnnnnnnnnnnnnnnnnnnnnnnnnnnnnnnnnnnnnnnnnnnnnnnnnnnnnnnnnnnnnnnnnnnnnnnnnnnnnnnnnnnnnnnnnnnnnnnnnnnttcctgtttnnnnnnnnnnnnnnnnnnnnnnnnnnnnnnnnnnnnnnnnntagatagaatagtgacaataaaaatggagaaaaagtaggctgactcaggaaatgcttagaaagtacagccatacctcaaagatattgtagatttgattcgagaccaccacaataaagcagatattgctacaaagtgagtcacacaaattgttttgtttccttgtgaatatgaagttatnnnnnnnnnnnnnnnnnnnnnnnnnnnnnnnnnnnnnnnnnnnnnnnnnnnnnnnnnnnnnnnnnnnnnnnnnnnnnnnnnnnnnnnnnnnnnnnnnnnnnnnnnnnnnnnnnnnnnnnnnnnnnnnnaaagaagctatgtttacactacactatagtctatttaaagtgtgaaatggcgttatgtccttaattttaaaactcttgatgctnnnnnnnnnnnnnnnnnnnnnnnnnnnnnnnnnnnnnnnnnnnnnnnnnnnnnnnnnnnnnnnnnnnnnnnnnnnnnnnnnnnnnnnnnnnnnnnnnnnnnnnnnnnnatgtctttnnnnnnnnnnnnnnnnnnnnnnnnnnnnnnnnnnnnnnnnnnnnnnctacttgctgcccttacttgaagctctattatttaaaacaaagaaaaaatagaaaaatcttttattgctgaaaatgctaatgatcacctgagccttcagggagtcttagtctttttgctggtgaagggtcttgccttgatgttgttggctgctgcctgataagggcgatggttgctgaatattgaagtggttgtcacaatttcttaaaagaaaacaatgaaatttgccacattaactgactcttccttccacgaaagatttcagtgtaccatgcgatactgtttgataagcattttacccatagtagaacttctttcaaattggagtcagtcttctcacaccctgcc

SEQ ID NO: 182203 - DNA, 1412 bp, Homo Sapiens
ttggcccctcccaaggggcaattctgaaccccatctttggcaggcatacatatttcactgtttccaaagctatctactctgccaaacaacacccagtcctattccaaactctcaacgattctatcttgttcctgtttttctatgtatttatggttgccgtttgtgtctgatttgattttactgttttttccctgattttatggagtagcattgtgacctgttttcctttgtcttatataactttagtaaactaaccactgtcaatgattgagggcaggtggcacgtggggaagaggggacttggcacgcagtggctacctgggcatttgtggtcatttcagtttccatctccccagcgggggctccctgggtgaaaggccacagtattttgggttggtaggcaaattgcaacattctggacatggcctgaggaaggcctcttcttataagattctcagaccaaattctagaccaaagacacaggcagaccaagtccccaggccccgcctggaaggaagtcgttcctcaactctccccaaggcacctgtctccaatcagagccctctcgcccagccagccctggctctgtgtgcagagcatagctctgcgagtacctgtgtaataatgctcaaccttcatgtctccgtataaacgaaactttccatgagagctcatgactctggtccacctgtctatagagaatgggcaaagtccttcacctgctttctgcttgggatgggtcagaaatgctgatgcccgcacatagcccagccagccagatctggaaaggaagcgagggggttgtttaaatcaattttttaagatgaagaagtgggagacactgcgttgagatgggccatgctagggccacagagatttcctgacggtcagggagagaagggcctccagggtcccctaacccaacgcccttgttgtaaatgaggtaactgaggctcagggaggcactgtgagccaggaatggattttcttgaaacagctctagctgcaggttctccgaggtaggtgcagggaatggtgagtgtctaaccagggctacatccagcaacatcctcaaggtcttcctgacaaccaaagacaagcctttatggaaaaggaaatgcgctcccctccatgttcagggatgaggggagcagcagcagccacactcccaccatcctcacagaattcctggacccatgcggtggctccgtgagctgggtgactccagcctcacctgcacaccccagctctgcacggggccctccttcctcccagcagcccttggtgagctaggaattgagatccctgtttgtgaaagagggaactgaggtgcagagaagccagaggtgtgccagatccttcgcaggatttagatgaagtcgccctggctccagactgaccccgaggctctg

SEQ ID NO: 182204 - DNA, 1452 bp, Homo Sapiens
  misc_feature (179)..(190): n is a, c, g, or t
ttggctcatatttctctatgaataccttcatacagcaggtataactcttttctttatgggcttaaatattttgtcactgatcctgcaaatggacatcattttagcacactagcggtttatattttaaggaccttcattctctgttctgcacctcttctggaaattgagtaaattttgcnnnnnnnnnnnnactcagttgcaacttacgcttggcatcttcagaatgcttttctagcattaagagatgtaaatgataaaggaattattgtatgaaatattacaaagcgtagactatgcattgttattcattataatattttttgctatcataatcgcctcataaagacaggtttcaaccattaaaatatgttcttccttaaattcctgtgctttttctagttcctgttgtgtcataaaatgtttatcctaattttctctctgaagtatattttatctgaatccacatttctttataaatccatagtccttgctgaaatatgctttctaaatttctaccactttgttctaggctaattttttaagctaattggatgaagaacaaaaagacatttggtttcatcctttacagcagtaggacaattgcaaaggtttttcctttttcataaggagacacattaataggtaactctgtttcttgagcaggggttcacttattctgagagcattagttctcctaaaaagctccagcatagaaagggaagataaaccaaattctagcttgtgttttacccacagaaggatacaggacaaaggaatagtaactggcctgtttggatactaaaatcgaaaataacttttagcctcctccttatgatagccgccagagtaaatgttgagcattactacagaaaagccacaaaccaagaatctacctgtttggaaagatcttttgcatctctgaaggtgcttaaagcatacttagtgcctttccttttaactgggaagataaaagaagtatctgtccaagatattaatatgtaagataacattgtagacatgttcttctgataatacaaggtttattctatttgcattaggatatttgtggacatgtccatctaatataaaggaaagttttttaatcattgaggcatgtagggctgagttatataatgtagaaacttctaaagataattggatgagaatatacatattgacctgtatattatgactaatcatgactcagatcttaatacagggatgatctcatagcatttagatatcagaaaaggttttgacctatatgtctttaatattgtttgaatacatgtataatctttatcattcctcagtgtttcatttctcaaattctgtaaaaggaatataagaggaaagacaattcatatacaaagacaacgagattaaaaatatgcagtacgaaaaataattacttaaggggagattttttttacatgaaatctgggctttgga

SEQ ID NO: 182205 - DNA, 1075 bp, Homo Sapiens
gtatatgatcaagtttaaaaataatataaacttcatagaactatttcagactatggggagggcaagcaagactaacacacaaaaacatatgtgtacacatgaggaaaaaggatcactaaatacataaaatgttaatgtgctcatccctgtaaatagaaatatggtaatttaaattttatttttacttatctgttttctctaaatggtttttgaggagaatacattaaaagccctttttttcctcaaataaacaaaatcctcctacaggataaaaatatctaaatgcatcttgaaatgttaacgttacaggcaactaggaggattaattgaaagtattaatctgcatgtaacaccataatatacacacaaatatgtaccatggtcctaactgggggagcaagtccccgtggttgtgattcccgagcaaatatttgtctgttttagtggcacagtcgagctgactgctgttcggaaaagggcaagctatcttgggaactaaacatataaggtgagagtagccagtgccgcagctgttggcaaggtttttgttgataataacagaagtacatcccttagaattggctattttgaaggcttaaaatagaatggaagcgacttcacctacccaataattaaataaaattttagaaaagactaaatatgaaatgagcaagattttctataaaatatcatttaaaaaaaactttccaaatagcatttatctatttatgggttgctctttattcttccattttctctaccctctagcttcatgacttaatttcaaaccagcaacatatagcacccagacaagtcacacttctttattcacagacagaagtaatcatgaagtatcacaagggatttgcaatcaccaaagaagatgcagataaaataaaccactcttaagctatggaaattcctattaaggaattttattagattaataagaaaaatccttatacctattaatatagtcattttacaaggatatttttcaaatgtcatttgatattacttttgttaacactttcaatgacaattctgatgagctctaattttggatcttttccaa

SEQ ID NO: 182206 - DNA, 1284 bp, Homo Sapiens
  misc_feature (722)..(779): n is a, c, g, or t
ttgggtttctctgaattttctgtctcacctcctcacccctacccttgccttttgtctgggctcggttgcctgttcatgttctttgcctctgacattaaactctccctagttgcctgtgtgcttgagacgtcttaacaagttgtcctctaagtggtgccattgatgtacagtcccattggagagcacgagtatgtttccttaggctcttacaacactggctttatcaaacattttgatctttgctgagctgatggttggaagtctgacttgcgtttcttgagaaaggctgagcatgttttcatttgcgtaaaccattttcaggtcctttcctgggagccatctgttcatgtcttctgtaaccacttttgagttttctatctgaatttcacagaaacgagatagatgtagggtgggagcagtaggaaggaaaggcggaccaaggggtgttagagattccatgtcaggccctttggttgcaagtaacaataactcactcagagtattttagttcacaaagggtttggccttcttcaggggcaagaagagagcattgaagaccagaaggttacgggagggagggctgtcttgctggtgtcctagagttggcatgttcagggtaggaatatgggaatgcctgcatccattcaccaaagagtgccagccctggggccaggcatggttccaaacttggggatgtaggggtgagccggccaaggcacagnnnnnnnnnnnnnnnnnnnnnnnnnnnnnnnnnnnnnnnnnnnnnnnnnnnnnnnnnncatccataccctctgtgctcaccctccgcatctgcacctccccctttgcccaccctccccatctgtacctcccgctgtgcctaccctccccagccctcccctctgcagccctccccacctttcacggagctcttgtgcatttgtcactggtgagcagaactggcatgtctccagggatggaatcacaaagtaactatttttgtctttggctgtttaagacataattcaatcggagaccttctcctacccctggtgaaaactcaactcagggcgacccatcacctttttgagcactctggggtaatagactttatagtcctcttaggttgccaaatgctttcctaactcagaaattggaatatcccatctgtgtgagagtgaaaagctgtgacagttgctcactgccctgtttggccctccagagttagaacaggaggagggagccaagacagggagggagcagagatctcagctctccataagaattgtcctgtcggctgccctt

SEQ ID NO: 182207 - DNA, 1866 bp, Homo Sapiens
  misc_feature (899)..(910): n is a, c, g, or t
  misc_feature (1344)..(1401): n is a, c, g, or t
ttcccaaatcttaatgtctgtttcagaattttagtgattttaaagtgatagtagaaaataccaagcatatgaggtatttcaatatgataggcttcttacattttaatagttactcatctttgttccaggacccttgactgatgctagggaaaggataaagcatagaataccagccagtttggctctgattttgagttatttataataaagtttggggattatcataacatctcatatctttgtgtatgttgttttaatgctcggcagagcacaacactgatgataactattaaaaatagaaaataacagccattttactttcaaatctgatgtgatgcaatctgtgaacactaggaggggataaaataagcattgcagggaaacttatttgtaaatagcttcctcacctaaactttgacttggcaatcaatactttctactttgggaggggattaagaatagaatgggcaggatgagaccatgaaaattataatgattcatgtatatttgtatgatgcttgtaactttgcaaagtcttttttattcattgtctcatttggtcagaacaattttattgaggacatgaatttaacaattagaatttagattttctgactgtagctactaaatgttgtagctactagaccaggtgagctaggtttagagcaaagtatataagccttgtatggactatattagaattttaaaaattgtaattaattccttatcatcattataaaaagcttgatttttttatttgatctaaaaaagcattattccaaagaattttttcaagtagaaatgggagttagttataccagtgttgtttttaactaataaggctattttagaattcagccttgcctgtaaggtctttgagaagggagaggagtaggccnnnnnnnnnnnngtcttgattcctgaatgtgccttatatgctgtgccactcacaccgaggccatcatctcaacgttagagttgtgctagattactgcttgactgactagctaggttaggcctaagagtgtttaccgaataatctgcactcactcagtagcccttcttcaggattaaaaacgatgatgacctcatcttagagccctaaagggaaatgcttatgtgggaacaagaaaagtcggtggtactgtcttctgctactactacttagtgctttgctgtgtatagggtgtgttcacatatatctcagttgaatgtcacaagaatccctgaagtgattaaaagtcttgagaggtcaggcaatttttgtaaggctagaaggaaaagtgaggttttagacttcatttcttttaaagttggcaaacaaacattttctgtaatggacannnnnnnnnnnnnnnnnnnnnnnnnnnnnnnnnnnnnnnnnnnnnnnnnnnnnnnnnnagtaaattatttcaggctttgcaggctataaagtgctgcagctccttagctttgctgttgttatagtgtagctggagccatagacagttagttagttagttatgagtgagcacagctgggtgccagtacaattttaatgatcaagactcgtggcaggcagaacaaaccatcatttgttgatcctctgcttgaaagcacgaataagtgagaacagagcagtcatatggtttcagaaagtgttattctgggatttcaggataaattttgtaaaactactaacaaacaacacacaggaaactaatttggtataagaaacgacatatccctaaatagtgcttatttaacttcatttataaatacatctacttaacaaaaaatatattttgtgatcttgaggtcacttcgtttaggtcattatctcaacccaacctccccaaactctggtttgagccaatatgtgttcta

SEQ ID NO: 182208 - DNA, 1152 bp, Homo Sapiens
  misc_feature (369)..(413): n is a, c, g, or t
ttggagtgtctcttagttcactggtatcagcaatttctgaagcatcttttaagctaccgcttgatttcctcatcacaaaatttagtctctcttcccatgagatcaaagttagaaaaagtgcctatattgttagcagttgaaaataaaatgtagacttaaaaatttcaaccaactttgagaaactatagacagagtttttatatagaaggaccccaaaacaacaaattttgtccaggatcgctcagtacaaatgctaacctgaaacttgtatttcagaacttccattctcctaaagggcagagtcactggaccagtatgtgttatatgtattttgggtctttacatttactctttagttccatcttaatnnnnnnnnnnnnnnnnnnnnnnnnnnnnnnnnnnnnnnnnnnnnntttatttaaaaccttaacattttaatagttacttctaaagtgtgtcaacttaatctcactctgagtgtgacagggagttagtgcctatgtgaatatattttttcatcagattcagtttttgctattgagggaaaattatctttccatctcatgtagtgcaaacttaaatcttaaatcatttaaatatgttttatttttccaaagcttacatttctgcattacaaatggtgtccattgattggaagtcaagctcactagcattcactgcatgagctatgcatgagcatgttaaggccaccatgttctgcctggcaaaataaatactttgtcattttcctaagtgttggataattccctgacctttaaaaaggactttggagaacagattttcctctaaataatgtattaatagaccaacaagtaatttttttaaaataataatcatgaagtttaacatacttcaagctatctttacaactctgaaggttatctttgggtttctgttattcccatagaataagttgaaccaaaatttgtaattgtcttgctgtcactcaaaagaaatagatatgttttgtaattgtttgcattgaggaatcagaggaaggatttgcagatcaaatctgactaattttcaaattttgtcaaattccttatcttgttcttttaatcataggcttatggtatgatttggccctgcatgagagttcactgatataactcaaacacatgtttttta

SEQ ID NO: 182209 - DNA, 1196 bp, Homo Sapiens
  misc_feature (876)..(905): n is a, c, g, or t
  misc_feature (927)..(949): n is a, c, g, or t
ttgttatttatacatgttaaactgggggattcaaaacaacactatccgatttccctcttatgttctctgaatttaccagattgcagtaaaactgatagggttaaagttaaaattgctgagaggggttagatctgtaaggtacctcaattaactgtgtcttttaatatataaaaatgtaaaaagtgagtgggtttagaatagaagaaaaatgtacaagtacatatcttctaaagaaaatagggttttaaaacatcaaactcaaattttagttaaagagcttacagtttaacaaaagacttagaatgaatcctggaacacagactaagattaggtgctttgaaatttctgaaagataatatacattcatttttactgatttttaaaaactgttttcccctatagttttagaaatagctttgaaatcaaacctaataattttaagacttttggtactcatggttttatgatatatattccttttatactgatcatcaggtttgggctaagtcataaaagtacaagctttactcataaggaactcaaactttttttcatattacttggttatcttttgaaatacccataatcccttcacttgaatcttaaatcttgtattaatggaacacgatatgcatatttgatttatctatcagttgtatattctaaaagttacatatctacaacgtgagtacaaaatattatcaatggaatatttttacaaatccataaggtttgcgtagaaacaagttctaaagaaaacaaaacaaagtcgcattctgcttattttccttctttgtttaaaatatcactgcatcagaatttttaaaggttcattaacaagtattaatcaaactctctctagctagcagttaatgnnnnnnnnnnnnnnnnnnnnnnnnnnnnnntgacggagtgagactccatctnnnnnnnnnnnnnnnnnnnnnnnccccaaagatttccattattttctttgcactgtttaatgtccataatcttgtccccccagattggctgttgtggccttagaaacttcttataaagactataaaatgtctgggaggcacttctccacttccgggggtaactggaagcaaggctagcaggcacaaataatctcaaattgttgttaaagcctggcacaaaatgtatttcttgtaaactgtatttatggtgatttgggaacgtaattactc

SEQ ID NO: 182210 - DNA, 698 bp, Homo Sapiens
agccccaggagccacagccccagatgaagctggcatccctgggcccaattcctgctgccacagttccactattgccagcccccagaccttgaagatcctccaccgccgacaaggctgctaccaactgccatccttgcagagggggctcctgcaaatcttttaccttgtacttgaagcaggggccagggaagaggactctggaaaggacatgtgggcctgagacaccttaaaaacaggaaaagccctgaggagcacgaaggggaaacttttttacctgtacccttttggggacttttggttaaaactgagaattacattgacatagatcaataggagaaatgcatacgaatttgtttaatataagttttgtgtggcataggagactttacaaggaaatgaagacccaaagatgcaattagagatgaacatgtatatactgatttagacaaagagaagtactttatgaaaatgtgacaaggaaaaggggcttgctagttaattggtgaagaagtggtgaagaggataaggattagtctaacaagtttgtttgtaatatttccctcagactcttcccctccttgatgatgataatatttccttctggtagagagagaacatcttttgcatgggaattttatctgctgcttttaaaaacagaaggaagggtagagtgatcttcttgcacctgctgtttttta

SEQ ID NO: 182211 - DNA, 162 bp, Homo Sapiens
ttgggtcactgtgtctgtgatggataagcagatacagaaattctcaagacttccataataatgaatgttgtgtagctaagctttggtcagaggaaataatctaaaggttttgtgaattcatgtaaccttttgggctgctcaccttaaggtaactcctgccaa

SEQ ID NO: 182212 - DNA, 1032 bp, Homo Sapiens
  misc_feature (504)..(519): n is a, c, g, or t
acactcagaagcccaataacttacctaagatcttacaattagtacatggttgaactgggattttaactcaggtctttctcattttgaaattcaaactcttaatacgactactctaatactgagcggggaaagtggggtagggagatatataaaagtttgccactactttccaggccagaagtaatagcatgttcctacttagaaaatgtgacctccagccatgtttccagccaattatgacttctctggcattaaagacactgatcacgacactctcagacgaaggaaatctctaaaatatgtcacagaaaattttcaataagttatagtgacacatgtatccagtgaatgaaatataaaatactaacttttgtaaatgtagctgaggttacttttccttgtgagtctaattactgctggcacataaaatgaagctatttgcaaattcatatctcttaatttggcacaaggcagtaacttaaagaaaaaaactataggtaggcnnnnnnnnnnnnnnnntcactgcttacagcagcacacaggaccaaagagtgatgcaattttcactacatgtcttctcaagttggagaattcattagcacctgtatagtacttgggtaatttcagacaaagcaagttgcatatttaaccataagttcatcttgctttgtagttctctggcttcatattagaagtttaagtataccaattacttcatcattaaatacagatataaaataaccatttcaagttatttttcttttaagttttgatcaatcatagcattttctaagtaatacattcttttctaagtatacattcttaagagtatattctactattgaaattggttttagccactaaaattagaaaatataccataatgctctttccttttctattctaaataaattttaatttacaatttctttttacaaaaataaacaaaatgtatttatttaatatacatcacaagagctcaatcagagacttaattttaaaaacagaaatgggcaaaatgtcatggctcat

SEQ ID NO: 182213 - DNA, 1112 bp, Homo Sapiens
ttgggttagatactaaagaaggcttccccacaacccatatgcatctgctttgactggtggtttctatcatcctacaaagactgtgacttattggtgagggcagctggacaactctgagagcaacttagagaaatccatcttgggcacactctataaaggagctccttctctgcaaatagcaccccagataagtgcacaaaagcaagataccctcgtggacctacacgtcctcccgcttttcaacaccctgatgcctgaagctatggttgatactaaaggaggttttcccactatccgtatgcatcttctctgttttgagattgcaactatggacagttatggctaatcctagtagattgtcttcccttttaacatcttggatgaatttgggtcacactaattgttatgtgaagatggatgttgaattgtgtagaatttgacagcagtatcaagagctgaggagaaggagaagatggaaaggagtctagcaacttaaaaatctcacagcattctctgtgaggtgaccttttttcctgttggtggctcaatttctttaggacataaagaagatactgaggcctgtgacagcctgtgacagtatcatcaagtcgtatctgaacttattgaactgtttcctccccttccttattctttattcacagtttgcttttcatgtgcataagttgactcatttgtttcctgttagcatttgaaacaccatatagccaccataagtcctgacaaaatgacttttaataaggagggggaaggtccatgtcccaccttcctatgaaattttggcctattcacaagtctacccccacataagagaagtagttatgttctgtaaagaagaggttgataaaaacctttagcatggtgttttgtgacttagaagttttaagtagtcgttcttatatctaagcatttattaattttggtaagaacattactatacgtttctgatgtcacttttactgttaagaggtgccaggcatctggtgacctgtcacttcacgatttgtgtgaaatcacacctatctaaatataatataaattaaagactgggtacttgtatttcctgactaaaaccaaagtaacgcctgttttta

SEQ ID NO: 182214 - DNA, 1154 bp, Homo Sapiens
  misc_feature (165)..(174): n is a, c, g, or t
  misc_feature (591)..(652): n is a, c, g, or t
tttaaattgcttaaagcatgtggcaccacgatgtatctttcatgcagaaaaaaggagaactatatttctggaaataaaacccaatagcacatagtcagagtaaagcattttcagatgaaaaggtgaacaacctagtggtttgggctcatggccctttacccaccnnnnnnnnnngagatggaatttcgctcttgttgcccaggctccatctcgaggggaaaaaaaatattatgcaaacatcaggtttttctcttcttagtaaccatgtttggcttgagtggaaatttaatcaaacactgttatcaactgggaatttgagggcagggaggcacattgctgagggtcattcaaatggcatggtgcaggctcctgatacatagtgtgggtctttgggaaatgcatattagttttcatcagtgcttggggaccattgctttgggtgcatgaatatgggaacccatttgggaaaacggttcttagaagtccagtcatcagcttcaccaaagccagcccatatgcagaatacagatgatctctttgatgtagccaacaacttagaaacacgtaaaatagttctcaatttctaatcannnnnnnnnnnnnnnnnnnnnnnnnnnnnnnnnnnnnnnnnnnnnnnnnnnnnnnnnnnnnnctaccttgttttcaaggactgactctggcattatttttcaaatatggcagagtactgttaacaactgtaaaatttgctaatggaaggagttatcctctttatcctgctaaaatggtagaaaccacatagctttttcttcccagcacttctttaaagaattaaattgaaggacgccaaacttgtggccattgtctgtagtttctcgggcggtgggtgtcgctgaggggtggaggaccgccatgttggtcgctcctttcccgccctcctccaaggcccaccttgatcataaggcacaaggtatacaaacaccacaactgctctcaccacaggaaataagcacgtggaggacacagactgacagcggggaagaggaaggcagcctagtaggcacctggggcccgtaagcgctgctgtgtgcctaggcagcaccgccctacccactgagggccaggcacgcaggtcctagtgccactgtgcgtgtgctaggtagagccagcaccaa

SEQ ID NO: 182215 - DNA, 608 bp, Homo Sapiens
tgaaccacttttattttattccttctcttccctaaaaaaaattgaggataagctctgccttttttcatcaaccataataagtatggtatccattcactacttgactgctggagagctcaggacatttggacagaatgcttcaaactggggccaaagtagcctgtctcctcagagagctgacttctgggcatacgcatctctgtagtgggaggccacatgaaagtgaacctaactcatgtacagaggtcatcgccatgtcacttcctagtaaatgctcaataaacttgtaaaccaccccctctctttagagccctacagttttgttcttattgtggtggtggaggtggggagttggttaggtggtcttatcgtcaccctgcagccccactttctcatcctgacaaccctctttcccacaccgggtcatacagagggacttttgatgcttccagctagatggcaggggcatcctgtggcatcctgctgtgcagggccttgatcatcagaaagggactggctggcaacccctagccactcctgtcgctctggccagtagtagattctgcttatcaaaattaacttgagaagttgaactgcttctgtgccaa

SEQ ID NO: 182216 - DNA, 1194 bp, Homo Sapiens
ttgggaacttattttccaagccaggaattgaaccctgaacctgggccaccattgtgaaaagagaaagcatggccacatggttacaaggtcaagctcccaagaacatagaagacaagaaggaaacctcatccagttttttgagggacctgcagcaaagtttgtaattgaccagtttgctgagctgtcttgaaaagcaggcttaaaggtgtcctaagtccgtgctctatcctaaggtactcctctttatgacagagcaatacagaaagacacagaaagcacaccagacctggttggctacagcttaagactagcctcacaaatcctttattccattaatcaaaactttacaggagataaacaattattttttacaatttattcaaccagtttgcacagagagagaaaagcattgcctgaggcaggatggggaaggcgaggcgctcagggaggtcagagaaagacccatccattgcagcaacactgaaaagtttaggtggctgcttgtcagtcatgaagggatcttttccagcagtcccgtcagctcccaagtttccccgtttaaggaggaaaaaactccccaagtcctacaatcctgtacgtggctaattctgtcactcacagccatcagcaaagagtgcaaggcagattaatcccaagagaatagcagttaacatcccatagtgccaaacctgctcttagccagaagcgactttactgagagggaccttactgagaggggcctctaaccccctaaatctgagaagggactctaaccctcctgagtttggctctaacccaaggttgagcaagcgtccttacctttccttaagaggggcctctaacccactgtgtcttaggacagactctaactcccctacgttgggcctctaacccaatcccatcctttacccaggtaccccaccacttattcaaagtcagccaaccagtggtgcagtctacttcttttgggttgaggggtctcctcagtatcgtcccttccatgattcaccagaaagacgttaccagaccctaccacttacccaaagttactctttgggtctggggtttccacactatagtcacttctgtggtcgccagaaagatgttacaggaccccatcacttaaccaaagtaaacctttgagtcaagggtttccacactatggttctttccatggtcaccagaaagatgtta

SEQ ID NO: 182217 - DNA, 1532 bp, Homo Sapiens
  misc_feature (81)..(144): n is a, c, g, or t
tgaccactcttctccagcaagggttgtttactggcctgagatggctgaaatgacagaaatagaatttggaatatggatatnnnnnnnnnnnnnnnnnnnnnnnnnnnnnnnnnnnnnnnnnnnnnnnnnnnnnnnnnnnnnnnntgaaattaatttaaaacaatatagtaaagcaatatactcagtttgggagtgttgctagaccatggctgaaaaatacagctagattttcaaattcagtctcatattattgtgtgacacgtactttgtattattagtgacttttataataaattatgtttttcatggtatgttaaagatgtactagaaaagaaatgttactgaccataaatgtttcctttatataaaatattttaaggtaaaaatttgcaaatgttataatcaacattggagctattttgtctggaattttaaaagaattctagtgtaagtttttagttatagctatatatctgaagtttattccctacataattcagaggaacatttttaaaacaaaaacaaagtacacaaaatactacattaatatcattaattgtgattagtgttataggaacaagaccttgaatattaaaatacttaaaatactatgcaatgatatagagaatgctctgaaactcttgttaccttaaagagttacctgaatatcataatgaagaaacaaacaaacaaaacggtagagtgagaaataaattcaacaatttcttttcaccaacacctggtgttctaaatgaattgacattctctgtgatgtggctgtcaggaatacactcactagtagatagttatagttataaatgcaaagcaaacgttctttttcttcaaaatgtagcttactattttaaatagaacttttgagtagcaaatacgtttatgtggctcaaaatgcaaaaatcaaaactatcatctcatgaacagtctgcattgtcttcttatccttcatttaatcaattccctgtgcacatacattactagtctttttagtttctgatttattcttacacacttttttatgactttataagagtataagaatgtgtatttttctccccccatccttttatttcacaaaatgaaccatattatacatactgctcttaatttatttcaaatgacattagacttgtagatctttattaatatcccagtctatcttcattctttttcttaaatagctttttgatactgctttatacagatttagcataattaattaaagttgcctatggatgaacatttatttgtggtaggtagactttgttatgttcactatattcatttccaattcctgagcatcattctactctgtccttgtgaaaaagacctggccacatatctaattttgaccaatgaactatgaatgatagtgctaaaattcacttatggtagaaattttaagagagtaaatgttttgccatattcttccttacttctgttcccctcctcctctttcatttttcttatttgtcctctcctcctcctccttttttaattcaccagacataaaacta

SEQ ID NO: 182218 - DNA, 915 bp, Homo Sapiens
ttggagccttctctttttcagattcacattgacattccaaggacgaatcctctcattccgttgttccagcaaccacttgtacaggaggtgagggaattacttaatgttctttggcgcttctccccgcatagttctgtggcacctgtttacaggtttgcggctaatcataatagtaccttatgttcatatatgcagctttggttccttcagagcatggtttcatacattctcatttgatctttgttacaaatctgtgagcggaataacactttgaaaggctaaggaacttgctcagaattttgaggctacctggtggcagaatgaagaacccacatcttagaattcctattcctgtatttgctctactttatcaagctggaagtagtgattttttaaattgtggtaaaatatacataatataaaatttactgtgttaaccattttttagtgtacagttcagtggcattaagtacagtcacgttattgtatgaccatcatcaccatccacttccagaacatttttcatcttcccaaactggaactctgtatccattaaatattaactctcttctgcagcctccattctatttgtctctaagaatttgactactccaggcagctcaaataagtggaatcatacaatatttgtccttctgtgactggcttatttcacttagcataatatctttaaggttcatccctgttgttgcatgtgtgaatttccttttttaggctgaataatattccgttgtacatatgtaacacatattgttgagctgttcatctatcagtggacacatgggttgctttcaccttttggctattgtgagtaatgctgctgctagtatgggtatgtgaatatctgtttgagtctctgtttaaattcttttgggtatatatttaaaagtgggagta

SEQ ID NO: 182219 - DNA, 486 bp, Homo Sapiens
ttggcccagcattcctttggcattgcgagctgtgacttgacacattttaatgacaagattgaagtagctaccttgcaggatagattttctggggtataggggacaaaccaacagtgccatcaggtgtcttaacacccggatgtggagaaacccctggggcaagggcctatggtttcaggaaatctcagttctcaaaggcttaaagccatatttcaaggcactgaggttaggctgatatgctggaaaacaagtgccttggaacttccgtactggagggggaggatgtcttgtggaattcagacgtaagcctaaccctgcattagaaaaaatgttcaccgggttagagcagtggtattcctggggatctttatgctaaggatctgagttacatactcctgggaggtaggagagaaggcctcatttcattccctctggcgtgctgtcaatcaggcaattattgctaatattgactttccctttgtccaa

SEQ ID NO: 182220 - DNA, 835 bp, Homo Sapiens
cagcctatggtaaatatattttgaactacaaaggtgctgtggtactttaaagaaaaactatttttactagtttatctgaatggtctgtggactttatttagaaactgtttttcagtttagttttttggacatatcctttgctcagtgtattttgttacttctctagtaaaggtagaagtgaagcagatgccattgtaggttttaccagcatttaaatatattatgaattgcttagcaatgaaatgcaagtatgcatcttttacttaaagatactatttatgtattcagctacagagatgaaatagcattttatgtgttaattgttttggctataaaatttaagtccttacagcatttggggattatacacttggatttcaaaattgataaaacccttgtgaacatatctaatagatattctgtttacttgtagaaataatataatgtgtctggttctgttttgttagacattttttatgttctactgaatcagaatagtcagtgttatattccttatttcaagaattcatctattttatggctacatctcatatgtgctatgaggacttctagccagtgggtggcgctgtaataccgaagtactgcactgctttgttcctgtttccttgtgctgattcctttctagtatttaggtaacattaccggatggcatttcccttaaattccaccaactcttaatctttattttaaaaatggctactttttttggggtggttggggtaagggttaaaaccttaaattaataaccgctgtttattttccagtttatttgttttctgtgattatttataataattgatatttgtttttacaa

SEQ ID NO: 182221 - DNA, 808 bp, Homo Sapiens
tgtgaattatatgattatatgattcacataattttaatataattatatgattgacataattgtcatataacataaaatttacccttttaaagtctatagtttagtggtttttagtatatattcacaaggttgtacaactaccaccactattcaatttcagaatgtttccatcactcaaaaaagaaacccaatacctgttggcaggcgctctctcccacctcctaatcctgtggcaacaataaatctactttccatctctatagatttgcatattctggacatttcctatcaatggaatcaatatgtggcctttcttgtctggcttctttcacttagtataatgttttcacagttaattatgttatagcatgtgtttgtattcattctttttcatgaccaaataatattccattgtgtggacctaccacactgtgttcacacagtcctctgtgatggatactttctgccatctgagccacttgggctgatcagtgcctggggcaagtggtaactcacaaatctcacaagtcaagcttctgtattctaagggtagacaactacttggtttctgcctgctttgttcatcctcttgggccttgaaatagattttaaagatatattgttcagatttaagaattgttacctgtgggagggttagtctaaccaagctgccctgctcttaccagaagccaaaactgcccttcagtcacaggggtaggcagccaggtggttgactcagctcctctgctgggatagcgagatttctggccaaaagaacctctccgatggtgcctgggtaccactgacc

SEQ ID NO: 182222 - DNA, 627 bp, Homo Sapiens
ttgtacaaaaaagttggggcattgctcgctgaggcagattgataaagtattacttgttcaaatctttggaaatgaggttaaaattatgattaatttagcttctacagtgcttcagaatgctttcaaacatttattctgcaacttagaacatcctagattttcataaagctttataatttataaaaagcattcaggattttccaatacgttctctcatttgaggatccttactttagagatgggagaacagaggggcagggaaattgagtgtgtgatttctcgttcagaattagatatatgcacatacatcttacatatctcacactccctacattttcttgagtttaatgtgatcagttacactagtgctggtttaataacaagcaaataaactgctgacttgtgtgtttctgttacagtatttatgaacaatgcgttaaaacactgccattctccttttttttaatttatacttttggataaccttcaaaatgtagaaatagcaccttcagatctgtgttttgttcaatctgatatgcatgttcattgttttatatacataatacatatattgagagagtgagagagctattcctttccatgatactgttgtgaaaagtagttcta

SEQ ID NO: 182223 - DNA, 1409 bp, Homo Sapiens
ctttgtacaaaaaagttgggcagtgaatctgaaacaattttcacacccttaagtggttgatacgtacctattttaggtattttgaggtatttaccataaactaaatttagaaattttttagattcacttgaagtaaacattacaaacattggatacggtggggttttctttagattttacttgagagaaggtgagtacaaagcaatttgcagttgttgtaatgacaagattactgcgcaagtgtgaatccaaacagtatagcttttaaattttaaagcatttggtaaattatcgctgagtttttttctgttgccaatagcaaactgcttttccattaatggagaattcatgcctttcaagcattttaaatatgacaatatttataaatgtatggtttggaggaatcgtttaaattctctttcctaattttctttcttttgaagatagattctttcaacaagtaatttgtagtaatgactgtgttgacttcaattttggagcgcagtagctatgttaaagatgaactatttggtctcattgaagccaacacagaacttgctgctgtgttttttcttcagtgataaataaaatacttacagaatttgttttagtgttgatttgtggttatagtattttgtttataatggtaagtttgcatattcagttgagttttttttacttgaatttttatcagtgccattaaatgtctgtttagtatcaatgaaaatgaacctaaatataacaaagaaagcatatgtggctaggatgtccccctaacatgtcttcctttgttaatgcaggaattccttagtttccttgtaacgctgtcctctgagtttgtgtgtgcatgtgcgtgtttgaagtaccaccttgggttttcacctgaaattagaaaaatcgtagttaatttgagaaaatgttacaaattcatcatggctgtaggcacttatttctgttattgagtagtggtgagaattcctattggtacagctgtagggccagaagagggagtattgatgctttttaacttaaccagatgcagctatttttgtttgatgttaccaatgatagaaatcattttaaacaccttagtatctggtatttcaaatacgtagaagtctttaaaggtctttcgtggggagaaggacttttctttcataacaagagaatttcagatcagtgattacaagtggggcagtaacttgctaagagtttgcttcctggagagtagatctgtatgtgtgacatcacaggtaagccccaagaatttatttaatcagatttgttcagacgagttactgctgcctacgttagagttagatttcaaaggcgagtcagcaaacccatccctttctgctcagtctcccgtactgttctcccaagttctttgttctggggagtcagaaccc

SEQ ID NO: 182224 - DNA, 251 bp, Homo Sapiens
ttggcgccttttgtgtcgggctttgaccgccgcgcgcgctcattcacctcagcggccgcgggcggaggggcgcacgcgcgcgcagtcccctcggagggcggtggggcgaacagcaacgcgcgtaccctagctcttggctgctgtgctgagactagcccgcgcgcccgcgcgcctctccctcgaggactcggagccgcccgcgcactcgccaggggccgccgccccgagtctcaagcggacgcgcacgcgtt

SEQ ID NO: 182225 - DNA, 469 bp, Homo Sapiens
tactttatattttttaactcatggctgagcctctgcatctcagctggcctgggaggaggcttcctgatctatggttgagcaattggagggacagagaggggaggacaggtgaggagtcaggccgatccagcatcacctctgtgctgggtgatcttgggtgggtgccatcccttccctgggccttagtctactcttcggtcattgtggctggttgggtatagagtggcctagcctgagcccggctcacagtgagtgctcacctgttggggctgatgtggtcatccccgaagtcattaccagcctcaccttgctggtcagggtgggcccagccagtccaagggctgctgatgtcccccggccctttggatcatctcttgtgcagctgaaaccctggcttaggggaagaggaaccgcctgggaggggctgggggagatcctgggttcccctctggcactaaccaatgtggcc

SEQ ID NO: 182226 - DNA, 826 bp, Homo Sapiens
tttgtacaaaaaagttgggtgacttttatttttaagtcattgtgtactgcatttgtttgtcactagttgggcacgtgccaataatattctctccattccttatctgccatctctgttttgcctgatttctcttcaactgaataatggctttttgcatggaaaaaatagtttttactattagacgtgtaaagggaagagagagctaatgtattggactttgtgagcctacaaggaatattttggatccctccaataaataagggctatgtactatatgtactatatagagttatcatgtggtggaagatacttgcaagtcatagatttatgggcaggaggatttgttactccctatatctaggctgaatgtaaaatcccttatgttgtatcaatgggggtaaaaactatttttatttgcctatgatatacttggtttctaataaagtgccctaggctctagtgagaactgtctactttgaattgccatttactccctttcctcctttggccgatatgctcttggctagctttttataagttaatgtgtttccccaaaaagtttcactactttatattcatttgagtgtgatcctaaaacacctggatcaacagtacatctcatatgcaatctgcatcagctcctattctgtctggatgtctagaactgttggaagattttgacgtcttaagccctacgttttgctttgggaaataaggtttgaaatattgttcattgcattaagatttgtgtgtgtgtgctttgtaagcccagaaccaggttttggaaaatgcctgtactgtgaaagcaaattaagactctttctga

SEQ ID NO: 182227 - DNA, 1143 bp, Homo Sapiens
tcaggtagtaccttgtagaagtgtgaaaatggactaatacagataattggcagatgggggtactgctacaaagataatttgaaaatgtggaagtgacttttgaactgggtaataggcagacgttggaacagtttggaggctcagaagaagacaggcagatgtgaaaaagtttggaacttcctagagacttgttgtataattttgaccaaaatgctgatagtgatatggacaatgaagtccaagctgagatgatcttcgatggagatgaagaacttgttgggaactggagtaaaggtcactttagacactggtggcatttttccccggacctaaagatctgtgcaactttgaacttgagagagttgatttagggtatccggcagaagaaatttctaaacagcaaagcattaagaggtgacctggcttttcctgaaagtgtatttatgtgctctcacagagatagtttgaaattgaacttatgtttaaaggggaaacaaagcataaaagtttggaaaatctgcagcctgaccatttggtagaaaagaaaaacccactttctgtggagaaattcaagcctgcagaaatttgcctaagtaacaaacagccaaaagttaattgccaagacaatgcaggaaatgtctccaggcatttcagagatctgcaaggcagccacacccattacaggcctggaggcctaggaaaataaaaacagttttgtgggccaggcccagggcccaactcctttgtgcagcctcgggacatggcaccctgtgttccagccactccagctccagctgtggctaaaagggaccaaggcacagcttgggccgtgctttagagggtgcaagccccaagccttggtggtttccacatggtgtttggcctgcaggtgcacagaagacaagaattgagctttgggagcatctgcctagattttagaggatgtatggaaatgcctagacatcaacacagaagtctgctgcaggggcaaagcccctggagaacctctgctggagcagggtggaggggaattgtggggttggagcccccacacagagtcttcactgaggcactgcctaatggagctgtcagaagacagccactgacctccagacctagaaagatagatccactgacagccaa

SEQ ID NO: 182228 - DNA, 969 bp, Homo Sapiens
ttgggttttaaaaaatcagaatacagaacaaaatttattgggagatgagcttctttctttctctcttcaacaccatcgccacatcacctccacatatacacacactgaaaagatactgaaaagacataataaccatgggaaatggagattactggattgttaaatgttctttttgcctgtctttattctctaactttgctataatgaacagaaattattttttgataagcaaaaaatattttaactttaaacatgtaaagtaacttagtagttgtcttttcaaaatatgtaagaatcattagttcactagttggttaaatatgtttttaatcccaacatcttgataattgtcgcaaaattgagggaacattttttgaactctaaaatgctatagaattgacagatcatttttcagttcataagttattacttataatcagtttttttattgttactatggcaatattttatacacaagaatggctgaggttaggaatttgtgccctgaaaattgtatcaacatatcaaatatgaagtaaataacaatttcttgctttaaatataacaaagatgtgggaagaagtggtaggcaagagtctctgtgttaccatgggaacgattaagttttccaaggtgcaaaccagcctcattccagcttcagggtcaatgacttactagctcagagggaaatgtataaatatttaagtacatacctactatctgtacagagtgactctcattacccagagaactgctgtaaatattatttattcacagattacacaaaaccaatctaaattagtacttttatacattctatttggggagtacttaagtgtatgagcaaacaattgttatccaggtcactccagaactgttgtatacagattaagattgatgttggatactaattaaaatcattaaagcaaaatcaaaaacacctttgggctagcattttcaattattttt

SEQ ID NO: 182229 - DNA, 463 bp, Homo Sapiens
ttggatggaattatatcgaatcatgaaacttgaaacttcatagaaatacaatcaagataatagatgaactgaagcacaaactcatgcaatagtttttctaattataatgttaacaaagtttgggattttcttgaattatttagtatccatttttttcctgttgaaaattcacgttaatttttaaaagtcagactagcaaattaacctacacacttttctaagttggtgctttaagactgcagttattttacaggtcattttaagtagttatcttagttatttactcatttgatggacacctactgagcatctaattggtagtatgtgtaaccattaaaggttaattggctaatgtatgtaacatgtaagaacaatttaaaaattatttcagatcttgtttacattgtttagaatctagtcttttgaaaaataatgatatatttttatttaaattacatttcaa

SEQ ID NO: 182230 - DNA, 1561 bp, Homo Sapiens
tctgggctatggagtcactccctctgtggagcgagagcccagtcttttctggtactaaggccacagaggcaatttccagtagcatttttatatcttctctaagtttcttttccttttctgtctgtatctgtttttctctgactgcctatatcttactttgtatacccatacataaattattttcccatcttctctcttcccctttttttctgatttgttttctctcttgcaagaaactctgaaataaccttcagaacacaaaaaactggaggttctatacctacagagtcattatcattattgtgattaccattgttactgttgttggtgtttttcctctttttattgtgtagcaatatccatattcacttctgatgaggcaaacctgtttactataaaccaatgtcctccctaaaggagtcagtttcattttcacttctcacatcaccagttgtatcgcaacccatcttacaaccattgccatgttttcaggcttccttgccataaatgttttctgggcaaataatggcaaagcaacaattccagaatgctgtctagatctgctttctcccaccctcagcatttgaccctcctcattcgcctgagcccccagggttaggatttcttggaaaaacttgtatactgtacctgatggaatgcccattcttcctaactacttagcacaagtgcttgctcatcgtaagtgatctgagggccactaattcctgaagactgacaaagagacacgaagagactaccctcttaagatggggatgcatggttcttcatgcagtgctcttggccaccgagatccttcatccatgccattgcatggatgaatacgtttgatgttggcagttaaaatgggatgggagtgtcaccctgcaggaagtaagaaaagaggatggcaggatctctgatcagggagctggtcaaagcagggctggaaagcttctgtgcttaacaaaatgtgcatgctgtccccaagtaaatgctcatccctaggtttagagctgacctgggttttggggagtttgtatttttaaggaattaaatactcatgagttaaaatactcatgattgcaaagaaggtctggattgcctgaaaaacaaattaattctaagaagctaatatgagtttctcatcatcccttagctcttccttttccctccttttgtcctcactcaaccccagaccctgtgtaataggaacattaatttttaaagacccacagatcaatagccacactcttccactctacaccttttattgacaccaagttatcatcccagaactaatgaagcaagtccagatgctagacgtggccccttaatattgagcaatttgattgcaatcctgcttgttctacaagaacctgctaaggtcagtcacatctctcttcacctgccttgagtgcttcataatcacgtggctttttcaggaatttcagtgatcaaagatcttctaattctgtgctaccactgacgtttgcacttaatacagagccacttgctctgtggccacctgataaatatttgctgatgataagacaaaatatac

SEQ ID NO: 182231 - DNA, 980 bp, Homo Sapiens
aaaatggcaattacttagatgtttatttcaatatttcttaaattcactttattaatttaaaaactaaataatcgcatgaaagttatataaagaacatcattaatgtgaaaagatgcaagaaaaaaatcattctagtagagcaacgttagagaacaaatgcttaggtaataccctaaatatgcagccaactaccctatttttgcactgttgaccatataagcacgtttgcatttgcagaaaacagaatgacagcataggaatttgtattgctctataacggtccaacatctccacataatgccaagttcaccttagacattttatttacttatccaaatgaacagcctgtgtaagcaggattgaaaatgcatcaactttaaaaagatgagaacaattttcaaagcccatagaacttatgttgctggttaattttagcactgaaatttcttttgaataatctaatcttgcaaatatgcaagaatccagtggaatttttacagttacatttgtatttgtatgacctgttactttttagaggtaggcccttcacagttgatatccaagttacttaagagtcttggcaacatgcacataatagtctaacagtgtaaatgttttagtagcaaacataacttattttttaaaaatgtgttctatttagaaagggaactcttatctctggaagtgatttccgtggctcttgaacttttaaatattcattaaaattcaagcaattgctagtatttgtttttattaacatggaattacaaaaagaactattatgttttgattaaagctcctatattttccagaaaaataaaagcccagagatttgcagacataataaaatctatttaaatttcatgcaatagccataattatagttttaagaatctgtaggacaataactttgctctgtccataagatgtagcctcattcaagaaatgaatgggaatttcacagttaagaaaacacccaa

SEQ ID NO: 182232 - DNA, 1060 bp, Homo Sapiens
  misc_feature (64)..(90): n is a, c, g, or t
  misc_feature (245)..(258): n is a, c, g, or t
atgattggagggctatatgatccagcattagcttcctggtgtgccaagcatgcttgatcgggannnnnnnnnnnnnnnnnnnnnnnnnnngctgtagctgaaggcatttctcggatgtggagaggagaatggaaatcgcagaaccaaatcagtttgccctgccatatttggctgtggtctgtcattgggcatttctgatgtgcttttctggattcaggaagagctgattgtcctccgagggttgnnnnnnnnnnnnnncagtttcagaaacctgaatccagggccttatagttctcctcattatctatcttcttctcccttccctcgcccaagggagtgggggaaacacttttcactgcagagtttgctttaaagttttcccatcttgcgtgcattatcccttgatattaaaattattttctcagtttaatccaactcctgctgagaagctgtgtgagatttaggctgtggggtttttttcttgtactcttttggatggtgttgcatttttcactcttaacccgagggtgtgtttcagcttatgttcgttctgtttcatgcaggtttatagcacggtagagtagaaggcggcttctgatttttagggtatttttagaattcattcctgagtgaggggttcagacacccagtctcctcggaacaggggtgaggggtcgactgagctttgttgagaagcctccagttaggcttcgggcgggtctccatgttatattgtgtgtttactgagcttcccactggtagaagatgacacatttgtccatcgtcctgtgtatctgctttccagaggacaccggagcattctcctggggtcactcccacatggctgcctcacatagctgttttgcaacagcctttattgccaacacccttggaagaacatctcctgtagaagtacaagttttgcaatatggactttggaagtggttttgtgatgttcgaattttctgttagcctattgctcaagcactacagaatgtacatagtccctttggccatcctctcaccccagaatatcctaataaacattgttttctttttt

SEQ ID NO: 182233 - DNA, 1096 bp, Homo Sapiens
actttgtacaaaaaagttgggatatactcagcttaggtataattgtagggaaaagcatgtgattaatttaagtactcttagaaatagtgcaactgagaagacagataatagcatattgttatacatagtagaggatgtctccccaagtttaagggacatttcccaaaatgaccaaccaaatcatttctagtaaccctttaaaatagtagtttcaatagagaattccattaaaactagtcttatgacagatattaactgtgttcagattttattaggctagctagtttctttctatttaatatttaaatcttatcatgaaatgcagtgatgagctgtaaaaataaatatgaaataagatcagaaaatcattagtaggttcaaagcctttattattgctattatgtataagcctagaaatggtcacttcccaacaaaaaatacatcccttgttatacttaggacaagttgtaaaccccctttgttttgacagtagaattgttccagtgaatcatttatttccggtgaaccccagacacgataagcagtgtggtctttaaattttattagttggttgtcaccatcgcactaatagacaatctccattttccacagaataaaactgtaatgactttaggtcattttccagctcgatttctctgcccggcttctaaaattagaacgaaggtggggaaggatgtgattaagacagatccgataaagcatgctacacatactcttcccccaccccgtccccaggcagtagcttacccttaaaatcaaacaaacagacccatggtctccatttagaatcaaactgttgctatctagagacagtttaatgtcataatacgaggactaagcttgactttgactttgtattttgctgggcaacttactttgggactttcataggacaacagaaggtctgacacaggaactttgagaagacgtgacagcaatcccttcaccttttgaattgtcatggagcctatcaaaagacaagaaaagtccattcgttctctcaaatgacagttacctgtaaaactagctcatgtgatgagaccacagtatcattgcaatgatagctgtatctgtc

SEQ ID NO: 182234 - DNA, 1547 bp, Homo Sapiens
  misc_feature (398)..(710): n is a, c, g, or t
ttggatttatttgtgtttatattttatggatacgtgtctatgtttatagattgcctgtatggtaccaacttgacataaataaattagtactcataaattaagtaaataagcccaaacgcttttcaagttcacagggcattagtaatctgtggtaaatgaagatagtttaaaatttggggtaaaataaaatagaaacattttctgaatttaatttagatatttttctgggtctatttgttagacaggtttacactatctctgctatttttttaaggacctaaaactgaatggacatagaaaattgaggaaagaaataaaaccgtaacaattataagaggttataaaaggttcatggaacctttttatgttttttcttgtgcagtcaaaaccaattgcannnnnnnnnnnnnnnnnnnnnnnnnnnnnnnnnnnnnnnnnnnnnnnnnnnnnnnnnnnnnnnnnnnnnnnnnnnnnnnnnnnnnnnnnnnnnnnnnnnnnnnnnnnnnnnnnnnnnnnnnnnnnnnnnnnnnnnnnnnnnnnnnnnnnnnnnnnnnnnnnnnnnnnnnnnnnnnnnnnnnnnnnnnnnnnnnnnnnnnnnnnnnnnnnnnnnnnnnnnnnnnnnnnnnnnnnnnnnnnnnnnnnnnnnnnnnnnnnnnnnnnnnnnnnnnnnnnnnnnnnnnnnnnnnnnnnnnnnnnnnnnnnnnnnnnnncaattgcaattggattgatctgtttataaactttattaaaattagctttagcatttataatacactggcacaaagttagaatttggatttctcttttgaacaagatttttgtatacattaataagaaatagtaaaagatttttgtttaccttttgagtaaactgcaaaaaatattagtaataagaggagagaatttccctaatgctgtttttattatgtcttttgattgtttggaaaactgaatctcccctctgtcaaagagtaaaatttttgctttttgaaatttttgaattatcagtttggctaaatgaataactattatcttacagtgacctgtaatcttattttgatcaagtgttttaaacctttgatatttgacaaactttccaaaatcaaatgtaaaattctaacttaaatgttttcgacctcaagctaacttttgggcattaaagcccttggaagtccaaatagggcccctggaagtccaaaagaaacatattaggctaatttggtatattaaaatcatacaggaagctgatcaaataaaaaatgttgtttaattttctttgagttgtatttgtataaatctgttattaatatgcatcccaaaattgtatcatattgctaaaatgttgatagatcttgttatatgttattggtaataattgttatcctgttaaattattgtataccacagaaataatgaaatttctttgtcaattgcatcagtaatcatggctcttctaagtcttttgtcattcacagatgattattgttttacttggattcttttcaaaagtggtttgtaattggctacagcctaaaatctgcttgttc

SEQ ID NO: 182235 - DNA, 1111 bp, Homo Sapiens
  misc_feature (79)..(141): n is a, c, g, or t
gtgtgagccaccgtgcccggccagattattattattttgtagacagtctgtctttcacccagcatggagtgcaatggtnnnnnnnnnnnnnnnnnnnnnnnnnnnnnnnnnnnnnnnnnnnnnnnnnnnnnnnnnnnnnnnctgtgtgccactgtgcccagctgagagtaggttttaatctgagcatgggggcagctatgattccccgtagcacctggggtgagaccaggtcctggctccactcaccctgccaggatctcgtggtctgacaccttcacactggacacgccatctctggcctcatccagcgtctgcactggctcaggcctccgtgagcggcaatcccaacagcggatactggaatcaatagagcctgtgaggccagcatgatggtgaggtcaggtttggagggggagggcagcaccctgggcccccgtgcttaggccccagactcaccggacaggataactgtggcctcttcattaaactgcaccgtgttcaccttctgagaaagttattgccactcagaggaggctggactttggaggactgggataaaggcagggttcccagtgtcggttaaagcaagggcgaaggggaggtgaaaggttttgggggaacagcaaggacaggggttggtgactgcctagcctggcatgcggagtgggggatcgtcatctggggaagggatccttacggtgtaatgggggtggccgtgtcaccacctatgcgctaatacgggtcccctccactcaaatgagggtctccaggctttcactcacccctgcgtggccccggaatttgcgcacgacctgccctgatgccacatcccacagaaccaccgccttgtccccgccgccggagcagagactactgttgtcaaaggagctggagtaaaggaggaggaggatcagcatcgacctcggatcccagcctcagcgctcccatcccagcctggtccccgggctcacccggccgcatccagcacctcgtagccgtggccgctgtacgtccgcagcagcgtcccccgaagcgggttccacagcttcagcgtcttgtcactgccgcacgtcaagcagtaattgcattcactggggacaccaagcggggg

SEQ ID NO: 182236 - DNA, 865 bp, Homo Sapiens
ctttgtacaaaaaagttggattttctaggatccgggaactccctgtattgtctatttccaacattatataattttaatttaatgtaatgtaaatctcatacttggtgatcagcacattcttatatcctgctctagcaatgagtacccatttgttacacttaccaaactctctaaaaacatatactgtgagtaagatttgaagccaggaataaaaggcagtctgaaagaaaacgtcctatacgatgcagttgtttggaaatggctgatttctgatatgaaacccaacttgatacactgtttggttctttgacttgggatctatctgaattgctttcactagtacacaaaaggttaagttaaaactactttaaacttgtatagcctgccatctgaggtgaattattttcaaaaaatactaaatctatgaactgagactagcaattagttggctgctccctaccatgattttacttttaatagcaatacagttatattggtgataaatatgacaggcttaagtactgctgtccttttgcatcttcctaagcatcttggttaaatttctgaagtttaaaaattagatccagatttcttctgttgtgtctgaagagaaccatgacatttagaagtatattggtaatctattaggtccattggcaaagtatattggtccatattcaaacctattccaaaaggttagaagtgtttaagattcctttattgtggtaccatgtctgtttacctatgcttatgagcaacaataaattactagtttaccttctggaattttaattgttataaccgaatcaattattggaaagtgaaaaacacctcccggtcacacaacagggtacttaaataaatg

SEQ ID NO: 182237 - DNA, 798 bp, Homo Sapiens
  misc_feature (124)..(366): n is a, c, g, or t
cagtccatgtctctttcactcactgtggtcagcttccacaccatttctttggtgtggcttggcaagaacctcaggtgttacatcttggcgagccagacaggagactccagaaaaggtatctagnnnnnnnnnnnnnnnnnnnnnnnnnnnnnnnnnnnnnnnnnnnnnnnnnnnnnnnnnnnnnnnnnnnnnnnnnnnnnnnnnnnnnnnnnnnnnnnnnnnnnnnnnnnnnnnnnnnnnnnnnnnnnnnnnnnnnnnnnnnnnnnnnnnnnnnnnnnnnnnnnnnnnnnnnnnnnnnnnnnnnnnnnnnnnnnnnnnnnnnnnnnnnnnnnnnnnnnnnnnnnnnnnnnnnnnnnnnnnnnnnnntgccagctgggcttcctgggtcaagtaggggctcagaaagctgtgaaactcactcatttcctgcatcaggacttacttcagtcctggatgaataatattgaagatatacgcttaaaatattcctaacaccaggattcgtgcatgtgttttcttccccaagaaagctataaacagtgaaaaatttgctgtaagtttccctgtatcttctctccctctctcccttcccccgcccctgaaactaaaataaaggaatgttaactgctcatttttctgtgaccagtggaccttatctacactcccaattcagattccttgtaaacatactttgtaaagtcctgtaagatcctgtctcctttgccatgctgctgcaaggtcctaaagtagataaaacctaagttgcaattccggttttcctcaaatctaagacatgtc

SEQ ID NO: 182238 - DNA, 815 bp, Homo Sapiens
ttcagagttttgctattcttggcatgctcagaaaaaaatgttcagggggatcacagggactttttgtaatcaatttataacaatgaagatgaatcaagataatatttattgagaactcatcatatgacagaaatgatgtaatatgcctattccatggtgtatgtggtctcatttaatttacaccgccttgtgaagtagaggatattttccaccctctcccccatgccatgacaaatggtgaaactgagggccagagaggttagagagatttcccaagttcacccagcttgtcagtgagtctaagagtgggggaaaaggggttctagcctggctccctggcatcaaagcaggtcatcttgattgctattgaggatttgacaggtgagacctagaggagggctgtgagttgaccaagggtacacacagcttaggaatcacagctggggcttgaacccagccatgggatcttcatctcctaatagtaacagcttccactctcacccaagcgtagtcctccctgaggatgggggtctgggacagaaaaccaggagcatgcctctgggggagtccatcctggtggttggggttgcagggggactcagaggagccaaggcctggccccagccctgctcccttctctggccaggccaagtggcaacgcctggccatggagggcagcacctgtctggatgtgtttgagcacatcagccttatgaccctggacagtctgcagaaatgcatcttcagctttgacagcaattgtcaggagaagcccagtgaatatattactgcgatcatggagctcagtgcccttg

SEQ ID NO: 182239 - DNA, 660 bp, Homo Sapiens
  misc_feature (613)..(621): n is a, c, g, or t
ttggattcgctgttgaatagaatttgtgttctgcggttgtaggattaaatgttttgtatatacctgttaagttcatgtgttccagggtatagttaaatccattgtttctttgtttactttctgtcttaatgatctgtctagtgctgtcagtggagtattgaagtccctccctcttatggtattgatgtctatctcatttcttaggtctattaataattgttttataaattttggagctccagtgttaggtgcatatatgtttaggattgtgatgtttccctgttggatcaggccacttacgattatatagtgtccatctttgtctcttttaaccactgtttctttaaaatttgttttgtctgatataagaatagctacccctgttttcttttggtgtccatttgcatgaaatgcctttttccatctctccacttttgagtccttatgttaagtgagtctcctgaagacagcagatagttggtgagttcttgtccattctgcagttctgtgtcttttaattggagcatttaggccatttccattcagtgttagtattgaaatgtgatgtacaattacattcatcatgctctttgttgtctgcatactttggtgnnnnnnnnnggggagggaaggtgaggggaatggagtcgtgctctgtct

SEQ ID NO: 182240 - DNA, 812 bp, Homo Sapiens
gaggtgtagccttaaattgtctatataggctttctcaaactttttgatgcaggcatttaaggctatgatctttcctcttaacactgcttttgctgtatcccaaaggttttgataggttgtgtcactattatcattgagttcaaagaatttttcattttcatcttgatttcatggctgacccaacagtcattcaggagcaaattatttaatttccatgaatttgcattgttttgaacactccttttggagttgatttccaattttattctactgtggtctcaaaaaatacttgatataatttcaattttcttaaatttattgagacttgtttagtggcctattatatgttatttcttggaaaatgtgccatgtgttactgaataaactgtatatttggcagttgttgggtagaatgttctgtaaatatctgttaagacaatttgttctaaggtatagtttaaatccattgtttctctgttggctttctgtcttgatgacctgtctactgctgtcagtagagtaaggaagcccccactattattgtgttgctgtctatctcatttcctaggtctagtaataattgttctataaatttgggagctccagtgttaggtgcatatatatttaggattatgatattttccttttggacaaagccttttattatcatataatgttcctcctttgtctttttaaattgttattgctttaaagttcattttgtctggtataagaatagctacctgtgattgctttcagtgtccagttgcatggaatatctttttccacccctttaccttaagtttatgtga

SEQ ID NO: 182241 - DNA, 2251 bp, Homo Sapiens
ctttgtacaaaaaagttggataaaaacaaccctcaaagacacagagatctgttatcaaaaatgttagtgattgatcctgacaagcggatctctgtagacgaagctctgcgtcacccatacatcactgtttggtatgaccccgccgaagcagaagccccaccacctcaaatttatgatgcccagttggaagaaagagaacatgcaattgaagaatggaaagagctaatttacaaagaagtcatggattgggaagaaagaagcaagaatggtgttgtaaaagatcagccttcagatgcagcagtaagtagcaacgccactccttctcagtcttcatcgatcaatgacatttcatccatgtccactgagcagacgctggcctcagacacagacagcagtcttgatgcctcgacgggaccccttgaaggctgtcgatgataggttagaaatagcaaacctgtcagcattgaaggaactctcacctccgtgggcctgaaatgcttgggagttgatggaaccaaatagaaaaactccatgttctgcatgtaagaaacacaatgccttgccctattcagacctgataggattgcctgcttagatgataaaatgaggcagaatatgtctgaagaaaaaaattgcaagccacacttctagagattttgttcaagatcatttcaggtgagcagttagagtaggtgaatttgtttcaaattgtactagtgacagtttctcatcatctgtaactgttgagatgtatgtgcatgtgaccacaaatgcttgcttggacttgcccatctagcactttggaaatcagtatttaaatgccaaataatcttccaggtagtgctgcttctgaagttatctcttaatcctcttaagtaatttggtgtctgtccagaaaaagtcgatttatgtgtattaattggccatcatgatgttatcatatcttattcccttttatgctatgatttattctatcttttgtatttcagaagacatataattaaatctatttaataaataaaaatatatagcttttcttagatttgtgatgtttggggctgagaattatcacggctaaaaccaagacacttatgtggacatcttgttttctttaaactgtcttgtctgggatgattgtacattcagctttactgcacgatacaattttaagttttgcttagtgctgcttgaaatcctagctaccttatctcttttcttcttggtcttctagacttcttatgaatttaaaatgctacctagaacttcaccttctttattaggtgcgtaacactccatcttaattaaatatgatggcagataggttcctgcatccatggcctaacgttggagtggaattttacaaaatgctcactagagatcactgcagtcatttcctaagtgcttcctttgccacagactggcctgggtcctttacttaccttccctcattcactttccctcggccaataccacgttcttgattttctttcttcactggaagaaagcagataaactcctctttggtctgttttcagaggccaggctgattcagatgcctgttgctattgttgctctccattgttgggaggcattccttttcacaagaatgttctgggaaactcttcagaggacgtgaaggaaataccctgaagagtcatgattaactattgactattttctgatttaaaactgctcacctgaaattgatacttttagactttacgatcagtaaattattcagaattcatgaagatgctgagtatgttaagtgtcactgcaggaacggagctgtggtgatcacgttttgcctgcctgtgcccatgtctcttcccttgagcttattctgttgctgattcatatcttgtgttcaattattttggaagcttttcagtcgacattctgtagagtgtgttctgaggaggaactgtgataagaaagtttattataaatattatgtaaaatatatggctctctctgcaccagttatatcttattggttggtcatatcactggaaactggaacctttgattagcaaaattaatattgaaataagaaatagttcttttatattgtgtcatttggacactttcaagtacaaaatggtaataataacttggattgaggcggaaacacctattttatggctatctatctaaacatcttaaatggccttctctgtaatacactttcttttaaaagacttcacgaaatctatctttaaaaggaaacaaaggagaggttgaaatgcgc

SEQ ID NO: 182242 - DNA, 1206 bp, Homo Sapiens
ttggcgcattctcaaggcgcggctggaatacctgcgggaccagttccagattcgtgagaatgactttcttaccttcgatgccatgcgccacgcggcccagtgtgtgggtcgggccatcaggggcaagacggactacggcctcatggtctttgccgacaagcggtttgcccgtggggacaagcgggggaagctgccccgctggatccaggagcacctcacagatgccaacctcaacctgaccgtggacgagggtgtccaggtggccaagtacttcctgcggcagatggcacagcccttccaccgggaggatcagctgggcctgtccctgctcagcctggagcagctagaatcagaggagacgctgaagaggatagagcagattgctcagcagctctgagtggggcgggtggggccataaacggttcctggtgactcctgagtcttgcctggccctggttcccagcggcggtggtgctagaaggtcttatgaagtcaggtgacatttctcactgtcacgtccacagcctttaatcgcaggagaaggcagctatccaccaggtacccagaggcaagggggggccaggagatgatagaccccctctcaccccaccagcccatccctcctgcactgttcccaagaagctgcggccagcgcagttcactggacgttagtgggggctcaggtcctgggtgctggcgctgagggtccgaggggccttgtccaggtgccagctgggaaactggagacaggcacaggggatggttggaggggaggtgaggggcaagtgttacatccaccctccagctccaggtccagcctggcagccaactatccaaccccctcgcctctaccccaagtaaaacccatctttgctcctgtcctgggtctcttctgacaccaacccaccacctgctgactccaccactggcccgaccgccctgcctttgcctcatctctgcacctacccacatggcctcctctatttttgacccagatgtccccctcacctgagtcccaggagcccttggagcatccacgttcagtgtgttgagtgacatggctctcttcattctgcaaagagggcagcagggaggaaatgagtgaatccaggagtggcccccctccacgagggacctttccagcacagggtttgatctgtgtgtatcacaggggagatgggagccatggaaggttcttgagcaaga

SEQ ID NO: 182243 - DNA, 1196 bp, Homo Sapiens
tgtacaaaaagttggctataggttacccaggggagaccagggcctcggcagaagactgctgccacacttccgaatcattctgcttgccaaataggtcatcttcaccagttgactgacccaagtttaggaccattggtatcgtgtgtttaaaaaacacatataaaaaaactcttgtgaatattcttgttatgctagagaggaaggtacttctccctctacggctctgcgctggggcctatggtagtaaagttgtttactgtcctttttctgcttcccctggaaatgacaggcattactctcccattggcctcccttccctttatagaaagaccaagcaggccccactggccaagaggtacggtatttggcagtctgagttctcagtaatttggaaagttaaggagttggttcctgtgtcacctttcagttagtgtgggaaaggaagacttctgttttcctgagatcagtgcagtctcaggcctttggcagggctcatggatcagagctgagactggagggagaggcatttcgggtagcctaggagggcgactggcggcagcagaaccgaggaaggcaaggttgtttcccccacgctgtgtcctgtgttcaggtgcgacacacaatcctcatgggaacaggatcacccatgcgctgcccttgatgatcaaggttggggcttaagtggataaagggaggcaagttctgggttccttgccttttcagagcatgaggtcaggctctgtatccctccttttcctagctgatattctaactagaagcatttgtcaattcctttgcctcccaactgacaacacacgttcattttccaaccttcctaacatcttaaacctttcttctgggagaactagaagacagaatttgctttgattctctcaggcgctgtgcacaagccaggtcttctgttttctctttcttactctacccacattcttgccttctctatccaactgtgaaagtgaggggaggctcctgtccccctctcttaaggtccccaaacctgggagtgcataggtactaaatcaagcagtgcaacttgtaattaagcagctgcagtgtttacatgtttcttaatgtgtcatcttttcaatggctgtattaaaagaagaacgtttgttttaatggcctttctgattaaagaaagcccctgtggctttggaggcattgtgcccacggtc

SEQ ID NO: 182244 - DNA, 1434 bp, Homo Sapiens
ttggctctgaatctttattttaattgatctttttattgatgtgttatataaatgaggaagaaaaattttgtctgattatgtgaaggatctttctgtacatgaaaagaagggaaaataaacttgcaattgaatagactgattatagtagcactgagacacaaaaagattgaccatgttgccctccagacactcatacaaggtcgtggacaccacggtgaggcggagctatttagggtggtaaaggaattatgattgttcttgagccaaagtaatttagtttgaatataatgaaacataccctgtaaagactgctagaaagtaaaaggattcgtcttcagaggttgtagaaggtgcccttcttagttaaaaccaaactgggaaaagtaatactggataaaatattcaggataaattttgcctcagcagaatttcaaagggcagttgttcctctgtttcattattgaatcttcagaatatagttaaagccaaaagcttaaaatatgttaaatgtttcacttataaccataatctttttacatagagcatactctgccttcataataactaaatcctctgcatgtggtagatgagtacgtttaggaaatattgtcagtgcaattaaatggcctacactttaaacagtatcataaaaacaaatccttaaatatattctacttgagtcacaaaagctgaacaacagaaaggtgttttgtttttgcctttctcacagtgttgtggtgagaatcagatgagatagtattttgactaaacacttctgaaattgtaaatatatggtggcattattgttcttatgtcggcttaggaggataccaaaggggaagttaatggtcacagtgcacttatgtagctttctaagctactcaatgtgattcttgttctctttgctgttctttttctcctcccccatggtgtccttcagagagaaaaggaatgtagataaatgaatccctgcagatgtgtcctgacatttcagggagggacagggtataatgatgccatcctgcaaaggcagcctgtgtgagaaaaagaaatcaaataatgtggattttaaaattacgaaagacattcatttgcagtttatgaaaggaaaatgtagtttggatacaaagctgattaaattggatcaagaaatattagaattaaatgcaaaaaataatccatgcatttatggttttgatttttatatattcccagctagttgaaaatgatgattcccacaagaagcataactcagcttgtttctgcttactgagtattttctactatggtatatattgataacatttcttccattatgtatgttgtataccagagttacagttactgtgggaatcataatttgaaattttgactcctgtgtttctggaatctttacaacaaatgttgcattaacatataacttttttcagccaa

SEQ ID NO: 182245 - DNA, 1288 bp, Homo Sapiens
atgtgtcattaatataaatgtgtgttagtgtaaaaatcttctggtttaaaaacttaaaattgcacacatttcagtatgtttatttgtacttacataattttaaaatagtggttgccaatagcctgtatgtttcacattaattggttttttgttatctaaataaatcattttagtatgttgtatgtcagttactgggatagctgggacataaagtgtaatttaaaatttgtcaataagtattcattggaatatatgtaaatgtgccttgccggttattgaaacttatctacaaaatgagtatggggtgacaaaaattagttcctggtgcttaatgaaactttctgccactgattttatatattaccccgtgcttttttaaagtacatctctctcaaaacttagtgtaagtttgagggctacacaaaacatttacatttcattctaacataatgaatataataggttgtggaaagtgggtaaactaaatgtagccttcagtaaaattgaatctcagtgtaatccttggtgctggcatttctcagttccgaggagttaaatgatcccatctaagaggtcattgccatgcctattggcactttactgtcatagcatttttaagggacactgtcaaggtgtttaagttctcagaattacttgttgggattttaggacaggtttgtttacttaaagtaagaactgcattgtcaaagttgaaagaggaacacttttgtgagttcacaaatgtgttcttaagaaaacattaaaatatggagctctgggttttcaagactatttggcattcttaatttggggacttgggagggaaactgataaaaagaaattgaagaattgatggttatacttaaagaagggtaatgtaaacagtggtgatgaaatatatacacatcaagtgaaattacttgacagtgttcatttgaatgactttgaattcaagccattataattacttttaaaattaaatatcatttgcactgttctgataatgggtgcagtttttgagcaatataatcagagctaaatatgcatgtagtgattagtgatgtgaacaattaacgttctgagaagaaatactaactgtggtattttcaaacttaaatttctgtagtaaaatcagtatcaaagtcttatcagatcaaggaaaaacaggcaatgcatataaacatacttttgaatgttgtgtggcctataaagcaataatgcaatttatatggaatgtcatgggatatgagaaatggaaatgcaaaaataactaatcctttagtaaaaa

SEQ ID NO: 182246 - DNA, 1244 bp, Homo Sapiens
ttggcaattcacactctcttttaggatgtaatcttcatcaggacaggatctgcgctattcaagagcaatatttgacatcagttagaggcttattacgtggcaagcccttacaaaatgccatatacatatacacaccttcccaaaccctgagaactatttgtatcaacatttcatagtttttaacaatgactgtaaagaagtcatgggcctgtctggggtcactctgatggtaagtgatggggtgagggtttgtccaaggtcccttggaccccagatcctctgggatgtgtttcccatgtggtttactctccctctcacagtgtcctgttggtaaaagtaaaaattaacatctatacagtgtttactatgagttggatgctgtcctgtgtgttttgtataaattaccttaattaatctttacaaaagtcttaatgaggaatgtgctgttaattttgttcctgttttatagatgagaaaattgaggtataaacggggtaatttgtccaaagtactgcagcttgtgtcagagacgggagttgagccagaaaacctagtaccagagaccatcctcataacttccctgctgtcacagctcttcaaggatgttaagaatgtccatgatgctgatattttagcataaaaacaggttgattggtctggaaattcacatggcaattattaacattgataatctttctctgttcctccatgtttataagcagacttgccacacagatttaaataaaggtgctttgttccatggcctagctgattttagattcctgagttatgagtaagttacctctgggaggctcacaggctttgagtattggagtcttttgatttgtgtggggatccactgctcctgctactgactaggtagcctgctttaactgttattgagctttattgagctgagggtcagattttttcaaagaccagagagctctgggaacagggcccttgctcctggacagtgaagataactgatggaaagattgtctgttagaccaaatagacagcactttcagaaattctggaagggtatgatggctgtttgggcaagaattgtggtggagacagagagaaacgcataaatataaggattgtttaataagaacttcataatgaattgaattatggggtgaggggaaatgaggaagtaagggtgttgagtttctagcttttgttactagatgaaaggtcatttattttaatttgttaggaaacagtacagaaagtgg

SEQ ID NO: 182247 - DNA, 1577 bp, Homo Sapiens
ttggctgaagacctgtggttgggagcaggggtagtccatgggtctgctgattttttttccctatttagtactaatgtgtgtgtgatctttgttttacaaacagtaccttttgggttttctgcatattttataatttttgtacagttttgaattctatagattgtcttggaaggatactgtgtgatgggtcaggcacacagtaattggagacttttaatgtatgtaatatttcatagattgcatgctattaatcatctgtgagggtagtattttttgttttattgtaagtttccctctttttttataaattaaaagatggttggtattaggaatttcaaatgaatgcagaaaatcttacatgctgtgtactattaatattataacagacgatccaagtccaaaatctgaccaataaagcaaccattttatcaagatagagggattctaatgggagaggggattcttccctcctgaagtttgtgtgtccagtccccttaaaaaaaatgaatagttgtcttttcttgtcatattaatactcgaaagtccatggtggtattaatgaaagtacactttattgttgcctttgaacttacggccaaggcaataaatcagaaacaaaaatagtgccaatgtgtcaaaatcgacatctgagagattcagcctcccatttggaataaatatgaatcttctaagctatcttgtttaatattttccatcatttagctacttcctatctccctcagaggcgcctgctgttcccattttagagttgacagtggcctgctaattttgctatgttcctaaaagttactgggtgtgagacattttcatcccctcctttttcctactgctggtgtttattatccagctagacaatattttatgcatatttaccgtgatgtctggaccgtacctgtgctccttggcagtttatgttgaagataactaaagatttttctctttgggaggcatcaaaatgatggtagtttgcttttatctttttatgttcattttcttttagtaggtgacctttctgcattaagaactgtttttatcttttactaccttttcttttctcctttgtggagacagcatgacatgtcctgaaggtcacctttgcctttgaaaaaggtttgatggaggaattcacaggtgactgacaagtctttgaaaagaatgggatctgctcacttctggtctttttggccgggaactcctgattggtgttaaggtggtaatttcccccatataagatttagaatcactgagtttgagctagatgaaatttttaaaatttctggttgtctcattagactgatgaggtgagttttcttcttcatatgaacagctagttaataacagcagagttctcactcagtgctcagtacttaattttccactgcaccacaactgtcttaactaaatgtgctgtatttttctttaaaagttaagagttctatttggtgttttcaggaatatacgtgaaaagacatgccatgttttggtaaataccatcagagttgtgtaaaggcgtgtactaagtgcaatcttaatttgtggaaataatcttcatttac

SEQ ID NO: 182248 - DNA, 823 bp, Homo Sapiens
ttggggcattgattaacatggtggtcacttcacttctgttcattaaatggggccagatggtttggattagtgtgattttactgcactattaatcattatcattagtgacactgccgtatataaagtaccactccctggttctgtctgcacagtagtggagaggtgtgtgaatctccccattgtgtggatgggaggggagccctttgcccagagatggcctggccttacccacagtcacactggttctcagcagagcctagattcggccaggtctcctctggggcctcacactctcctccacgacgccctgggaatgaggacagcttggcctagcttgagcaagctccaagctcagtgctctctcttcgcttgcctccctgcctcactccctgcctggggagggcctcgcttgctctgggtgcccaccctcctcccccacccacccccattcacctccctgttcatttctgtttccagtgcaatgtgccaccccaagccctcccacctcccctgcttccccggctcctccagcaaaccccctgtcgtctgaatccccacggggcgccgacagcagctataccatgcgggtctgagctctgactgcaagccctggctgaggccaatgctgtgaagctccacagagccacattctgaagccgtcctctgcccacctgaggtcctggctccccaccctggccccctgcccctgcactcccatgggaatgccgcacggagccaggctggggccatgggctgctgcagaggaccgtggatacctcagtgtccacacactcaccatgtccagcctggagcatcactactc

SEQ ID NO: 182249 - DNA, 968 bp, Homo Sapiens
  misc_feature (389)..(537): n is a, c, g, or t
  misc_feature (573)..(581): n is a, c, g, or t
ggtgtatgaatagccgttagagggggaggccatgaatgcgtcatctcctgaaatgtaattattacagtttgttttcaaccaggtcaaggataaaaattatacagctaaaaaccagatttgtatttataaatactggtttcatgacagctcctccaaaattctacatacttagtcaataaatattaagcacaattgtgtgctaggcactatggtgtaggtaataagaagattaataaatgctccctggctttgaggagtttacaattcaaattatgaaacctgtgaatagttacagaaatcagcctgtaatcaaatacaaggcacataataaaacgctaatcaggaagagcttgctaggagagtgggaggaagggacaatgataaggaannnnnnnnnnnnnnnnnnnnnnnnnnnnnnnnnnnnnnnnnnnnnnnnnnnnnnnnnnnnnnnnnnnnnnnnnnnnnnnnnnnnnnnnnnnnnnnnnnnnnnnnnnnnnnnnnnnnnnnnnnnnnnnnnnnnnnnnnnnnnnnnnnnnnagttatttattcaataaatatacatttagagtgaannnnnnnnnaagttcatgatggggttcctaaaaatgatatgactacaaatacaaagaaaacatgaagggaacacacacctgaagttccttgcatactacagacaggaaagggaaaaggaaacaaaaattcataaactcaggtttttaacattggcattttatatctcaaatatcaaaactctcaactgaaaatttgatttaattctccaattatcatcgaatgactgagcacctattaactaaaggccaagtgccaagcccctgcacatataaaatatggatgtcaataacattaaagagatcattaaatgtaagaaaatcttccacatactaataattctatgaactgttgaggattcagaggaaaatatttatgctcccttacactttttccaa

SEQ ID NO: 182250 - DNA, 1415 bp, Homo Sapiens
  misc_feature (193)..(204): n is a, c, g, or t
  misc_feature (276)..(308): n is a, c, g, or t
ttggatgtactgaccctatgcaaacttaactttcatgactatcagttggaccataaatgtgaataattttgtgtttgtgtaagtaatggcttaaaaggacatttttagtcctagcttcattatcacaaaacaaactttagattccgtaacagcttcttcaattgttagacatggatgtaaaccacattctgcnnnnnnnnnnnnctggctttcggatttctaagaaaccatttctgaaaagaacaaagcatttttgtatgaagatgcagacatttnnnnnnnnnnnnnnnnnnnnnnnnnnnnnnnnnaagtgctggaagccaccattttttaactttcctcaacctttaaggtaatgcccattgtgattttagtttagttgatcagtctccagattaggtgtgactgatagatttcccgtcagaaaattctacctgccatatggtctgaaatcaatatgatcgccttctgtaaatatctattgagagaccaacaatttttgatgctgtaagtaatataaaagaaactcacgtctcgctcctatcattacgaaaagtatattgataaaatgttgataaatttctgacaaagttgctttatgtttacaaagagaagccataatatcctgagtttcaaaatatctactagatcaaactagccgtaggtctatgactttggtcataattcaatcaatgagaattgacatctcttctgtagtttagggctcaatgtcaccagccttcctacatttgataaatgctccttccaacaggtacttcaaagcttgtatcatcaacacatgtagtcctttaggggctcggctgctcagtggcagtcatggtggcttataaattacccatttatagtaggtttttggcttttgaagctgactcaatttcttgaagcttctggtcctgtcttctctggaaacagctttgcccctctttactacagtcccattccttcgggtggagcctcttacatttcctaaacacctgaaatcttcactcctcccttagatagaaaagttgactctcttgacatgtcagaatttaggtcactttagttctttcctcacaaatgacgtttcactatcctatagccattccttcagtacatgtatattaatactatgtaacatttacagaggactttgttctagtaccatttaaagcactctacctaatttgtttggtttatagtaaaattgtgaagcaggagctattatctgtatttcacagatgaagaaactgaagtgaaaagaactttaatacttgactgaggttgcaagaactggaatctgcaccctagtagcttgacaccagaggtgtcaaagatatagattgcccaggaaccctgctaaacttcagtcatatgttaataccattttctttgtaagaatctatgttgtttgt

SEQ ID NO: 182251 - DNA, 1159 bp, Homo Sapiens
  misc_feature (624)..(682): n is a, c, g, or t
ttggaaatttgtaattgatttgctcaagtatgaaatgtagatctgagttggcaaactttccgtaaagggccaagtggtaaatatttttggctttgtaggacattggtctctgtcacaagtactttcaaaaacaggtggcaagctgcattggctcacaggccagagtttgctgacccctgatctacattgtttttccttctaaatattacctgattatcttagcttcttggcaaacatgctaggccggatggagcagaggtttctgttacatgctgtagtctcttattaatgaatcaatccaagaacacgttagagaatctgaagtcaacacatacagatttcatatattttaactttataatttatatttcttgtcagagtgctcccaacttgctgtaaatattttcgcttttgaaagttccaacaaagactgtgaagtaagacagattcaaaatcatatcttcattccttgtatttaacaggtactaccaaactttacttttaatactatcacaaattggaaagcaaatccttgcatatcgtagggcttaattttttattggaggaataataacatgcagactgatgcagtttgaaacattttcttcccatgtgtgtgtctannnnnnnnnnnnnnnnnnnnnnnnnnnnnnnnnnnnnnnnnnnnnnnnnnnnnnnnnnnttttctgtacacctggggggagaggtatctgtaaagtcagttctcttctctcctgtagggtggatatgcagcctacagatatgcacagcctgctactgcaaccgcagccaccgctgctgcagccgctgcagccgcttacagtgacgggtatgtacagagacagtggtgagctttgggatgcatgagagctgttccatcccaaaatgtcacccattttcctcccttcaccatttccacagcagctcttagcacatcgggcatcttgccagcctgggctttctgcagacctcttgatggcctctgtcatgcctaaagcacaagcaccgactctgtcctccactccctctttcttgttctcatctcttctttgactttgactccagtccctctcttcctcatctccaactcctttcttttccattttatggaagtacttcagatttttttcagttattgcatttgggagtagaaatagaa

SEQ ID NO: 182252 - DNA, 170 bp, Homo Sapiens
ttggctggtttccagtacaaaggcaaaggcaaatgaggattattagtattccattttgccctatggatattctcagtgctttctactggaaactcacaaccaattctgaatatgccacatactgtgtgatttgcccttgctgtccaaccctgttcttgctgccatttaaa

SEQ ID NO: 182253 - DNA, 749 bp, Homo Sapiens
ttggaaacaaacaaataaaaacagccatattttattttaaaatatgtatcaaatgaattattaacaggaagcctattttctaaatggtaatcctttaaacactaatttttatgaaagtggccagtgctttttgtaaatcataaaacatgagtgttttcttcaatttgatttgtaaataaataatatcagagtttgcacttcccttggttcttaaatagaatattttcagaaatgggagcatataaaatgcatcaggagtgttgaccgaatttcctagtgattgatggaggccagccaatcctcagttgcacctcagagcctgccattaaatttaaaatagaagatgagaaactaaacttctcagttgacagtggtccgactttctctgccagcttctcagaggactcatctctactgtcacttttcattcttttcagaaaagctgtcagagtctttaggcaacctgtttcatcacccatgtctcaggccacaccaatatcctcagttctgattaacactcattatagctttccagtttctgaagcctcaccggtaaactgtctaggtagtgatttgctacataaatttaatgccatcatgcaatgtaatgggaaaggtgtttttattcccctgacctgagaccaaacttcaaactttctattttccctaattgagacttgtcctctgaagagggtgcaacctcaagtgatgttccaactacttctaatgactgatgttccagttagact

SEQ ID NO: 182254 - DNA, 529 bp, Homo Sapiens
aaatcagaaaaacaatttaggatatgaatgaaaaattcaccagagataaacatcataaaaaataaccaaacataaatcctagaactaaagaattttttaatgaaataaaaatataattgagagtttcaaaattagattagatcaagcaaaagaattaacattagactagattaacaatagactagatcaagttacaaaacttaaagatgggtcttttgaaataacgcagttagacaaaaataaataaataaaaatgaacaaagtctatgtaacataaaggacaccataaggagaccaaatattcaaatttttggtatttcagatagagataaggccaaaggcataaaaaagctatgtaatgaaataatagctgaaaacttcccaaatacaccaagaggtttacctatccaaatagaagaagctccaagatcccaaagggtcttctccaaagcaccttagagtcaaattgtcaaaagtcaaatacaaagatataattctaaaatgagtaacagaagccaacttttttgta

SEQ ID NO: 182255 - DNA, 1095 bp, Homo Sapiens
  misc_feature (208)..(220): n is a, c, g, or t
  misc_feature (545)..(572): n is a, c, g, or t
  misc_feature (889)..(901): n is a, c, g, or t
ttgggtcaccttcacgtgggggaaattaataccttgtgcaaatattgcaaagtcaactcagaaagaaaacacatagtaaatatgtagatacagtttttaatgtatcacaatgagcaacaaacatacttgatgaactatttccagaagaataagttcaaataccatctacaataaacatcatttcaactatgacaacaggtctgtgacnnnnnnnnnnnnngttttcaaaaccatgttatttaccgtaatacggtgcatttgagacttcaaacattacagtaacaaaaactaatgagactactctctatatataaaacatcaataacatttttggtttagtttatttaaagttatagccataggggcttttattaaaacctcagggtgcatttcctatgtaacccaggcgttgagagtacatgttgtgtagacaatgattgcgctgtgataatccctttgatatccaggaaaaaacaattctcattctcaacctttggaggctgtccttttatttctcaccctaacaacgtccatccagttaaagnnnnnnnnnnnnnnnnnnnnnnnnnnnnggctgctgtgcagttgtaaaagtttatgtcgacacactgtcggaataatcatttgtaaaacagtcctttgttttgtgaaaagcgttctgttccatgctaacacactgttgcacatcgtgttaactgccaggacagatcgatctcacaatgctgctgcttaacattcatgaaaaaggcaaaagcaattttctgaagcctttggattcaggacattagctcactatagcggcaggattgcaccttaggaggccatgttgtctcttacgaaacacaatcaaaaaagtgtcttcaggattaaaataaatgttaaaatactnnnnnnnnnnnnntccaaattaaagacattaaaaaagttcacataaaatgtatagaataaagattgctgtgatcatcatccgaaacaaaaactgtacaataataaaatgtaaaatgaaatgtgtcttgatttgatcattaaaacagtttgaagcatgacttgagttaaactgtcaaacagttgcattacatgctacttgttcaccaa

SEQ ID NO: 182256 - DNA, 661 bp, Homo Sapiens
  misc_feature (197)..(230): n is a, c, g, or t
  misc_feature (251)..(314): n is a, c, g, or t
  misc_feature (340)..(349): n is a, c, g, or t
ccaccagccatttgggaagccaaggcaggattgcttgaaaccaaccaaaagttcaaggttgcctgggcaacaaagcaagactgtctcgagacaaaacaaaaagtcagcatcttctgcccacttttactttaacatacatttatggatctattgtctctttccctgttctaaaactttaaatttcacaagaatgaaannnnnnnnnnnnnnnnnnnnnnnnnnnnnnnnnnataaacagcataaagaagtgnnnnnnnnnnnnnnnnnnnnnnnnnnnnnnnnnnnnnnnnnnnnnnnnnnnnnnnnnnnnnnnnctttagacttattagatgaagacttnnnnnnnnnnggaacagcacttctgcacatatttagcacttgatacatatttgtggaataatttctatcataactagcagctacttcctaatttgatatgtagcatcccgtattaacaggacttttgtgaatggagaggacatctatttattctttgttatgtgccaaatatatttgtattaatcataactcttaatattcctttaaaattaaataattgtttccacagctcttaaaatagaatttaggaacctagcaacatgccactcatccattaacagtgataaattatttaattttataaacttttcattaaagtaac

SEQ ID NO: 182257 - DNA, 1351 bp, Homo Sapiens
  misc_feature (109)..(123): n is a, c, g, or t
ttgggacagcatttataaatttaactgaaacaaatacagaaatcaagaaattggaagaatttatatgtaaattcagggaggttgaaacctaggttgactgggtatagtnnnnnnnnnnnnnnncatacttagatatgtgtgttaatggcattttgtagtattggttagcaagtgacagtgctgccacaaaaactaatgtgattttaggtgatgttgaaatgatggtgactaatctgttgtactccatttctacagaacagttgttctaaatacaaaactaactagaaaaccaaatttctttatactctatttgcatatccaggggtatttcaacaggcaggcctgagcgagcttactgaaaagtaaacagatcccttgggaaatggtcttgccatcactagaaataatacaactatcttcctgtctgttaaccagggatgctgattttaagtgaaatttaattttagttacatttaaaatgcctactctggagtttttatttccccaacttttctaaatggaagtacaagcattggaattgaactcctttacttctgtttcgtcattattggctgtgattatcagtaaaccttaaagagctgtgtatttgcttaaggaatggaagggtagtaaactattctgcttttttagggaagaattccatgtcagaggcagtaaatgttgatctgaatagagaaaccaatggagcttccctcagaagaaaatgagtgacagtaagcttatttggaaatgagaattgccataggagtggtggtaaatgaagccccacaaataactaggcaccagttatcaccatgctgatgatttcagcagcatcttaaaaattagtgaattcttcctacccaggtgccaaggggaggtagagtaactcatggagaaaaataactacacattacagactgactggcagaatttaaggttaacttcatttagaaatcatggactatatatataaatgggcatcagtctaggtcatagtcataggactgtagggaaaaccaggtctccaagtttttaaaagccacatgcttggttatgaaattgatgctctcaaaatataattcaaattcttgttgatctggaaataagaatagtgtgtgggaaagaaagaaattgtatgtagagtgtagtgaaggtaggtcattgggattttaatggaagatgaaagaagccacttaaaactgtttgaaactcatgcctatggtgttctgtaaagctacttgggaagttcagtaaagtattagatgcctggtcatattataaagtagtctctttaacaatacgtgtttgtccccaattatagttacttgctatttaaagcattttcctg

SEQ ID NO: 182258 - DNA, 1809 bp, Homo Sapiens
  misc_feature (693)..(707): n is a, c, g, or t
gggactgggcaggtcaggagggtggtgactgaggcaggggtgcatacagcagggccttcctcactgagctaggcttaaatcccatgacatccaccacatgctagctgtgtgaactcggggacataacctaacattaccgtttctcacttcttcttttacaagatgggataataataggaacgtatggttgcagagctttgacgtgagaatcaataaaacactgccctgcccaggaatcattacagcaaaaatatcaaaatcgttctcatgcagaacaatatgcttgatacaaaactataacagccaagctagttttccaattaaatcatgctattaacaactagactttcccttttctaaggtgtatttccttgtaaatacctaagagacaattctagattactaagttttttgctgttctaaataaaataattctacatatggtgaccatcactgactattaaaacctttaaaatagaaaaagtaaatctggacaacaaattacttggcccactgctgaactgagagttgaacagaaatattcttcaaaaacaggattacctcagattgctttcatccatacatagtatataatcaaatgtggcaaaatcttctttggtaatctaaaattgaataagaagtcaaaacacagtgtttataccattcaagcctagaggatgcaaagcaatactnnnnnnnnnnnnnnnctgctgtatttgagcctgttactcactaataaacaattaaataatttttagggtacttttaagttaaaatagagttaacctatttctcaaaattgtactgcaaagaaattttgtattataaagttccatacaataatcataaaatagtataatgtgtagacacaatgtttatacatcggcttcaattccttagtagcagtgtataatacagtcaacatactaaaatgtcacatatttaatccccttcattattctactctatttttcattccacaagcactgaacatccttgggccccagtaacaaacaccaagctaagtggacagagccgcgtcccatggagctgcccttccacatgggggcaggcaacacacaggaggcacacatgccctggaggaaataaagcagagaggagatacatacagctttggggcagggaggagtaaaagtattaagttgggtggtcagaggtggtcactaagaaagaaacacaggagtgataactgacagtcctcctttattttgattgactatccataatttaaacctcacacagaagagaatgccactcagtatttctactgattgtaacctgaaagcttatgattgttttctgatataatctatgatagtcagggatggggtaaggaaatttaggacaatgtttgctactttttaagaacagtttttatacgaagggatgtaggctgtctgctaaccaagttaatcttagccagtgggtaagaatgctctgtattctaaggccaatggtgactgctgaaaaagagccaaagttttccaaacagagtggctcttgttgtctttgtgggaactgactggctcttggattttccagggagggcaggttttcatggtttgagtggtcagaaaaggatagcctgaaagattggtcaaaaaacataaaaccatcaggatataacattaaaccattaagagattatgaaattagcattagttacagtaactggatatagtcttttgcttatttcattcactttttttcatactgaaatctgataagaaattaaaagaattgtagacaataaatctagccaacttttttgtacaaagttggctttta

SEQ ID NO: 182259 - DNA, 1175 bp, Homo Sapiens
  misc_feature (897)..(928): n is a, c, g, or t
cactgcagtaatagctttccttggttaacaaggatgaagagtgagtctgttacccacagagcatcaacttccataacagagctgcaagcttggctagcatgtgtttataaggaaggttcaaatattttacacctctccacattaaactctgtgggcagtttattctaatgcctacttgaggccagtccccagttccctgtccttgaggaaccacatgggaactttcactcttttcattcaggccagtcgattcacctccactcaggtacccacagagacgatgatgagactgtgcactggtgctgcacttgctcaatcacgtactatttacatatcccccacggctgctttcatgacacagcagcaggagagactgcaagcccccaatgccttaaatagttatcatctcgtcctttacagaaaaagtttgctgcccctgtctaaatgactagaggtgaagataatgtccttacctttagagtttacaacctcatgtacagaaagactaacaaatggccaagaaagaggaaaaataaaataccacctaactagatctgtaagtgagaggggaaaaaaacagttattctgcttggggaaagtgggtatgtgagccagcccccaatgcagtaggatgtctgtacacagtgaaggctggaaaaggctttcaggataagggaccagcatgagtaaaggcatggaggctctacagtgcctgaaatactcagaaaaggagtttgtttggaatcactagaataagatggatgaagaaaattagacgtcaatgaggttagaaaaatagatgtgcaccatttgttattttaaaaacatatttgttgaacaccttctatgacagccaccatgctaggtctgggtatgaatgaccagacaagtgtggcnnnnnnnnnnnnnnnnnnnnnnnnnnnnnnnntgcacccaggctatggagggctttgaatatcacgtcagagactgaatgctattctgtaggaaacacgggccttaaaggcaggtgcagggcagtggctcaatcaggctctgatgtaggaagatgggaaggaggtgggaggtggagcacggtgccatcagagtgcaaggcaggtgatgccgtgagcctaaactgggggcaggagtgggatgaaatgaatgggataggcaggaggccagcagggcaccaa

SEQ ID NO: 182260 - DNA, 1168 bp, Homo Sapiens
  misc_feature (139)..(151): n is a, c, g, or t
  misc_feature (161)..(250): n is a, c, g, or t
cttgaaagacagggtcttgctctgtcacccaggcacagcttactgcagccttgaactcctgggatcaatcagtcctcctgcctcagcctcccgagtagctaaaactaacaggtatgtaccaccatgcctggtttattgnnnnnnnnnnnnnggcaaaaatnnnnnnnnnnnnnnnnnnnnnnnnnnnnnnnnnnnnnnnnnnnnnnnnnnnnnnnnnnnnnnnnnnnnnnnnnnnnnnnnnnnnnnnnnnctgagccaccacacctgggcaacagagtgaaacctgtccctgttttcctgctcttactctcacctccgaggcctcctctgcctggaagagattacagggaaattccaggcagcccttgtcaattgtttttatgaattctttacctgttccttttaaagacaaggaaactgaggcccaaagttctaagttgtttggcaaatggagtctcctaccctcagctcctgcaaggacctgggggacccccaggtccagcagccacatgattctgcagcagacagggacctagagcacatctggatctcagccccacccctggcaacctgcctgcctagagaactcccaagatgacagactaagtaggattctgccatttagaataattctggtatcctgggcgttgcgttaagttgcttaactttcattctgtcttacgatagtcttcagaggtgggaacagatgaagaaaccatgccccagagaaggttaagtgacttcctctttatggagccagtgttccaacctaggtttgcctgataccagacctgtggccccacctcccatgcaggtctctgtggggtctttgggatggatctcctagggctgggctggaagcctcatgtactgttgtcttctaggtaaccaccctgaagagaaggggtggcatcaggaaccgcagggaaccaagcagcctttggtccagtgctgctccttggaacagttgagtgtggcctcaaaccattctcctgggtagctcagtcataaaacaccgaatgcctgcctcaaaatagcctctgagggaagggagctgttgacaagtgaagccctcaggttgtgtgggattccagcaagttattacagcttgtggggggagggagggtccattccaccagctttgaatcccagggtcccctcagcttca

SEQ ID NO: 182261 - DNA, 934 bp, Homo Sapiens
ttgggaccacaataacactaacttgaagtggatgcagtcggcatatttttgaaaatgttttaaatcaacaacttctatttggagagcagatgtaattacaccagacagcagagataataaataaatatcagtgcagtcacagtggtgtggccggagtatcagtgcctcggttgctatgggcagcagaagacacagatgcctctggcatcctagctggcaatgaagaaaaataaacacagaattaggcttcaggttagagaataacagaataatagaggttaggatttagacagaaaaaaacaggcttgctggagttatggaagtgggagagacgaaacaagtgaaaaagaacttctcttcttgtaatttctcatgttcaaggaaaggaaatgtcagcattcaaaattgcagagaatgagaaaacaaatgtgatgattttgatcaaggtcatgtttatgccggtgattaacagataaaatgaagagtccttggcatcataggagggactctgagccagagtgctaaaaggaccatctacttaaatgatggagttcataataagattggagtggagaaaaattatgaagcaagtactcagaaaatgagaatgttaggaggttacaggttgatggctttaaggatggagagaatatacgttatgataaacataaaaaagtggatggtggaacaaaagttgcctgaaattggcagctgtgagtaattaatctttaacatctcttccttacttaagtagaaaaagggcctccatcaaaatggtagtgagaattttatccatcagagacaacacactttcagttgcagatgagacatggaaaatattctcacacaaaatgtggtcaagaaaaggagtaatagtacttatttttctaattgaatacataataatattaatatacattatctgtaaatattc

SEQ ID NO: 182262 - DNA, 840 bp, Homo Sapiens
gttctgccagaaacgtaattaacaccagcagctgtcatcccatcctgggcagcagggatgacacttggtgccatttcccagcttcccccagagcaagcagccctcgtttttcagggatgacctacaacatccattagttgattaatgctggagtctcaaaactggtttgtactggaacttttggctctactagggtatagaagtccaagggagagaaattgaatctcaaaagagggaaagagagaaagcaagctatgtttattccagacctcaaaaggtttcatcaggaaaatagatcatctgtacatttccaaacacaactggcttcttgcccagctatagcacacaggccaaaatcaaacctgaccaagtactccagattaacatgtgtggtcttctagccttgatttctacctcccactcacattctgggcccttttttcccagcatctgccttgacacagacacacattgaacctaccaacaaggtggttatctgagttgagaagtaagtattccctcagccttctaagacacaacacagacctgtgcagcagcaaaaaatgccaggtgggaatcaggaaccacctgtcaaatttaaacagctctcagtgtccagcgagaggagaccagcaaccttccaggtgtgagtggatgcaacagctctctcacctggaggacaaaggagaggattctctctcaaggttccctcagtccaagcactgactacttccctttggagacatagctggcctgctgcagagacacaacctctcagaggaaaggagagtggaaagtgtggatgggaaaggaaggacaaaagaaaaactacacagccaa

SEQ ID NO: 182263 - DNA, 763 bp, Homo Sapiens
ttggattattatctgcattataatattaactgttattttacctgcttataatttagtaaattataagcaactaaattatacgcaagtaaaataagttaatattataatgcagataaaagtccaagtatcacaaagatgatactagaaagcagacaatggaaattagaatgaagagcagtagagctgtcattcactcatgactaaatttgtccatgttatctggtaatgtctgtgtagtgtgatggccagtagatactgtttgtgcccagcccagtttcctttcccaggctagtgaagtcttgggagtactgtagctgctgtgagccttgtctgctcatggttcacagcttcacttttgtaggtgaattcactcagctgactagaggctcagagactcctgtggagttgtgcagatcccttggggatagaacatagtcagtgacctaactgagggaacaaatttatgggtactttcccttcacaattccctgtgagatcaggttgaaatagattttatttagttgcttcccctaccctgttgttcttcatttgcttccttacaggtttctcctaagagcactccctcagtcaaacattccttgcacaagaatctgtctcaggctctgcttctagggaacttgtcttatgacagtggcctgtgacagcccttgttacatacaataggaccaaacaattctttataatggcagatatatgttaactaaaagtctaaatagagagtttacagaatttccgattccag

SEQ ID NO: 182264 - DNA, 798 bp, Homo Sapiens
gccaactttgtacaaaaaagttggcaaaaggcatgcccactgtctcccatggagcttgacagcccatgccattagctctcactgttaggtttctggggaaggttcttctacttgattggaaaatttccaaataaatctttccagaagatactatgcacacagctaagtggcctgtctgtggagtaacccttttgtaaacaaacagaaacctaaagcttgatgttttggggggctgcctgtcatctataggttcatttaggtgtatttaggaagaggatccatgaaaccactggtttcctgttacataataatcattaataatgatttaaaatgtgtacattgattttttttaaattccaaaatacaagcgtatatggtaaattaagtcaaatggtatgttcagtgagcgagatgggcttggggcaaaacaatactttgcttccaaagaggatacaactctcaaggagattctttcatcttgcctttaaggtcatttaaactaattcacataatcttcagaaaactaattcacatcatctattcatgtgtaaaatcaaaaggaagactgttttcttagtctctcgttgcctaactggccatttatactactaggttgattaagggatttgcctttttctgctgatatgggaacaaaaagtcttaagcatttttaaaggcaatggaaaattcagccacatgggggaaaattgatattgtcaccattgagttgctctgtttcttggtgaagagtgaatctaatctgatttccttcttcatcagatatgcctctttaacaac

SEQ ID NO: 182265 - DNA, 925 bp, Homo Sapiens
ttggcacaggtaaaataacctggaatttgcaattggcatcagaatggtggtgggtggaggataaggaggggaagtcttggggactgagacttcaacctgtgggatctgaactacctccaggtagagagtgtcacaattgacttgaattagaggacacccagctggtgtctgctgcagaagtgattgcttgcttggtgtatgggggggaacccctacccctacatttggtcacagaaatcttttgtgttgactgttgagtgacagtataggagaaactgactttgtttttttcctatatcctcaatatcaaataaggaatttgctgaagaaagcttggttttggaatgaagatgaataataatttaaaatacggaaaaagtaatatatttagcaatttgacaaaggctcacggcactcttctttttcagtttaatggaattgtatatatgtgattaagaaaaccaataaagcaaacttctagcattttcccctttaagtgataattaattgtctccttattgagtaattaaattaatctgagtctacagatagatgagttacatggattttaataatttagatagcatctataacttttaagaacctgttaaatgattatgagaatcaaccaggttctcctggtgatgccatgatcataataatctgcactgcatctaaaaacaatcatttggagaattagtttgaaatactgttctttatataactgacaataataaatattttctgataaatgctaacttgatttgctgattattggagagctaagaataataagtgaaaagagatacggaaataaaaggaaaaggaagtacatgctactacttgtctttagtttatttctagtgaaatcagatctattagtcaagacatttagttgcaaagacagaaaatgtaaaatgggaaa

SEQ ID NO: 182266 - DNA, 843 bp, Homo Sapiens
  misc_feature (459)..(515): n is a, c, g, or t
  misc_feature (517)..(629): n is a, c, g, or t
ggctaattcgtaatctcagcacacagaaagaatcatgtgtgtgtgtgtattatatgcatgtgcgtgtgtatagagggcattctatttgtattgtatttctttattatttagggttgttgatactgtaaaataaatgattttttttgagaatgaagatgggtgaaccttgtttttctcatatttaactaaatctaaatgacaggatatttggtaaaaggagatataaagctacaagggcccttgcggcacctgccatgaggtctgtctaggtgaagagctggggaaccaaagatgagcagctgaattttctgttcttgatgttctgcgggagtaatgatgcaccagatgatactgatagaagatattttgataatttacttctttgatattggctctacatgcttttaattaagtatatatatttttagttaaatatgtaaatatatttcattaaaagcnnnnnnnnnnnnnnnnnnnnnnnnnnnnnnnnnnnnnnnnnnnnnnnnnnnnnnnnnannnnnnnnnnnnnnnnnnnnnnnnnnnnnnnnnnnnnnnnnnnnnnnnnnnnnnnnnnnnnnnnnnnnnnnnnnnnnnnnnnnnnnnnnnnnnnnnnnnnnnnnnnnnnnnnngattaattctaacaactccatgattttatctttatcattttatcttcattttacagaagaggaaaagaagccacagagaggttagtgaagtaacttgtccataagtcacacagcagtaaacactggagtcaggcttcaatcccagagcactctggagcctgagttttcttacgtactctgcttactgcactgacaatactgatataagaaacaa

SEQ ID NO: 182267 - DNA, 1535 bp, Homo Sapiens
  misc_feature (359)..(369): n is a, c, g, or t
  misc_feature (732)..(742): n is a, c, g, or t
  misc_feature (887)..(897): n is a, c, g, or t
ttggctattcaattacatttaagtgcttatgcttcattgcttgggcatatccagcatgttatgaactaataactattaaacttgacttaaccagtcattcattaataatttttcaaggataacttagtggcctcctaaagacacttgttttggcactgaccagtttttagccaatttaatctgtatctagtataaataattctcatttttctttgatgatattaacagagtgggcttttccttttgcataaaggctagtaactgtatatgtagcatggatttaattagtcatgatattgataattacaggcagaaaatttttaatcaaatgattagagcttaaatatttgcaggcaagnnnnnnnnnnncctttaagaaaaggaaaaagtacacattcactagaattcttcagaaaatttagtggtgccagtttccatttggtatttccttattaaaatattctagaattttaaggagattgaagggaatcacagtggggtggggagacctgggtttggggaatgacagagagaagaggtggtgagggcctgattaaaaactaagcagaagtagttttaacaaaaatactcatgaaaatgtttggaaactgaaatttaaacaactgtaatattaaggaaaccagaatcaataaatcactgtcttgccagcacagctacagagtaacatgattcaggggaggaaaagttccttagagttacttttataattcnnnnnnnnnnncctcttaggtttagaaatcttacaaatttaaactttatccttttaaaattatttgaacataatttagatattgtaagcttaaaatacaaatgtttatagataacctctttaccataaactaatccctggcaagccatggctctcnnnnnnnnnnnggtgtttaaagcctgtaaacagtttttctgaatgatcatgaacttttcttggtttagcactaggatttagctatgaagagagctcataggctttcaggtgctaattgagatctgccctgttagagtcttggggtgctagattggtcacattgacaccagtggcagggaaggcatctatgagtttgatgctttttatcacacacttcagtgtttagaaagttattaccaatacttttaaacaacactccaagaaaatttgctatatttctttctcatcactacagagagagtagatttccccatagagagcacagcctccattagtaaggttggtgactattggtaagaggtggacttcattgacaccaagtgggaggtagggaaagcccagaaatggcaggatgatatggtggttctgtcgttgggaaaggtattgggttttgctgtttgtatttatactgtataatagataccacgctttttcttattatctgtatatgtattgcttttcatgtttgatattttcccatgccaagatttgtttatatatattttcaatgttaaattaaattgatttgggtaactttcttccccaagaaagtattttcccccttaagtatatatctgactgtggaggg

SEQ ID NO: 182268 - DNA, 461 bp, Homo Sapiens
cttgccagatggaggattttatatcttgctttacagcagcacattatattttctttaccaaggcaatgcattttccccaataattgctgccttttcaaaaagacctattatatgccaattacttgacatattaataagcctcaggatatctatacagtaggaggaaaaaatttcagcaagtttaagtaacttgatcaggagccatggctagcattggtggaattgggattggagcccaggttgtcactaagctccaagctttgttctttacaccaccatccaagcaacttcagatgctgcctacttgctaagatagagtggcagacctctcggcagaagaggtccaaggaggaagcccgcttgagccaccatgcctcacttagcacactgtcaggcccgcagaatcttacttgactgttttatgaaagggctcctctctgctatgaggacaagatggttga

SEQ ID NO: 182269 - DNA, 766 bp, Homo Sapiens
tgtaacaaaaaagttggaaaagtggaattactcggtcaaagaggacatgattcttatttttgataaatacagccatgttttctgccaaaatagttgactgcatttatactttttccacatatggtatatgaaagcacccatatcctcactctgtccacactgtttattttcattatattttttctaatataacagactaaaactatctcatttttatttatattttcctgagcactcatgagattgagcattcattagtgttcattagatattagaatttcctttttgatggcatgttagatatgctgaccaattttctactgtctcattggattgcacaagggcttttatatttttatgaatgttgactctgggttgcagatattttccctcatctgtcatttttctttgaatgtcttatgcttcacaagagtttatatatatttttactgtggcaaagtacatcatataaaatttaccatttttaaatgtatagttcagtggcattaaatatattcacattgttgtgcaatcattaccatcatccatatctagaacttttttatcatcccaaagtctacccgttaaacaataacaacttcacataagtggcatcatacagtatttgtccttttgtgtctgacatgtttcacttaacatgaaacatgaagtaatatcttcaaggttcattcatgttgtaacgtgtcagaatttcattccttttgaaggctgaataatattccattatatgtatataccacatttt

SEQ ID NO: 182270 - DNA, 664 bp, Homo Sapiens
ttggattttattttggtatttacaagaattcccaggtacgaagatatctgcatgggtggaaatcaggttcaagcaacgtactttgcattaactgataatacctcagctgcggggttaaagttttcccagtatagagagactgtcactaggaacattgtattgatttattcaggtcattgagatcttctagatgtattttaaaaagaatgctttttggttatgtgttgctaccacagttaacactccataatgttcatgtcagccaaagaggactaaccaaagctgaaatctcagagaacaatttgctttactaagctgagtcaacttgagagcgaacttctaacaatgccgcactgtagtgtggctggttctaccactatgactttaaaacatgtttatatcatttttaatttttatgatacggtagtgtcagggagaaatgtaatgttctatatgaaattcctttttcaagtttgttcattaataacagttattaatttaaatcagcgttagagtttgtgctgctgcaactgctgtgaaaatttctctgagtaattctgatttgtgaatgatcccagaccaaccctgagattttgtcaacctgattaagtcaatatgaatgattaaaaagatgtgagaacactgactgcagatctttttgtac

SEQ ID NO: 182271 - DNA, 1906 bp, Homo Sapiens
  misc_feature (941)..(955): n is a, c, g, or t
ttggctttgatttaggggatcgtgctttggcctggaaaataagcactggcctgcatgcctagaacctgagtgaaggcagtcaacatcctagtatgaatcagacctagcagaaatgtaaattatttcaagtacttcagggtttagttttcttagtgacaccctggaccctggatgctgctttctaaagtgcacctgatccatgcagttttatgtcttcatataactggtatcttgtgagtttgcaagcaatgggatgagcaagaaaaaaaggacgcatggaggagaaaaatttgaacgaggctagtgcaatgttttgctgatagattacattgttagggagctggtgattttttgccatggtcgtatcgtggacagcttttccgtggaaattcaaggcatctgtattaggcaaatgtgagtgcccttgatcttgtattgatcagtgccaatgtactgggaaagcaggtaccccagtgaaactggtctgtgcttggtttaacagctccaacaatttcagatccatggggctgcttgaccatagaccctgtttactccatgcctgttcaaaagtcattttgacttctagctttgtttcactttcttctttcaatacttctgtttcctcgtccttttccttcatattccatggctatttctttcctactttacagtttcccccagacccagattttttcacacctctgcatcatagacaactgagtagctcccttggcccctcctccatcctctcacaccctgtgctccgttcctcagccgtttggacagggagctccgctgtcaccaaggagcccatgtgagacacactgctgtgactgcctcttgttaatgtcagcatcacctcatcacttaagcaaaaaggaaaatccataaaagagatggaaaatacgtctctttttattttattttaagaagattgggcnnnnnnnnnnnnnnnttcttattctaggccttctcaatttctcatagattttaccttaaactaattaaggccattctcttgataaatttgtacatcagaccgggtcaccagctatgatgcagaacgccagatttttgaatctcaagtaactttctgtgctgctggacaaattgacttaattctgtgcaggcaaacactttgaatcataaggatttttattgccactccattcttactactattcatgattcaaacatctacccctgttctgaatcaggatgttgacacttcttggttattttcagatgaacagtaactgctacactcttgaaagcacttaaaagtgcaagcatgtcctaaatagccatttaacctggtaaaacataggcttttctgtttaattaagtattagaccagtctgtagatataatctgaaaagattttaggcagtaatgaagacagttggggaaaggagaaggccctttaaagacatgaaaccttacacgctcttgggatatttttaagcataataagctcattggattcaggtatttttccctttgcatttttaaaaatacgtatttctaatttgtttgcatatttaattttgtcaaagctgagaaatgctcatgagttgaatttataaatgtcatttgcaaccaaatgaagtatttatttttaaaaagagagtgaaggaaccaacactgatttgtacataataaaaatgtgtgtattatatatatatattttttcctccttgacagtacttggtcacaatatcaagtgtatttttgtacataatatatattgattagaaaaacgtcaattgtctattcaaaaaattctatctctgtgatagattatatttatcctaatctgttgatacctctgttaatttgttttaagagatagaattatattttttggaatttacagagaattgcattcatggcctttcaattgtaa

SEQ ID NO: 182272 - DNA, 784 bp, Homo Sapiens
tacaaaaaagttggcccacattaaggttgcgattcttttagcctcgtcatgctccttgccagcccatccatgtatagggttatgggctatctcactcccccatccagccaggcagccagttacccacggaagccagatatatggcccaaaaatagtgatgatgaccggaagtctctggccttgatttggaagctttgggaggtggaagatgagtatccccatgtatgttaggtaaaccctgaacttaggtttttcataagaacatacatctgaccagagtcatatcagtgaatcatttatatcatgcatgtgctttgagacctattcgaggtatcatgggatgactcctcctaaaagttaagtagaaatgaatcttgcagcttgatttactcactgactggatgctttggcctacgtaaaataagttgaagtagattcagtttttctgaaggcagtagccaccgttcctggggagcctccagggtgccagcgtcatgccaggcactccctgacattattccatttctcatcacgcagcctatgagtaggtggtggtatacccatttacagaagaggagactggggctcagaggtggtcattttgctcggggttacatgaccagtaagtggcagggctgaggttgttcccagggcccttgccctttcctgcttcctattacacaacaggactgagtaaaccctgtacctttgattatacatgaaaccaggtggagaaacagcagctatgtaccaaagaacccagagcaatcgagaaaagctcatc

SEQ ID NO: 182273 - DNA, 905 bp, Homo Sapiens
ttggaacttgattctcagggggaaaagaaaaacttattttatgagaattgtttgttctgtgaaactcacttcacctagaacacatttcattgattcttggatcttagtttatgtggtcatagttgactgctgagaaaaggacaatgaaatgatagcaatttccttttgcttctaggtgatctctgattatagatagcatcctgtaaatataactttattgtcttgaaatgtttattgaagatgctatatttttctgttctgttttctgaagattttgccatttaaaatgatccagtgaaaaatatttatccacattgaagaaagtggatttcccatgcaaattgaatcttcattaacacattttaaaaggctttactgtattaggtaacatagatattaaaggatttttctaggcaagaagctcaacttttttttccataaaaataatttttgcttaaatagtaactcatggttttcttttattaaatggggttgttgtcagtatgttaaacattgaagtaggaggaggatgcatattgtactatgcattcaaatttatcactgttttttctgacagactttccctttgtcctttctagttatgacttgggaatggggtaacttctttatgcatagtattaagggttatagtatgaagaaatcataaaattgcaagttttggtttgcattactctaatgtgggttcatttaatctgagatcttaaatatcttgcagccttaaatcactacaaacatttgcatttttattatgccagttatttccaaaatgtattgttatacatgtcacttatgtttttaagctaatattgactgtaggataatctccttgttcccctcaaatagtcatgaaagtgtacatgaaaatatttttaaagaataaattt

SEQ ID NO: 182274 - DNA, 886 bp, Homo Sapiens
ttggcttcttggaccacccccgccattctctatcctatttctctctcttattttctttgaagcacttacccactttcagaaactatctggcttgctcatgtgtttgtctctagattgtctacttcccctcctagactgtactctccacaagagagcaaagctgtgtctgttgcattcactgttgtcttcccagaagcaagcagcatgctggagaccctcaaatacatgtgaaatgaagggacaccttgtgttatttcacctgtttccacctggttcccaagtggcaagcttgcattgaggttacaaagtggcaaagctgggatatcacatgatgtcaccatgatgctatatgaaatgtaacattaattgagtacctatgtgaccagttctttaattctgtaagtgaactctcaaaaaaccctaggtaagtattatcaactcgaactttaacggatgaggaaactggaattttttaaaaaatgacttaaccaaacatcacagagctgtaaaccaggatttgaatgggtgagctgcactcagccttcatctcaagtcagtttgcctctttctccaagaagccacagttgatcctgaccacatcacatatgagttgcctggattgcagtcattcattcactaagcatcttttaggaggtcacatgccaggcaccgtgttaggtaatgatttctccaagtcacaggagccgtggttctgactttagaaagtttctcatctgatgggagggcaggcaagtaaatcagtaagggtggtctctgtcgggacactggttgagaaatacccaggaacactctgattgagaaatacccaaagtgcaaagtgacagggactagaggcatctccactggaccagagagctctggattc

SEQ ID NO: 182275 - DNA, 1216 bp, Homo Sapiens
tacaaaaaagttgggttttgcttcttgacttggaaccctacttgccctgtgaatttctatcctgtgaaccttcccttctctgtccttaccgttcccatcacagcctgctcttccagtgacggccaagtgatttctctcctgcacgcatgagtccatcctgtttccttagtagctggatggacgttttgccatgaaaactctttgggaagtcttgtgtcctttagtgatttctctcctgcacgcatgagtccatcctgtttccttagtagctggttggacgtttttgccatgaaaactcttcgggaagtcctgtgtcctttcaacaggggaaaactggctgcggcccttccattaggctccaggatcattacctcgtttccattctttcttttcaacagctccccactttactagggaagccaagggatcaacctaatgagaaaagaaccttccctgtagcccacctggaagggcattgcctgccagctccttccttctcacctatgtgaacaggagggaagatgccggcgatccatggatctgtgggacatgaaggacgtgtccatcagaaatgaaagcagcctgggattggaagcgtccacagaagacttgatctgcaggtcttgatttggacctggcactttgacaccaggcgagtcactgatcccctgagcatccattttcaatattggtgagaggggattataatgaatattggctgtgaaggtcacacaagaccgggctatatgcacttgctctgccataaggcagtgtgaagtgtgttcgtgatcacttgtgggcgggagcctgtggctgtcttgcctggactggcttttttaaacatggatgagtggtgacaaatcctgcggccgtgtgcaggctacatccgcagcgagctccgcatatctggtctttgcctttttaggtcatgactgtaatatcaagcttacacgagagttttaaaagactgagcagtatccccttcccctggcagctgctgcttccgtagcatttagggataaacctgcagacactgagaagagagcttcctccctcctggggctggtggcgaggctgcctgttgtggaaaatagggcatgtctcctgtgatgcgaattgcgagggttgccaaagcttcccttccaagaaacttgcttagtgtctggtgtccacagaccagactcttctctcgacagggacaaaaattcttgcctgc

SEQ ID NO: 182276 - DNA, 927 bp, Homo Sapiens
ttggggtgttttatcttttcattgttgttgttactgccagtgttggctgtattttactgcatcttcatactaatttttgcttgcgtatataaaaactgttggatttttgtgagttagttttgtatccagtcaccttactacatttatggtttgttattactttgactattttggattttccaaggaaacaatcaccatctgtaaacactgaaaaacatacctctttccaatttgtatttgcttcttatttcttatgttttctaaatgtagtggctacagtgttactttttgttattatagtataagactacgaagttactgattttcttttttgtctattaagctgatttttaatacttaggcaacattctgaaatcttaaattgcaatgattctttataaaatacaaacgcttgttattttagttagaaaaataatcattttgcaaacctagaattaatgacttgctgagaagcgtttttttccatactgaaaaggttaggaaaatttagaaattactttagaaaatttactttagaaaatttagaaatcacacaggagcgaaaagaacaaaatcctaccactcagagataatcattgtaaatataatggtttatttgttgcattctagagattttttttccccaagtaagctatcttgaacagagaatatgtgttttaacatgtagtgggtgatgtttttaataactaggtctaattttggcaaattggttctttttctataagattttaaacctcagagtgaacattaaattggattccaattaaataaatcagactattttggctaggagggttgtttgtactttcatttagtacatacaagaaaaaagcatatgttacagcatctatttcttctttacttcaagtatatacatattaatagttatttacgagtactgattat

SEQ ID NO: 182277 - DNA, 948 bp, Homo Sapiens
cccatattctctgtatatctgagttccagcaccttgccatagcctccagtttgttcatcaattaccaccatctctgttggggaaaggcatcacatctgggatataacagggcctatgcattgggtgcctgaccaagttagctgaagccaattcggtgaaaccacaggctcatctgactggatgaccctcgagagagcccagatctcattagccgcatgtttgatggcgcctctgtgcagcctcctccttgggacagcctcattttcacactccctgttctttgtgcactttggcaaaagccagaatgctccatttaaaatgttttggatcttggtgttgattttgtctaagtctgtggttgtgcagtacccaccactctggccacccttgcccagctgggagaaatgtgaaaacagctgcctgggatcctaaggtccaggccaagtgactgttgttagtcagccattgtcatcagaggaaacccaggccctgagcttcctacagagccagactgcagcaaggtggtgacagcgaggcctttcttcagggaacatttcatttgggcctttcaaatcacagaaacccaagcagaccttgctaaggcaaaatggaggagatgtgagctcccagaatcaaatgaagagcaggctgcagccaggcctctgggacaggctggaggcagatagcccagtgactccaggaccctctccccatcttctctacgtgtgaggaccagcccactctttcgccttacagattcatttcttccaggtagttggaaatataaccactaaatactcttatgttttacttacactgatgagataccatcctgaatctgtacccgggggagccactcatcagcccagcttgggtcaagtgcccacttctagactgttgagccatgactggtggcagggtcactggagaagagccaacttttttgta

SEQ ID NO: 182278 - DNA, 479 bp, Homo Sapiens
  misc_feature (24)..(35): n is a, c, g, or t
tgagccactgtgcccggcccaaannnnnnnnnnnnagtctctttaatgggaaaaaaattgtcttcatgtcttacacatagtatgtattcagtaaatgctggtttaagtttttgttggttgtgctgttttgttagccatggacagaagcccagtgcaccgaaataacatgacagattgaaggacctcaataaacagtgatactgtagtaacaatagtggtggactgatgaagaagtgacaattgtggttcctccattagaaggataaagagggatgttgtttccagacagctagttctaggagttttagagctaatggaaggagtagagtgagggtagttacagatgacataaaaccataaacctaaaaatggcttaaacaataaggatacatttatgacataataggaagtgtataagcagggcagtttcaggtaacccgatatcaggacccaggttctttgttttttctgttctgctc

SEQ ID NO: 182279 - DNA, 904 bp, Homo Sapiens
tacaaaaaagttgggtgtagtcgcggcaaccaggaggtgcacccaccactagaatttgaacatcctaagaacaggtatttttgtctctgctttgctgatgtatcctcagcaaccggaactgcctgacatctgatcctttctgtgagacaccaggctgttgaggaagaatctatggcaacattgtatctattaatatacagcttctgtatttatcaggcaatggtgcaagacccactcgagcacgctcagctatcatatggaaaaaacaaaaacaccacatttgccttattatacacacagaaccaacagctctttctgagatttgcttgatgaataacatatcctcctggcttccctttctaagacttatctatatttttaaacaagctaaagtgttatcagctgaggcagaatgtaaaatgaaattttgctgcacatacccagaaggacacaggcattgtaggaatacagttttactgtgggagagatttttacagcagatcaataacagaatactttatatggacacaacagaggattttagataacttttgactctagtttgttattcctacaattataccaacatatactttgtccttttaccaacccctttctccatgtctttctgctcatgatggtcttagaaaagagtggcctttttcattagagataaatctcccaaatgatcacccatgtctatgcctacagcacacagacagcatcctctgcaatgtccttagctatttatacaaaggtcaccaccaatcaacagtgccttgatctcaatagccacagtaactgaataagtagttctagttgtacagattaatccagggattctaagttttagaggaatgttaatgccacagcaataacagctttattattattttttatgtta

SEQ ID NO: 182280 - DNA, 620 bp, Homo Sapiens
tgtacaaaaaagttggaaattatcagaacaatttcatgttatacaaataacatcagaaaaatatcttaaattatatggcatattctattgattcatccacaaatttataagtccttaccacctttcattatattggtactaggcattatagtagtgctaggcactatagtaatgctggggtataaacaagaataaaacaaaataagttccttatttcaggtaacttacagtataggtcagtggttcttagcttgctttttaattatgaattcctttgaaagtctagtaaaataatccaacaccattattccccattgcacatacccccagatgttttagacatattttcaattgctccatggaccttaagaaaacttggttggtgtgcagtttggtgtattatgggtaagactggacctggtgttagaaaatctgcatttgaggctttgttctgacagtgtctagtgtaaacatgggcagaccacttaaacctctctttagtcttctctgtagaatgatgataataccatctaattagcaggattgttgttttattcagtgagacagcatatgtaaataacttagtaaaataaaaagcaacgtgtttataatggtccaac

SEQ ID NO: 182281 - DNA, 933 bp, Homo Sapiens
ttggctctctctttaggctcggcctaaaggtcaccttcctttaagaagccttccctgacaagcctgactagaccatcccaccaccccagtgctatctctcacagcactctttatttccttcctatcactcacacagtctgtagttgcacacttgtgtgtgattggtctctcttgccaagaaacacagagggcagggactgtttgcccactaccctgtacctagcacctcacagagggcctatccaggaggcagtcctgctgtatttagcacatgaatggatggatcattgatttactagaaaccctaagaaggccaaggcactattttggagcacaatgacaaacccccaagtgcttttgttattaaggatcttgtgacacttacttcatggctctgcagcccttcatgcctcactgcatgtgttgcacttccattatctggcttggcaattttgtacttggctcatttcttgtgttcaagcaaatcaagatgtctcaagaaataacagctcacacttgtgtacaaattcagaatggatagtttccaaatactctcaagacttataaataagggctaaagagccattttgttttctcacacgacacatgctaatcatctagagaatctttatttccaatggaaataaatcaaagaaacagaagaccagctttcagaatagcagaatgaggacacagtggattctctctccaacaaacatttagctggagaaaattatgaaagacaagcatttaaaatctctagaaattgtcctaagggcatacagcaaatggagaaacattctatgaatggaatcaaaaataactactaaatctaagtgagaacggcaagtgtgtggcctgtgagccacgacccactcctccaccatccaaactcactttctagagactaacctggggctctactccaggggg

SEQ ID NO: 182282 - DNA, 525 bp, Homo Sapiens
aataaagataaaattataacctacaggttctgtttctgtgtttgaacctggacatacagaggttggtaccaaaagtggtgccagaaaaacagaatggtaaacggttttctgaattaattctggattttctggaatgcattagctaatctaattagatttaaagacactatttgcccaatttgcagtgggaaataaaacactggtgtttcatggtaacacactgaaaagagttactaaatttatcacattttatacttgtagttattagaagtatccatagaagacaaggtttagatgaccaatatttgtgaacatagaatgtttcattcaaaataaggagtataatggagtttgttgcttgcttttaactgcactggagaaagtgagaaaacaatagtgcaatattaaatttatcatattttctttctttgtaaggtaaaaacctatagtggtactacaaaatataaatgtgtgaagttgtatattttatgaatacaaactgtcaataaaaggtttatttctatc

SEQ ID NO: 182283 - DNA, 1765 bp, Homo Sapiens
gccaactttgtacaaaaaagttggctcagggcacacattctggccattcctgactaaaaaacttcaagcagaataagcagctataaaatagaaaagaaaaattaaggataaacggcattgtgaaaaaaaaccgagccacacagatgagaattaaaaattaacagccagcaaactcaaaagaacctttgtcctccttgagatatggtgatgatcaaaaagttagcaaggaatattaatcaaggaattaaagggcattaggaatgctatagtattggaagaaattacatcttaacatttcaaagccccatttcacttaagagtaaaatctaatctgatgttttttactctgaattttattcagtaatttttattcataattcatgataattggtaatgtagtataattgttagtaaatgcagtacaaattgttctactgttttaaaaagttttccgcagaacagtgcatttatggcaatgctatgtttaatgagttagggacatcaaatatatagtagttccttattttcagttgtgaaaatgaaatggctaaagcagaagagacgtctattttagtcttttaaaaatgtgtgtgggtggtcttttttcctcagaagcccaaagcacatgtatattttgttatttctccttgctatattcctgagactatactaaaaactttaagaaaaggaacaagaaaaaggtaaattcatgtgttccccactgctgtgtctagaaccaagatcacattatatcattgttaaaattgtgttatctagaaagtgcaatatagggaaaacactctaagaatcttttaaaagcctagtgtttggcttatttgtcagaatatgtggtagtggcatccataagtatcttttaacttgcatttagcaggacaaatagtgtgatacttatactgatgacaatcatccccatttaatgaccagcagtcactgagcgctgtgaaaattcactcagtgataccccgtgttggtcttgaaggaaaccgtacatatgaatttttggatagctaatgtatatctctcaagtgccaacatttaaaacttgtaattatttttgatgtgagtatttcaggtatgttagtataccttcctgccttcttcttaaacatcatgctcagtataattcacattttcatgatgaaaagttaaagttatattcataatgtattattataagtatccagctctgatgtatgtaaaacacttcataaaatgtaaagggctataacaaatatgttataaagtgattctctcagccctgaggtatacagaatcatttgcctcagactgctgttggattttaaaatttttaaaatatctgctaagtaatttgctatgtcttctcccacactatcaatatgcctgcttctaacaggctccccactttcttctaatgtgctgttatgagctttggacatgagataaccgtgcctgttcagagtgtctacagtaagagctggacaaactctggggggacacagtctttgagacagctcttttggttgctttccacttttctgaaaggttcacagtaaccttctagataatagaaactcccagttaaagcctaggctagcaattttttttatttgcaactaaggtaagatatactacaaactaaggatgctgctagactaaggaataaacagcaaggtaccaaaagtacagcaaagccacaacaagggctctgtatttgcagaggggtctatcatgcttttaagaaaaaagaagagtacagaaaaaa

SEQ ID NO: 182284 - DNA, 821 bp, Homo Sapiens
aattaggaaagtcttccaaatgttagcaagaaattgtcactgaatggtaggttttccttttcctacttttctgtattttgcaaattttctacataaattatgtactcagaaaaatgtcatctaaatagaagatgaaaatgaatttcatgaaaaaataactaataagatggactcagattttaatatataaagaacatttttgggcttgttacttttactctcaaaatacatttattattgggcatccaccatgtgccaggcacggggaatacagcaatgaatacaaaagacaaagtcccttctctcttggggctcacattctgacaacaggagatataaaaataaatatatgatatgttaggaagttagaaaatttgaatattttcttcaaaagtactatgaagaaaaatgaagtatgatagagggcaaattgtcaaattcatggcacactttgtatcacagtaaaagtataatttgaagtaaatgtaatattgagcatccttttctcatttccaacattagctgaaaaaaattcagtattccaccattaaaaatgatgcttgctaaagatatttttaaagaaattctttatcagttatagcatatctcttatattcctaggctgctatgagttatgaatacattttgaattttgtcaaattcttatatgtctattgagattatcctatttttcatcattattctataaatataataaaatgtattgaatgattttataatgttaaacccaacaatgctttcctgaaataaacccacttttgtttatgttaattatacaaagtctgtaatttatatatttg

SEQ ID NO: 182285 - DNA, 906 bp, Homo Sapiens
acaaaaaagttgggtcatgttgtcataggaacaactggagaagaataaagtggacacgaaaagggagagtattcttccaacgataatactcacatcgcagaacgcgaaaatcttctgtcaggaggggcgatcctcagagtcactgggctacacaccatcctggagttgcgaggggacagcacagccttcttgtgataaccattccagcacactgtgggaagtacccccagacaggaatactgggcctgatggatcggatagcgtctttgaggtgttattacaaaccgatctggtaaagtcccacgatccctgcagagaatgcgagacaaatcatggaaacaaagtataaaagaatgtcaaaattttagacggttaaaaacccaccagttaagacattttccaaagaacttaagtctctttctacgcaacacagaacacgttgtttttatggcaactttcccctattccatctaagagcagagagtgacagctgcttaacagctgtctcaacaatggattgcaacaatttgagagggaaaatctaaatctagactaaatctagactgcactaaaattcggggagtttttagaactggaaagaagggaatcgttttggcaacacatctcacaccaagcaagagtcagaggccaggagacggctggcacacaccaaggtgttaaggagggcaaaaccacacacaattcccttcggatttgatgaaaaagcaaatcggatttaaaagtcctcgatttcaagccagccgagccaaaggacgatctgggaaaatcagcgcatctcaccgtggggaaggcctcccggagggtcggagaagaggagtggggagagaggggtaaaagtggtgaacgcgatgggtcggcggggagggcggtgtggagcgcgctcgc

SEQ ID NO: 182286 - DNA, 236 bp, Homo Sapiens
ttgtacaaaaaagttggggttattctccttaaagcacattaattgttgttcaaaacaattgaagattgaagattggagaaaactagtgttgggatagcatggagaagtgaatgggggaaatgagatgggcaatctacatgaaaactagaaaaaaggagcttatggagagaatcttgggttaagagtgagttgatgatccgttttgttaggaatttggcctttaagaatattgatag

SEQ ID NO: 182287 - DNA, 225 bp, Homo Sapiens
aaagttgggttaaatgacatttcttaaaaaatttaacaaattgtaagcatctaatgagggtagtcgtgaatacagatgcttacaatttgttaaatgacatttcttagttttaacttttggctcatcctttaacaagtagattacagggctaggagtgcccctacaagagatctttctattccctttttctctacttggaacaccctaaaccaaagttgccttggc

SEQ ID NO: 182288 - DNA, 785 bp, Homo Sapiens
ttggctcctgtaaaactggtgtcactctacattgtgtttgaataacaaacagatgttattcctgtagagttagaatgacaggatttggccttcccctcaggccctttctaatcctaccaagacccatcaagctacctctgaatatctctcaaatctggccattcaagtccatcaaaccctgatggagagatgactaaaaaatacacctggattacataaaaaccctagtcttcattgggaagagggttgaagtgtgattatttcctccttcccttcctcattcttttctccttgcctgacttttcctctctacttttttcttcccccttgcagataaacttcagtttagttgtggtcctctctgagcctgcttggtccagatgacggcctttcagggtcagagaggttgctgaactctggtctcaagtgtttcctgaagaagcaagtccctcctgttcccttcacacctggccaccttcactgattcttcatgagactaggaaagtcctggtgcaattgtcagcaagtcaggtcatgaaagaaccaatggggaagcgccaccttgccacatctctcaaagccctttcccactgccccatcttcctagtggggccgaagtatggctgaccctccagacctctaaaagatccattgattaacagagctggaagagacctcaaagattctttggtccagtggttttccacaatcctttcttctactgaaattttacacagaatagtataagtgtagcaattggatacatccttatttttttgaggcag

SEQ ID NO: 182289 - DNA, 1079 bp, Homo Sapiens
  misc_feature (225)..(316): n is a, c, g, or t
ttgggagggagggaaggaaggaagtaaagagctagaacaacaatgaaacaaaatatctttgataactttttgggggagtacagagtggaaattttgcatttctggaggctttacaagatggggatctgtgcttcagaaataagtcaataaagatacatttacatagatgtttcctccagtattgcttggaaaagccaaaatcaaagtgatgtagatagttacctnnnnnnnnnnnnnnnnnnnnnnnnnnnnnnnnnnnnnnnnnnnnnnnnnnnnnnnnnnnnnnnnnnnnnnnnnnnnnnnnnnnnnnnnnnnnataaaaatgtccatgatatattgtataatggaaaaaaattttaaagcaaaaggttttaccttatttatttcacaagctaaaaccctatatgattatacaaaccaatgtgtttgccttaaaaagataaaagtctggtgtcctctaagaccataccacaaacagtgatcacctctggaattgaaattttatagcagttgtgggtagagagagtttgggagaaaacattcacattttatttcataattcttatatttttaaagcttttctatgagcattattttgatacatatgtgagcagagatggtcccttctaggtaccagttacaccattgctaaacctcgtctgtttcttccaaaggtgtcaggcagcgaacaagacctgccccaccaattacatgtggaataatcacatctgcagatgcctggctcaggaagattttatgttttcctcggatgctggagatgactcaacagatggattccatgacatctgtggaccaaacaaggagctggatgaagagacctgtcagtgtgtctgcagagcggggcttcggcctgccagctgtggaccccacaaagaactagacagaaactcatgccagtgtgtctgtaaaaacaaactcttccccagccaatgtggggccaaccgagaatttgatgaaaacacatgccagtgtgtatgtaaaagaacctgccccagaaatcaacccctaaatcctggaaaatgtgcctgtgaatgtacagaaagtcacagaaatgcttg

SEQ ID NO: 182290 - DNA, 959 bp, Homo Sapiens
ttggctttctacttaatatttcaaggaattactcccaaacaaggctctattacatttaatatttgatatcagtaatgaacaaccaattgcctaaagattagcacatttgctaatggagaagatagtaaagcagataattagaattagtaaatgacctatgcatatgattcagttgtatagttttgaatcctggtattgagtctattagcccaagtgtcctaaggtgccaggtttttgtagtgagtttttttcattgcattgctggcctcctctgtctcatttactatgttaatttaaaccttatgcttccattagtggtaaagtagatagtctttgacttgtgtataaggggtgtgtatgtattttaatgattttgaaagctggtttgaggaattagatcttgggaattaatataacaattattagcattttgatatatttcttccattattttaatgtatattttttatgtatttgtgggtaaaaacatttaatttcatgtcctgctttttaacctactgttaggtaccactttcccattctcacaatgcatcttaataactatcattataaatgattgtaaaatgttctgtgcagtgaacatatgttattcccctatgtgaagaacatatttatacatgtttcttgtatatagtattatctctctcttgtatattgccagaattgattttttaggtacattttgaaggctcttaaaacatactgaacaatattaatcaaaagggataaatttgtattctctttcgagtggttgttaccctatactcatcaacatttaacattttttataaaggtttaatgggggtgtatgacatattgtgctttatttatttaattactgaggtgaagcatgtttatagatgtatttatcttgtgaactttgaagataaatagattttaacattattgcagtcaaacatctttttgtttgtttgttt

SEQ ID NO: 182291 - DNA, 923 bp, Homo Sapiens
gacaggccctgagctcctgggagaaccaagacctttgtgtctggatgatcagtcggggagctgccaccatgaggaccgccacactctaggcccactccacttcaagagcagtggccccttgggctccaaggtctgagggtgatgccgcagcctgtgtggggtgacgggcttgcctcacggtttcctgatggttcaaattgaagtttcattactgatggttcaaattgaagtttcattactgcctctgcgcgtgggaagaagccagcaagcaggtgaagggtcagtgagggtagcggcttggtggggcccaaggttgtcacacgggggggcaggatcaccccatcagggtagagggggcgtctgggggctccagggagggcaagctcatgttggatgaggctgcccttgggaggcaggagaggggaccaggaccagcctgtgggcctctgtgttgctggtctttcagaagagcgcaaggaatccacgttagaaaccggccatctctacagtgacttttggaaggggcattctgaagacctggcttctcccttgtgagtttggagggagggaggggcgacagggagaggtctggggccaggaccccagctccaccccgcccccttcacccctggcattccgggaccctcagtatcctcaactgcaaggtgggtggcagtggtcccaggcggagacaatgctgatcaaacgcagagcccagcaccttaggtcctagcattttggggctggccagggcttcagagtcccagaggcctgagacgtgtccccaggatagggggtctgcccatctccggggtatcctcctgacctcagctgcagcgcctcccccctcccccatccccgcctgggcttcctctgcactcagggctccaggtgaggtgggtgtcaggtccctgaccacccaa

SEQ ID NO: 182292 - DNA, 937 bp, Homo Sapiens
tgcagcatttcaagtaggtgggaacatgtaagttattcactaagtggtgtgcaacccaatagcaattgaacttgaccctgagcaatggagcatcactgaaggaactgaagaaggggagtagtattttttaagggaaatagcccccactatgatataaaacaagggtgggcaaactttatctgtacaggccaagatagtaaatattttccactttgtgagccatctggtatctgactcaaaacttgactctgccaaaatagcacaaaagcagccacagtccatatataaatggatggacatagctgtatttgaataatatttttaaaataaaaaccagctgcagactagttttagccagtgctacaatttgccaatccttggtatagaagataatcttgactggagagaggctgggggcaggaaacaagttcaagggctgctgcaatggggggtgtggcctgtgataggcagagttgggagagagaggaaggcttagagaagacatttcgggaaggagttagcaacaggacctgctgatctattggttttaggggcttaaggaaaggacagtattaaaaatggctaagaggatgctaatttgaaggacctcaggccttggcatcattctggagtctcttttgattgtggttatacagataggggactcatgaggaaaagtctatgcctgttttgttcatgctctgcatggttggttgaatgaatgaactaattatccatctgggtgaaaattgagacatatgcatggccagcacttggacaaatttcagtggaactgagacttaaaaggaaaaaatggaaaatggtaagtttgccagaaaataaggtgaacagtcttatgaaatattgggggtaaggaagtcctgtctaagcagtttaaacctacaaataaaaagatatttagttggactataaaaac

SEQ ID NO: 182293 - DNA, 727 bp, Homo Sapiens
  misc_feature (213)..(275): n is a, c, g, or t
tacaaaaaagttggattcttgattccctcagacctcacatttaatctgtcaaaaaattctgaaggttctatcatattgtgaccattatcatcacctccactgccactgccccgatccaagccaccaccacctcttgtttgatatattgccatagccccttctcctaactggtctcactgctttcactcttgccctctagtctaaacagtttannnnnnnnnnnnnnnnnnnnnnnnnnnnnnnnnnnnnnnnnnnnnnnnnnnnnnnnnnnnnnncagctttttaaaaggattgttcaggttgctatggagagattatagattcacaggaaattgccaaagtagtagagattctctgcaccctttacccagtttcccctaatagtaacatcttacataactacagtacaatatcaaaatcaagaaactgacactggcacaattcagaaagatcttattcaggtttcaccagttttacatgcatgcatgtgtttgtgtgtgtgtttctatgcaatttcatcacatatgtaagttgatataatctcctcaacaagatatagaactgttccatcaccacacacatgtcctgtgtgttagcccaacccctgccctcccctctctgcaccgtactgtggaaaaagaaacacgcacttagtctctaaagagtttattttaagacgtgtttgtgtttgtgtgtgtttgttctttttattgaatctaatttaagt

SEQ ID NO: 182294 - DNA, 1066 bp, Homo Sapiens
cggcccctgcacacacacgcctcactgaagggtgcgtcatataggggaaatgcgctgttgtcgagactggaatgggctgtagtgcactttgagcgagagcggcctggggaccgccgggtggctgtgtcgtcattagcatcattggcgcatgggcagttggatgagaaggaaccattcctgactgtacatgagcctgaaacagagagctcttttacgcatacaggcaacatctccggcttcaacaacatgtcaactgtgttcctttcactgggctgggactctcaggaaagggcaacggtgggcctcagggcccagttctgttctctggggacaatctctagtagattatctattgacctgaagacgcgcttcacctttgggcagatcctgcaagggtcagggagcaggcaacaagtgagcctgggtagaagtcagggctgtgctgtcctaacccttgacatttccgatcattgtattctatgtatggggtaagatcttcacaaagattagacactggatccaagggcagctttctcaacttaatatcatacaagattcaatgatgcttcagaatcaggctgccatgtggggcctgaggtagttttgcagataacatccctttcaaataggaaaacagattacattaataagcagagactgtcacagtcaagtatgtgaattacttggacctctgttcatttgcctctctccctctgcttctggtctgctcaccaggcagtgaaaagagactcttaggcccccgtgactctctcagagatatgctgatggagcaggaggaggaggaggagttggagtttttaatggctccagtgagatggaaaggagtaacctgaagtcatctgggccagcccagcgtctctgtaccaagttcaacctggtctcactcactgtcaagttggaaaggtgattttagtcagcccaaacagctggattccagctctgcagggggttggcagggccaggaagagcccttgtttcctttttcccacactgtgcactgttctagactacgataagccttggatgaaatgccgtttttacccaa

SEQ ID NO: 182295 - DNA, 1256 bp, Homo Sapiens
  misc_feature (160)..(182): n is a, c, g, or t
tgagccactgcgcccggcctagaaccctgcttctcatataagatgggcctgcacctacctctggcatgtttttctttgtgtatttcctgtttttcatcctgtaactaatgctcattatttaaaacactccagttacttttccctttaggcctggcaaacnnnnnnnnnnnnnnnnnnnnnnnataactgtacattttacaaaacacctgaaaggacccagaggcataaatagtattacatgatttatggtagctctggggtgagctgtgggggaggccagttacaaggtctccaagacccgcctccatgtcagtgttggggggtgccttgagcacttcttttatttcatataggaaaatgcacatctttcatttgtctcccaaaagatgatttccataaaaatatacttcaaagtatttactgtacatagacttcaatgattttatttccagcatcaaactaaacatttctaaccttttaaataaatggggaatttagtttcatgagaatttttactgacaactaataaacactgtatgtgtacatattcatatacactgtggactggagaaagtcagtatggaaataaatttcactgagatccagaaagtagcaatataggacttttaggggtatgtattagtgtaaataatatatgtgcagtctaggctaatcattttaattaaaaacaaataagcatacttttttgctttaaaaatatgccctcaaaatggtgggggataaaatgtaagatattctttagctttaattatttttccatcttattcaagtcagagcacttttttttaaatagcaatacaacaggcaagagaatactcaaaaatatttaaaactgtattgataccaagagtatgttttaaatattttctaataaatacttgagcggtttttgtctggcaggcttccaaatttgccaaaattaagcgttcagtattttcaacacatacgctttttactggtttatactgaactatctgatgagaattcctgtgttcccaaagcaactgatgtttacaggtcttgtgtttctcctcctcctttctaaggatgagggaatccacaacagactttctctagaaaacactaatgatggacaactttttggtgtcatcaatgagttggctactaccttgatgtaaaaatttgtaaggaaaattttcaccatttcgagtgtcaagtgtatttttaactgtctggtttgtacttttatgacttttgtactaccaaagcggagt

SEQ ID NO: 182296 - DNA, 1171 bp, Homo Sapiens
  misc_feature (248)..(296): n is a, c, g, or t
  misc_feature (313)..(422): n is a, c, g, or t
  misc_feature (441)..(549): n is a, c, g, or t
ttggctaagctccacttcttcatcactgcttcacatagcaaacgactttgttccttcaccgagaagacacattctttcgaaagagctactgctgcttttctctgcatttaaaaatatgtttatgctcttctccttccaaatagtcaccaaagaagtatatgttcctttctaagactaacttttcctcctgtgcattgaatcctaaattcttgatcttttcccatctaggctctttatccatcagggcnnnnnnnnnnnnnnnnnnnnnnnnnnnnnnnnnnnnnnnnnnnnnnnnnagacagtatctcactcnnnnnnnnnnnnnnnnnnnnnnnnnnnnnnnnnnnnnnnnnnnnnnnnnnnnnnnnnnnnnnnnnnnnnnnnnnnnnnnnnnnnnnnnnnnnnnnnnnnnnnnnnnnnnnacacaccaccacacccagnnnnnnnnnnnnnnnnnnnnnnnnnnnnnnnnnnnnnnnnnnnnnnnnnnnnnnnnnnnnnnnnnnnnnnnnnnnnnnnnnnnnnnnnnnnnnnnnnnnnnnnnnnnnnacaggcatgagccaccatacccagcctatgctgtgactttagacaagttaggaaagtacctagcagagtacctgggacataagtaggttttctgtaaatgtttgtgacctttggctccgttgtgaggagagactgagcatacattactccacgctacaaataattaactatctatttgatttgactttcagtgtggagtgcagagctttttttctaaaagtgctaataaagccagtcctcattaaaaatatagtcagatgagtcagcaaagcaagttatttcaaaatttgaagaaatgagacaaaacaactttttgagtaatactataacctatgaaaatttggcagttagcaattgaaaaccttgtactttatcatctgtcccttaaccatggcctaccattgaggagaaaagattagagagcttgacataggccacaatgaagaggttctgaagagtcaaactattattgctttcatttcataaaccacactgttaaattcatttgtgtgtttggcatgggtgtgcacacatgtgtttcctaggttaagcatttaggaaaaacattatgaaatatgacatagacacaaaaaagtttattaaaaatttatgtgagcaaaaa

SEQ ID NO: 182297 - DNA, 1989 bp, Homo Sapiens
  misc_feature (1703)..(1711): n is a, c, g, or t
ttggctgttctctaacccaaggggcagtgtaggtggttttaagcccacagaatattgagatatttctcttgtggttttggtggggtggtgggatgcagaaggttattaaagatcaatttaagcatcagatagactatcccttttatttttttaacttttaggttcaggggtacatgtgcaggttgttatataggtaaactcatgtcaagtggttttgttgtacagattattttgtcacccaggtgctaagcctagtacccagtagttattttccctgctcttctccctcctcccaccctccaccctcaagtaggccccagtgtctgttgttcctttctttgtgtccttgagttctcatcatttagctcctacttctaaatgagaacatgtatttggttttctgttctgtgttagtttgctaaggataatggcctccagctcagatggaatatctctatcatatagacctgttgttacagggcaggatcggatgatggacactgaagtcctcagcttgctaagttcagttgctctccctagcctccttttggcttcagagtcttttgattccatctatcctggtattttttgtgtgctgatgtttagttctggattggtttcagctgtgctaataggaagggcgttgtcttttcaagcaatcttaaaaggtggtcaatcaaaaggccagagtctgaatcccttctgtggcttaaataatttgaggatcaagtccagtgtcttgttaatccctgttctactgtgccagacactatcttgaatgcttttatatgttcaggttcaaaatcgctctttcataccaggggatgatagtaacgtgtaacttgcaatagattccttcatcttagtaataagatgatcagtctagttaggacaaaatagagattgaataaattaacttttccaagtttacagagtaaaaatgagcagatctctgcctggttttgtgaaaaagagttagcactggtaaatagaatatttctactcctacaccattctttcagtatatcatcactgaagacaggaagataggcacacagattcttcctcgtagtaattcatagtgcactaggtgaaagagatgaagtatgtattaaaagtacaatgtgatggcatttattattcagataatcccaggattctagaagaaaataaagaagagtgacagttcagttagggtgtgaacttccagaggagcactgcttaagctgaacttgagagcattgtgcaaaagcacagtagtctgttaagaactagaaataacctagcttgtgccacttcgggagtattaagacataagcctagaaaggtaggcaaaggttagatcttagactgtcttgtatttttctcattcctgttgattacctacctcaaaattgaatatgtttttcctcctgcctaacacaaaactactcaagggcagaaatttaaattcttccttggtgtatgtgcaaagaaggttgaatatattcatgcctaccttattttggactaggaatacagtagtatactttccgaagacttgcctgaatagtatataaggtggaggcaactgactagttaggtcagtatttttagaaactcttaatagctcatactcttgataccaaaagcagccctgattgttaaagcacacacctgcacaagaagcagtgatggttgcatttacatttcctgggtgcacnnnnnnnnnttctcaaaaagcaaggacttacgctttttgcaaagcctttgagaagttactggatcataggaagcttataacaagaatggaagattcttaaataactcactttctttggtatccagtaacagtagatgttcaaaatatgtagctgattaataccagcattgtgaacgctgtacaaccttgtggttattactaagcaagttactactagcttctgaaaagtagcttcataattaatgttaattaatacaactgcccttccatgacttttacctttgccc

SEQ ID NO: 182298 - DNA, 971 bp, Homo Sapiens
ttggccacatcctgccgtttgtcagtttttgcccccgcctggctcagggtaccaggatgtggtttagcttaggggtggttatagtggcacctaagttctgggaacttgcggtgggggcgaccttttggacgaaaaataagctgcagggcagctaggggagggggcttgttatattcctctgggggcagggtgtccctaactgggctcagtcggaaggaacttgaccaaagtctgggctcagttgggcatcactcaggctaatggtcgtgtgctggatgccatcagagggaagtaccaatggtaaagtggaaacaatgtgcagctttcaactgggtggaggctgctattctgtggacagtgagatgtttccttggcactgtcaatagacaatctgcgtagagaaattccaagctgaaagccaataatgttataataaaatagagattcttcagaagatgaaaggaattaccagcatggaaattgtgtcataggcttaagggctaaagaagaagccttttcttttctgttcaccctcaccaagagcacaacttaaatagggcattttataacctgaacacaatttatattggacttaattattatgtgtaatatgtttataatcctttagatcttataaatatgtggtataaggaatgccatataatgtgccaaaaatctgagtgcatttaatttaatgcttgcttatagtgctaaagttaaatgatcttaattctttgcaattatatatgaaaaaatgactgatttttcttaaaaatatgtaacttatataaatatatctgtttgtacagattttaaccataaaaacattttaggaaaaccataaatcagttcctttgtttgtatttttcctcaagttaaaagtctatagagaaagactgaatttccctaacgagattaagaattgctttaagactagaattaaaacacacttttattacatctttttaatg

SEQ ID NO: 182299 - DNA, 1316 bp, Homo Sapiens
  misc_feature (894)..(902): n is a, c, g, or t
  misc_feature (979)..(991): n is a, c, g, or t
ttggcaacatttgaaggcctacagtgtgtatagagaaaacctcatcacaagatcataagtgttacagttttagggaatcaagatattctatttaatagagctatagtaaatgtagtcaattaaacctgatctcaaagcttgaagaagctgagcaaaacagggaaagattgttatatttgtctttatgaaattgggatggaatttgctatgcagaattgaggtttgtggctttgctgttcctgtagggtgcatgacaagatcccttctcttgagaaaggaaaaaattgatcaccctagcagcagtgatgcatagaaacctaattttagccacaccagtcaatcgaagctaaaggattttcttttttgtttcttcggggttttattgaaggggctaggggcgggacgggattcttttcagttttgtataaaaacaaagtttactcatgctttatattatattgtgattgcaagcgttataagcgtgtgccactggcctcctattgttgatgcttaggtaatggaggcctgtggtgagttttatggtgacttgggcatgtcttattcaaaaacaaaaacataaaacacagaaacctttcttcagcataccaaggcaagcagccatttcatgactcacttaacacattgcagtgtaccagtttacagatgatttttccctttttgcgtgacatggcagttctaacccccagagaattccttatttgtaaattggaagtttctactatgccttacagagcttaaattcagaagtttgtgcctcatatctgaaacaaagggaaataacacacccattcaaaagtaaataaatctcctagaagtttttgtttttaacatttccatataaagagctctgttgaatgtcatgaatagactggnnnnnnnnnttttaagaacctgcatatgttgtttactagcagatgacaactacaaaaggaatctgaagaacacgtaaaacttgtannnnnnnnnnnnnggtagattaactagcaggcctattttaaaaaggtaattcagctaaagggcaatttacttttttgtacttcagactatcttgattgtcaaagtgtacgaactgtaattttaaaatttatactgccacatgattgtaaattttagttgtcttaagttaggaattggtgaaaagctatttatgctggatttgggtcaaaatgactttattttgcaaaaaaataaataatgggaagaaagggctgtataatgaaatactgcaagactcacataattggttgggaaatttcccttcaaatcactaccgaattacccttgatttccctttg

SEQ ID NO: 182300 - DNA, 496 bp, Homo Sapiens
  misc_feature (29)..(40): n is a, c, g, or t
  misc_feature (411)..(422): n is a, c, g, or t
ttgggtgacacagcaagactctgtctccnnnnnnnnnnnngagttactcttccttggagtttggcataactaggcacagtgtcctaaaatgaaggtggaaagctgtgaccagggacatgccagtggtggaggaagcctgagaagctgagctgccttcctttccctatcccggtgaccacattgtacttcgtagcctgctcattaaattaggtatggggcaaaaaaccaagataggagtgcaaatttggttaccctcttcacttaactaacagtgaatctagaggttttcttcctcaaataaagctttattgcagttgttggaaagacgcagagcaccagaaatctttaggaaatagtagacataaatgttctggcgttgatgcatcccctctccattggcctctcctgtannnnnnnnnnnngaagtgaacataaactcaagattttattgtattcataataaaagatgacacttctaaactgggaacataagaac

SEQ ID NO: 182301 - DNA, 587 bp, Homo Sapiens
cttccatgccttacaagagggatgactgtattgttctgtgaaatttttgtcccagctacatatttgtatgtatgtatgtttttggtccggtataattgtataatatttcttactatgggttaaacaactttataagacattgtgaggaacctggtatcctctggactagatcattcccgtagacagttccattgtgcacacatagtatttcgttaaaatcaggtgactgtttaaaaattaaaaagattttagataaaaatctagatttttactttctcctgaaatatcagaagatggggtctaaattcacactgaggccaagcagtggtaggctcattttaaagaagggctttctgctctctggtttaccccattgtatactaattagcctggtcttacttttatatattacctgaatagccacttatggcattttgaacacgtggcttgcattgctttgtctttttgaaatccgctgtggcacgcccaaaccttgcctttggtgggcttaagtaatgtctggtttccactacaaaggcaaaagcaaatgaggattattagtattccattttgccctatggatattc

SEQ ID NO: 182302 - DNA, 1230 bp, Homo Sapiens
  misc_feature (590)..(674): n is a, c, g, or t
ttggtgagattattctcagcctatttcattatcaagctatattattttattaatgtagtttgatgatcttacagcaaagctggaagctgtatcttcaaaatatgtctatttgactaagaagaagttattcaacaggagttattatctatgaaaaaagtacaaccagaatataaaaaacttgaggaggataaaaagatgttggaagaagtaatattaaatcttaaaaaacatggaaactgcacattggtgaagacacattggtgaagtacaaaaatataaattggatgtagaagaaagggcaatgcaggcaatagaaaaattagtagaaatccctttacaggttagtttgtaaaatcaggtaagtttatttataatggctttcatttatttcactgcaaattatattttggatatatatattgtgtttcctctgcctctcttatagcaatttgccttgtagagttctagcaaaaaggtggcatctgtttttactttcaaatatttaaatttccatcattataacaaaatcaatttttcagagtaatgattcttactgtggagtcatttgattattaagacccattggcatnnnnnnnnnnnnnnnnnnnnnnnnnnnnnnnnnnnnnnnnnnnnnnnnnnnnnnnnnnnnnnnnnnnnnnnnnnnnnnnnnnnnnggttcatctgcgttgctctaaatgggactgtttcattattttgatggctgaagaatatttcctagtgtatgtatatgagagtttcttgatctctttatctgtggatgaacagctactttgaaatatatgatacatttgtgttaaggctagtcacgctgctgtggaatagaaggtcagaattgatcactatcatctgagagtaactttgtacccatcactgattccttccgagactgcctccacttccccagcagcctctgatttcttcatgtggctgcagatggcaggatttcccaaaggtttatggctgcaacatattccgtggtgtatctgtacagcagtttcctcattcctgcagctgtgtttgaacaggtcatttaccatgcggtcctccaggttcaacagtatggctccaaatgatgaaatttcattctgattttctggctgaagactattctgtttgtgtatgtccaccacagttactttatcccttcatctgtgggatgggcagttggttggcaaaaaatttgaactgggagatgaactttattatcca

SEQ ID NO: 182303 - DNA, 1563 bp, Homo Sapiens
  misc_feature (907)..(917): n is a, c, g, or t
ctttgtacaaaaaagttggcagagtttgacctaaactagggtgttaccggcgctatgttgaaattgtctggaggcgggctttcccagcgagtctccattcagcatctggaaaaagtgtaaccagaatggaggtgtctgactctcctgtgctctctcagcgccgagctctagctgcaggctgcctgggtggccttctcacaccctcccgtgcaggagactgcatttctctttcccacagcccagcagatagctcattggcttagcaatgggcacttaacagaatccagttgttgcagccagaattaaatgcaccagtctggcttaaaccaactggaactcatccctggggtgaaggtggctgggaattagacaagagtgtgtgttagccaaaaggcacatgcatgctgtcagcaggagaatgaggagcactggttctgggcaggcagtggcaggggctccctcaggcccctgattcccagcccacagctctttctactctgcagacagagttccttggagactggccctgcattcaggcagggagcagaggggtccctgcctgcagcacccagagctgaacctgaagctacaaagatgggctgatgaggtggcccatgaggtgtcagcaacatcccaaccccctgggtctccccagtgagtcagggcactgatttgctatagctggagctacatgcacctctcctcccctcagccaccttttaggggagaaaggagggcagatttgtaacctctggttctctgcagggatcctgggctggaagaaagttcataaatggatgaatgccttttaaaactccagcttttccaagcatcattcaccaaagcatttggttaggcttagagagaaaagctggatatgagaaaatagaatgtaaaataggagggnnnnnnnnnnngaaggtggagagggcagttaagatctgggtgattctttagggaaacggctggttgagaggctttgatggaatcccattctctgctgtggccagaaggtggtgctagaggccagtcccacttggatgtgaccctggcctctgccaggattcaaaccacaaagaacatttggaactgggatgtttgctttgaagcagcccgaaaacaagtgaaaggaaaccaagataactctctctccctccgctggcaaggatcaaaaataccttgtgcagggaagcccgagcctcgaggggccactgcccagctaaagatgactggacaccagccatgcaccatcaggaaccagcacctgtcctcacccctgagaagagccccgggggtatcattatatccatcgcagacatctggtttgcagcaaatgtggctacacgccatcaggattatcctgccctgtggactgggctagctagttttgagatagagtcaacctccccatttttgtttgtcatgaaaacaccagctcctgcacccctggggtgctacctgacacctgtgcaaagaaaaggaggaaaacttagaagaaaaggcagagacaggcagacagcatctcacagcttgtcaggatcaggcattaccgactattttttc

SEQ ID NO: 182304 - DNA, 1075 bp, Homo Sapiens
ttggcttcaaacaagttatttccttaatccacaagcagtggttacacttgctttgcattcttgtctggttcctaactctagagcccttctccctggcttagccagtaagctgagcccctggctgcgttcagccggcccgcctgagagacactaggggaaatagcttttgtgggcaagcagggtggccggtggtgctcagcagtctttccagtggctgtgtccctcctccaaatgtggacaggccatgacagagtcttagcccaagtcccacagatccccaaaagttctgttgattgcttcaggggatcagtgaaaattagggaattttgtgtgttgctatatacattttttctggggagatgagcttctcattgagatctgtgactcagaatcgactaagccaccataagtctggatttctccccagctcccaaggcccttttgggtccagaagacctgcatatgggctgttgactcatgcaaatgaggtatctgaactgcagcttcagtattagcagagccacaggccgcctctgtggcatcaccagggtttctctgaagaagagggtctgcattttcctaaacccagtgctgctctcccatctcccatcttcctctcgcagcttgatgagccccggtgtgtcccaggtacacccctgcatccaggcagcagcccaggccaccccctcctcactggcccttggctcctttcttgatgcctctgttgcttgtcccccaggagtcggagaagctggaaagtgtgaatgctgaactgaaggctcagattgaggagctcaagaacgagaagcagcatttgatatacatgctcaaccttcatcggcccacgtgtattgtccgggctcagaatgggaggactccagaagatgagagaaacctctttatccaacagataaaagaaggaacattgcagagctaagcagtcgtggtatgggggcgactggggagtcctcattgaatcctcattttatacccaaaaccctgaagccattggagagctgtcttcctgtgtacctctagaatcccagcagcagagaaccatcaaggcgggaggggc

SEQ ID NO: 182305 - DNA, 896 bp, Homo Sapiens
ttgggttttggttaatattgtattcttttttcgtaactattttaccgtgagagtaggtcattgggttacttagatatttatttttacacagttattagtcttcagatagttttattttacttcatatgattttagtttttgtcagtataattttaaatcatgtttttcttggtcagctctttgtgtatattgtgtaattggattttcattgactgcaagtggagtgtttgccactcaattcagtactcagtactatggtgacttgttttcaaataagtctcagatacacatttagggagcctttgctggccgaatatagactctgtcaggacagcaggtcccctgatctaagaattttccccaatggttgctctaaaaatgctgctattttgctgttcactgtattgcacttagttaaaaagaagataatgtgaaagatgagagcagttttttaaaggatcttttcatatacccaattcccttattttcagatgtcccatcaattttagatatgaaagctttaagtaaaagtgtgtatgcctttctactgtcagaacaggatggatgcagcctgggtcagatttatttaagataaaaatcatgcagactcatcattcatatcataggtgaaaaatgtaaaaaccaaatggtttccactaaagccaccaagatcttttagaaatgtttgcacctttggtggtggcacaggaaaagagaagaattcagctggagtgaattctagaagtagatatcagaaacggggcatgaagaacaggggaactgggtggcatcagactcctaaagaagtgagttaattttccttcccttccattcagattcatgccacagctccatatcttgagtatgtgtaagaggtgagttcctttcttcaacca

SEQ ID NO: 182306 - DNA, 709 bp, Homo Sapiens
ttggtgcttcctgaccatgtcaaattgaccatgtattgtcacagaatgaaaacctctttgatagactttgtaacatttttgaatattacattcaggagtaaaatcttacgcagtgtgatcccagctatctcttcacttttgagaataaccttaagtaattaaaggataattaaatatgtaattaaaaattgaaaaatataacagctacacttccagatgttagcttctttcagaaaattttaaaatctctttaaagaaaggtaaattgagaccaaaatagattaatagctttataaaaataagtgctcaaggagggtgttacatgtgaaaattaaacttggaatttgtcattttacccgtaaaattactgagagtaatttccttgaaatggaaataactttacaaatttttaattaacaaaaatgctgaaatattactccgcttacctttatgtaacctcttccttgaaaacaacaatttactcatctggtgtgtgactctgataaccttcaatcattctctatatctgacaccatgactagtaacttagatctttaactaagcaacctttctttccacctttgtgatattatatctagtaatttaataacagacaatctatgttgcaaattaaacttccaaattgaatagtaattttcaaatcccaaggacccatttcttctgcctcaatcttaattaggtcttagtt

SEQ ID NO: 182307 - DNA, 1391 bp, Homo Sapiens
  misc_feature (328)..(359): n is a, c, g, or t
  misc_feature (361)..(436): n is a, c, g, or t
  misc_feature (518)..(634): n is a, c, g, or t
ttgggccatttttcctgtttgagaaagactcaccagcttttggctggctcacagattggctttccttgggtcaggacccacccttttccctgccagctttggaagcttgacagaattcgagtgtgcagtggtggtaaataaatagtaaggaacacagagcagtcctggaggcgtgcctccatctgctgatgagaaaatccagtgctgtcatccagcccaggtcccagcggaatgggcctctctgttcagtaggatccccctcctgctgagtggttcatggcatgtttctgttcaacgcttttccatctgtaggattcttattctgtannnnnnnnnnnnnnnnnnnnnnnnnnnnnnnngnnnnnnnnnnnnnnnnnnnnnnnnnnnnnnnnnnnnnnnnnnnnnnnnnnnnnnnnnnnnnnnnnnnnnnnnnnnngacgagggagatcctcccacctcagccttccacgtagctgggactacaggcatgcaccacaggcatgcaccaccacgccagnnnnnnnnnnnnnnnnnnnnnnnnnnnnnnnnnnnnnnnnnnnnnnnnnnnnnnnnnnnnnnnnnnnnnnnnnnnnnnnnnnnnnnnnnnnnnnnnnnnnnnnnnnnnnnnnnnnnnatgagccaccacggccagccttctcatttgttttttttataaggaagctatctcttcttccctccccaactagggtattctttttccctttcgtcactttgctcatgtactgtattccttcaacttcattaatgaatccatttggaagcagtgaaaaaggcaactcagaaagctaagaagaaatagatagaggaatactcagagctatctgagtattttctttagtttgttagctctttggagctttgaaactggaaagacccagggagtgatgtggagaaagagactgagcttgtaagacacaggagcagtgagctaagggagatggagtagtggggacaaattctggcacattctgtctacactctgggtagatagaggagggaggatggagcacccatggtgggggtatgttggtgacagcattttcccaccagccagtgtaacaagtggctgatttgggggaaagatggcataaacaaatgagagaatgtgtttactatttgatgtagatgggttatttgcttcatttttcaaatcagtgtatataatcaagaatattcagcatgtttgaatagactgtcagagctggaactctttcattaacatctctggcacctttagttttagccctgaacattttatcttaaaattaaacattaccaaatgccttagtttatttcatttattaaatttatattcttatttgttatttatatcagcttccaatcagaagactatacatcctcctaggaaa

SEQ ID NO: 182308 - DNA, 814 bp, Homo Sapiens
ttggatcagcttctttgggggaagaaaacccaggatctctggccacttgactctgaggctgccttgcagaactgcacagcctccaccccacccactattttcgtgaccccgaggccacggcccaggtgccattcatcactgtgcagcatggctttcctgtgctagaggaatgtttatctcctccatccagccatggagagcaggaaaatagagttcaatatggctgggcattgcaacgccagcgcctctttctctgggggaagactctcccctctgtataagttgcagacacccactcttgtcacacatttggctctgcccacctggcctcacaggcatttgagtttgtgttccacccctccccatcccagagcccagcagtcagcagtgagagaagccaaatgtgtgcagggagtgcgaggcggcagctaccatgcaaactccaggggcacaccgccccccagtaatctctccccagagtgcatcaggcaataacaggaagatactcagctgttcattatgacatgatttcccattttcaaacctgacaagttggtcttgatgctgttattcaaataactgaaagtaaatggttgtgaacaaggaatttcagatcacagactcagtaagcctggccagcccccaaggctgtgtcttccttaaagttgggatctctgtattatctcatactctatagtagagcaataaacataagctgacttatgtgatcacttaaaactaccaggaagaaacattttccgtaataaatttagtgtagattgctttgtcttctcacactcacttttcagaaaag

SEQ ID NO: 182309 - DNA, 1939 bp, Homo Sapiens
  misc_feature (493)..(501): n is a, c, g, or t
ttggcttagaggaaacagaaatagccaaggaaagaaagaggagatgaacagtgatacctcagtgcagaggtcacttgtggagcaaatgcgtgacatgggcagtcgagactcggcatcttctgtcccccgcattaatgactctcaggaaggaggatgtaattcaaggcaagtttctaattccaagctgcctgttcatgttaacaggacttctttttattctcaagatgtactggttccctggcaccttaagggaaatcctgataaaggcaaacctgttgagccatttggtcccataggatcccaggacccaagtcctgtgtttcatcgttactaccatgtgttccgtgagggagaactggaaggtgcctgcaggactgtgagtgatgtcagaattctgcaaagctactacgatcaaggaaactggtgtgtgattcttcaaaaggcctgattatttacctgaacacatcatatataaagaagaaatgctcacttnnnnnnnnngagagaataaattaattacccttttaattaaagagaaaacttgtgggaaagtaccaaaggaaagctgagaaaaatttggaagtagggattcattaggagacattcaaatgtctcctgttggctgacatcacagatgtggtgttggctcctcctacttccctaggagaggtggtttctaaaagtgattgaagcagtttgtgcagtgtttgtaattcttgggtaagagcccaggattttgaagataatagttttttagtaaagtgctactaaatgtagtaaatcatgtaggattttagggatgtaattatatgttaatacagaaaatagtcctggtcaatagaaaattgtctgaagttttacctatgatttttagctctgtaaaatcatagacaataaccattctatttccatgcctgactagcccagggctggacgtatagcgggtgtccaataacgtttagtcaatcagataatacccagaacttagtaggagtttcattcaaaaactattttttgaacccaaccatgtaccagttactattttaagtactgataatgaagcagtgaataagaaagagcaaagctcttgcccttatggtgcttacattctagacggggagacagacagcaggcaaatcaataaatagatactatgtgccagatagtgataaatgccatgaaaaacataaaatgagagacgattcaccttggagcaaaagattacttttaagtgactgaaataactactaatcctgactaatttattatcaagagttaattggtattccaaattcattgagcagggtgctaaaaacaacccaaatgtgctcctttaactcctttgtttaaatgacaaaagttagaatgtggtcactcagacctaactgtgcccttagagccaaagctgtggtgtcattattggttatttctagttgattcatagtttgtcccaatccaggttcaatcgggttatttttaagatctgtacaatattgcataatagtaacccagttaacttaccacttaggttagatttcctggaggaacaaaggtagaaattcaaccataggtcaaattatcacatagaaggaaaaggctttttttcaaagaaaaaattttttgaacactttactcccagtatgcattacttttgtagtagtaatgcttaaagactgttttaaagaaaaattgctttctgtttaattaaatgtttactgttattaatgctagtgatacttaatcttgaagcatcaagttttcagaaaccctatagtgatcaataatgggtctcagatgagaggatgattattttttttcatgggaaattcagtcccacatcctggtgtactgggtccctctgggatgaaatttataaacgctcatgatataggaaaaagaatataagggctaaaaattagttttatttctgatataaatt

SEQ ID NO: 182310 - DNA, 1657 bp, Homo Sapiens
  misc_feature (958)..(1002): n is a, c, g, or t
  misc_feature (1285)..(1293): n is a, c, g, or t
ttgggcatttcatttaaaattattttataaaatattctctgcataaaatatttagattagcacacactattgaaatacaatcagaatgtgtctttcctaccatgaataaatttagcaaacttttttttagacaagattggttctagactgtgtattaacaattcttccaacttgcttgatttctaatttgataaattctttattcttttgaaataggaattgtattgcatctttagtgaacattctctgaagttttagctagtcatcaaacccttgaaaaatgaagtttatgaattgttttgagttaaagggtcaatattactacttattgtaaataatagtacaataccctctggctgttttttattgtgataaaatacatgtaacataaaatttgctgtcttagccatttttaagtttacagttggtggcattaaatatatatttaaaaattatattttaatgtatctgataagttatgtaaatcttatctgataaattgtttaatttttagttgatgaaacatatgcactgcctgcaacgaagatcagccgtgtagagacacatgctacagcaacgccgttttctgtaagtacatgacctggtgatgatgcatgtttacacatgattatgtacttttaaatgctgagcaacttctaaataatttcataaaaagattctcaggtctcagtaatgaactgacataaatttagaaataaatgattgaataggaaaatgttcacagtataatgtttagtgaaacagctggataaaaaataacatatgtgttgtgttcccaattttattaaaaaatacatgcagttcatacatttatactctcacatgtacccacacataaccactctgaaatccaggtggggggccacagatacttttgactttcttctttatgctttttatatttttctataatgcaatgttatttttataatcagannnnnnnnnnnnnnnnnnnnnnnnnnnnnnnnnnnnnnnnnnnnnaaattacattaatggttaaaagataaggtgtgttatggaacataaaacttgaatggctgtattgctagctgcttaataggagcacaacagaatattgcaatagtggattgacataaatgtagggtagcccaataatctctgatatttggttgtcttacataggccaaatttggtatgcatggcaccaaactttaaatgccaggaaagtgccttacaaatataccaagattgtcttacttagataaatacaaggataatacatacatatatgtacttttgaggnnnnnnnnngttattagtcatttcaacttaatttctgtgagcaagagttttcatttgacctaaatttaacttttagaatctttaagaattctctttagtttttattttctttcaatcatgactttatgggttatgaccatatatttacctttatcagctttcatctttccagaatgttaagttctagtgtttttagactcttcttagggaaggattactaaaatgaattttttttctcttgagtctgttttgccatgcatcagccagaattgtatttgttatttgagttggagccagttgttttataaaagttgttgaagagagttttacactttatagaatgaaaacaagtttaaagctattactttttttt

SEQ ID NO: 182311 - DNA, 1129 bp, Homo Sapiens
aaataaatttaagtggattctgatactatgaaaatacaaaagtattgatttattgagaagtaatcctgtgcatatttgagggtctggcactaatggttattaaaacatgttttctgaaggaatgtaactgacctcttttctatatccttgaatgtgacagactctctttgggaatttgcctccttagatgacgtgtcattcaaatcatcaccttaaaaaggaaagagtatttttccataattaacaacagacctaaaatttatctggtaaactaatgaggtttaacctttaacattgtttagttagtgaattatcatagaatatctttatttaacatacagtatctgagaattaacttatcaaaacaaagtgggaattagaggagcagagaatgttcttacattgtcagaactgatttttatttatttgaagcataaagctgcatacattcattctttattctattctatcctttttaaaataagactgattgttccaaaatgtaaactttgaaacattcaagtgactacgaccaaatatggtactcattacaagctaaacaataaatcggccctcataaagtggggcaataaaaaagaagctgcatgctttcaagtaacaaatttattaaaacaaacattcagctggggcatgttaggcagattgtagtcatccccctctcactcccattacccaccttttttgtccaactaattcattccacagagaaacacaaagagtaattattcattcttccttgtagcttatttttatatttgttttcttaatattaaaaaaatgcttcttttagtgtacagaagaaaacagtcacccataattccaccacctaaatataacaactagtaatatgttgatgcatttctttgtgggtttttatataaagatatagattatataaaaacataatattttaaaatttgaacctaaatagaaaactaaaaacagaggtgagtgctgattctgctttttaggcctgtctctttgttattaataatcttttgaaaaatgattttgttgcatcataatttattaagccattcatccattgttgggattcaaataattgttgttttaggattataagccaacttttttgtacaaagttggc

SEQ ID NO: 182312 - DNA, 1260 bp, Homo Sapiens
tcatctctccaatctgtcagattgaacacagtatagtagaagaaggatgaagtaaagtgagcaaaatcttatgtctagtccctgaagagtgcccacatgcaagacagcaagacctcagtgtctgggaactgtctatatctgtcattctgaccacatgtcacctctgctggctgtcctttcattctccagtgctcagcctcttcacttacactgtttccatctgctttctcacctcctgcagactagctgcagcttgaaaatcccatctccctcaactatgcttattctctctctaaggggccttacatgacatcagaaatacttaatgatacagtctgagtcatacacatttggattactgtaccctcattttagcttgcccaacagtactaagtgaatattctttttgtaattataagactatgagtgattctgggccccttctaaaaaaagaagtcacactctaagataacttgccatcgtgaatctgcatctaagctttgccatcacttttaatgcaagtgtttcaagaaggatgacaggtagataagtaggcagacagagagacagccatagacccagatctggacctgtgcaggtgtagatatatggtatagatcctaaatatagtcatggttaaagacagagctctagagtatctcctgcctcatctgtccctggctaactggggtgatgaaggctgctgtatgaacccaggaagggtggtgggggtgttccctttaacatagcccagcagtggtagtcttctgaacataggcacagaaacatttccatcagcttacacagttctttagactcacaagaaactgagtttattgttaagaatgccaatttattactctaattgtagctaaagctaggaatgaggatggatcagccacatgcagagggcatatgagtgatcatatacaagttcatggtaaggaaaacacccagagaatgtttgccataaaaatacttgcaccatatcgatatagcctggggtaatttccctttgtactttaaggatatttatatctcaagggcattttggttcaacatggggcaactctgatgagtcattgtagctgcagggcacccagtgcggtcagacaaggctgtcattgcacttgcatcacagctcaagattttcttctgctccacctggctctcatgtgaacaagagctggcccttgtgtattacatttgcatttcctgtatacctatcttggctgctctattcactacctttttatccaa

SEQ ID NO: 182313 - DNA, 925 bp, Homo Sapiens
tagagaaaagaaaaagtcttgagtgctggacaagcctgtgactcaggactcggaatgataaacaagagagaaatacactgagtttctatgatagtcactaactcggggctgccggcactcgtgttcccctgcagaggaaaggtctgcgtgccctaagagagagctgctggcgtgcagagagaagcagagatgccgacgacggggaggaaacacactggcggtggtgaggctccttccagcagccacagccctggttcctctcagtctgtgaccctcccacatccttcccatctatgagagcctgtaaactccttttgcttaaccttgttttagttaaggttttaaacaattgccaccagtgtgccctaaccaccccagtggcttgagtgtttctccgcttcttttgcctaggatgctgcggagatggacaggacaggagactaaggaggtgagaaccctggcccacaccatcactaagggcccttcctgaggtctgcttcccacatgaagtcctcccagggccctgaatccagccatccacctccttgttggacataggctccattagagagatgcggggctccagccccccttgctctgcctccctgtgagaagttgctgacagtgaaggaaaggtcagtgagtcctgctaattaaaaaacactttgccccatccgatttcccctgacacaaggtcactcagcactagcgcaattaagtctcagcccaggactgactctttttaactcaaagggcgggagggaactccaggaccccagatggcaaactggctcacaccgtggacaacctcccacaaaagccctcccagggtcccctggtacccactagagaccacacagcctgccagctctgcctgctgcctgactcactgcagacgagtccatccacaccacaggccctgccc

SEQ ID NO: 182314 - DNA, 896 bp, Homo Sapiens
ttggtgttcgaggagccgaggaagcagccagcagggaactacagcctgtccagtgtgctgcccaacgcccccgacatggcgcagttcaagcagggagtgagatcggttgctggaaaactctccgtctttgctaatggagtcgtgacttcaattcaggtcagtggaatggggcagtgctcactggctatgacggtaggttcagcagtttgaaaatgagacctgcttcaatcttcaactgctggaaaattcaattatatattattggatcgatatgtttgctacactataacccagaacattatgaaaaccagaaattataattttatatttaatattttctaacggatgactctaggggaattgttagaggaattgtcatgaccattgtccagtttttttcctagattggaacagagaagtattaagaagaaaactgaaattatctgtaatgccacatcacagggataacctctgttaatattttggtatatttttagctctagatttctaaggatatttttctatacgtagattaaaaagatatacatatctatctttttaaagttaaaaagggattatattgtatagagggttttatatcttgctttttctctgtgatgctgggagcatttccttgtaatgaaaagttttcctaaaaccacattctattgagtgaaaacataagccaaggatggcgcatacttgcgcatgagagtcgaggccatctgtgacgatatgagtggctcgtttctttgcaccttcttgtttacgtcaggctattgaagaaggattgtattaatgtaaaacgctgctaaaggaagtaggactgaaaccgtgtggactctggtgcctccaaaggagattcctggtccccaggcagatgctgctctagctgc

SEQ ID NO: 182315 - DNA, 795 bp, Homo Sapiens
  misc_feature (142)..(154): n is a, c, g, or t
gatttttcccccaggatttgtgaagtgtgcacaaaaaaactcagactacattttgaggtttatccaagtgaagcgtaatttgaccataactattaaaggttattttttatattactacttcagttgctgaaggttttagggnnnnnnnnnnnnnaatcagcagcaagcagaatgttaattaatagtctaagatgatctgagagttaattaatagactaagattatctgtggtctatttattgaccacaccttataaacaggataggtttttcctattttgagactttacatgtctcagtactttctaaattgaaatcagagcattaaatcaagggaattgatgtggacaaaacagctgccagcatgatagtgtttgtgaattatgtacctctcttagacataaactcttagacataaactcataaaatctgttcagaacactgaacagatttagatttaccatagccaataaaatttggatttagtgggttagtctcagcatttcatggaatcctgagatgcccaaatctctggaaacttcctatttcctgttttactatctttttccttttatcaaaatgggtgccatgagggtcccagaccaaaactcaccatcctgaaaaacaaaagtctggggagagaactcctgttttattttcagatgatatatttgctaatcatagaataagttcagatcataattataaataggatttctctgaagcaatcaatctgtatttttaaagcttctccttcagacctccagtatctagtcatcgaagtaacttgggttta

SEQ ID NO: 182316 - DNA, 1790 bp, Homo Sapiens
  misc_feature (393)..(405): n is a, c, g, or t
  misc_feature (1449)..(1458): n is a, c, g, or t
ttggggaagtttccagagatttgggcatctcaggattccatgaaatgctgagactaacccactaaatccaaattttattggctatggtaaatctaaatctgttcagtgttctgaacagattttatgagtttatgtctaagagtttatgtctaagagaggtacataattcacaaacactatcatgctggcagctgttttgtccacatcaattcccttgatttaatgctctgatttcaatttagaaagtactgagacatgtaaagtctcaaaataggaaaaacctatcctgtttataaggtgtggtcaataaatagaccacagataatcttagtctattaattaactctcagatcatcttagactattaattaacattctgcttgctgctgattnnnnnnnnnnnnnccctaaaaccttcagcaactgaagtagtaatataaaaaataacctttaatagttatggtcaaattacgcttcacttggataaacctcaaaatgtagtctgagtttttttgtgcacacttcacaaatcctgggggaaaaatcttttttccacgttatctgaaaaactatatggcgaagataccgctgaaaaataatttgttttatgaaattcctgaaaagctaattttgaattttttaaagtaactacctcccttttgtgtcctaatgtccttccttcaaagctgcttatagtttagaaatgaaagatgtcatgtctcatgctttgactggttttcggtggcatatttgatgtatttgccaagtggcattactgactttacagtaactgttacattattttgtactatattgctttatgtggttcaaaaatagtatatgccatattgaaatatgtaatcctcatgttgtgaaactcatcatgtaatacaaatgaaaatcattacttaataacttacaatttatccatatgtagtttcaatatgattgtgtctatgactgtaaaacaaaactgaaaaaatatgtaatgtatttctgttgaaagcgtgaatgtactaattttttcctaatctttgtctagaagaaagattctatgtcattcattgtacagctgctctggggtgttacacatttaaagtacaatccaacagttgtttgaaagtcagcctctcggctttgtttcatgtgactgctgacacttctcaagtgttctttgcataatgaggctggattttgtgcttcatcgttcattttaaacaattgaaaagtctcatgtggaaaccaaagcaatctagaaccagcctgttgggtgactgtgtcttctgtaaagccatattgaagtgaagttatacataatagcataaggttccacattttcaaagctaccactacctctgcttttcctctttccctagaaaatgccaagcaaaattccccaacactaagtgagaaattagaagtaattgttttataattaagttgctgggnnnnnnnnnnaacaccttctaattcatcactttgtagggttatgcaagagtttctgaataaccattcttacatgtttatattttataaaaaccggctgcaagaaagattcagaaagaatacttagtaagtcatcatatgaaaaaccaacaaaaccatagagtgcagattttttcctaactataagtcacctcatagttgtccaaagccatgataatgatatctcttacaaattgacttctgtaacccccctagaaataccccttttccttatttgattttagtcatcaaacatagtatgatatggggaaaagtcagccatttaccagaaattatcttatttt

SEQ ID NO: 182317 - DNA, 988 bp, Homo Sapiens
ttgggtgattccttcgttattatttatgcatgttcatgaacttctgctgtacattggaataggagttaacacattcacatttactgtctattttcttgtgtgccttatgagatggcttttctgactgtatctcaatagtctttctttctatgcaggtttataatcagtacaactactgttttctaaaatactactactcaaggctcggagtttgtatttaaattacactgaccaagtaacaatgtattccatttcaggaactgaatatttgactgttaacctttttcccatacgtccagtgtggcatggagcatatggacttgacagacatctctcacccagacgcccacgtgtgaacacacccacatccacatctctgggtggaaaccagcctagagtggggacgacgctaatggtgttgctttagaaccgtcttttcttacccttttagactcgtgttttgtatgagacaccattgcaagaaaattttatccctccagaagtattttattactaaagaacaaaagcaaaaaaagcttaaattgcactggttaaagtacagtttccaacagctgtccttcctcagtactctaatggccactccaccgcgagtggaagtcactgttgtgtgtacacaggtggtcccaatcaaaactccatcttttgagcccaattatgtccattttgttatagactaaatcaggggtttgttctacaagaacaatacatgttttaccctttcctttaactagaaggataactagtaatgcatcaacataatttctgtattaaccatcatgcgcacaagaaatacatagtaaataaggaagctgaaaactcctggcattggatcttaagctagatgattagaatgtgaaaaagattttacaaatgtaaaacttctatttctctgtagaaactttcttcactttgctgtgcaagaagacactgctttgctatatttaaaatggcttttttaaaagagatt

SEQ ID NO: 182318 - DNA, 922 bp, Homo Sapiens
  misc_feature (138)..(146): n is a, c, g, or t
ttgggtctagtgcaccaatgctgatgtgaggggttgtgtatgcgagtgaagaaaatgtgtattctggtggcctgaagctttactggacaaggatgtgtgagagtgcagagatatatttagtgacacagtagagaggcnnnnnnnnngctaaaattccaaatgtatattttttcgtattgccctgtcctcacccagaaatgatcaattcctgttactgtattaacccttgttattaggaactctaagccatgccagaacaccgtccctccccttggaccgtgtagattctgccctgggtccctagccccttgcagtgataaataactccagctaaaagtgtttggtgttcttatctccaccctctttcctactttgcttaccctcatcctcagacagatgcctcttgcttttaaaagttggatttaacgacgtgttgtagggttcttggtctgtgtgaaggcagagaccagagagaaggaagtgagcccactgctctcctgggagcaatgtgggtgagtccaccagaggccctgctgtgtgtggccaataaattttagtcttccccagccctcgaggcagtgtgtgtggatgtatgcgtgtggatatttatatatgtaccctgcactcatgaatgtatgaactggaggaagttactacagtggaagggttcttaataacaaggtctacctagcatgaagtatttaacattctcccatcccttaaaaaatatacatttttataaaatgaaaaccataataaatgttttgaatattaaaaaaaataataacctacagaggaaaattaatggagacagctatttgccttgtactttttccacaattgttgctgctagtatacacatctctagttcagctcttgcccacgggacactcatcaattaagttttatttttatttctttc

SEQ ID NO: 182319 - DNA, 839 bp, Homo Sapiens
  misc_feature (204)..(212): n is a, c, g, or t
actttgtacaaaaaagttggattgactcaagctttaaaaacaaaaagtgtgactgaaaaatttttacagagtctagtgcaccaatgctgatgtgaggggttgtgtatgcgagtgaagaaaatgtgtattctggtggcctgaagctttactggacaaggatgtgtgagagtgcagagatatatttagtgacacagtagagaggcnnnnnnnnngctaaaattccaaatgtatattttttcgtattgccctgtcctcacccagaaatgatcaattcctgttactgtattaacccttgttattaggaactctaagccatgccagaacaccgtccctccccttggaccgtatagattctgccctgggtccctagccccttgcagtgataaataactccagctaaaagtgtttggtgttcttatctccaccctctttcctactttgcttaccctcatcctcagacagatgcctcttgcttttaaaagttggatttaacgacgtgttgtagggttcttggtctgtgtgaaggcagagaccagagagaaggaagtgagcccactgctctcctgggagcaatgtgggtgagtccaccatgaggccctgctgtgtgtggccaataaattttagtcttccccagccctcgaggcagtgtgtgtggatgtatgcgtgtggatatttatatatgtaccctgcactcatgaatgtatgaactggaggaagttactacagtggaaaggttctttaataacaggtctacctagcatgaagtatttaacattctcccatcccttaaaaaatatacatttttataaaatgaaaaccatataaatgttttgaatatt

SEQ ID NO: 182320 - DNA, 966 bp, Homo Sapiens
  misc_feature (108)..(124): n is a, c, g, or t
  misc_feature (139)..(255): n is a, c, g, or t
  misc_feature (278)..(700): n is a, c, g, or t
gggagcagggagaactttattgaggttatgaatatattctacttgaaactggaaggataagtggttatgaatttgtggcttatggtaacctttgttaagcatctttcnnnnnnnnnnnnnnnnnggtgagacacagatnnnnnnnnnnnnnnnnnnnnnnnnnnnnnnnnnnnnnnnnnnnnnnnnnnnnnnnnnnnnnnnnnnnnnnnnnnnnnnnnnnnnnnnnnnnnnnnnnnnnnnnnnnnnnnnnnnnnnatgtgccagcatgcctggccaannnnnnnnnnnnnnnnnnnnnnnnnnnnnnnnnnnnnnnnnnnnnnnnnnnnnnnnnnnnnnnnnnnnnnnnnnnnnnnnnnnnnnnnnnnnnnnnnnnnnnnnnnnnnnnnnnnnnnnnnnnnnnnnnnnnnnnnnnnnnnnnnnnnnnnnnnnnnnnnnnnnnnnnnnnnnnnnnnnnnnnnnnnnnnnnnnnnnnnnnnnnnnnnnnnnnnnnnnnnnnnnnnnnnnnnnnnnnnnnnnnnnnnnnnnnnnnnnnnnnnnnnnnnnnnnnnnnnnnnnnnnnnnnnnnnnnnnnnnnnnnnnnnnnnnnnnnnnnnnnnnnnnnnnnnnnnnnnnnnnnnnnnnnnnnnnnnnnnnnnnnnnnnnnnnnnnnnnnnnnnnnnnnnnnnnnnnnnnnnnnnnnnnnnnnnnnnnnnnnnnnctgagccaccgcggctggactgcgcccggcctagaagggcaattattttatagtaacttaatacttaagacagctatttgttagagcagtctcaggatgacatcttggaagcttcattagcagttctagcttcttatgcatttgagagtaacaaatcgaattaaatagtagcttttccttgttattttagattggcatgtgccaccaactgcaatagtgaactttcccagtgcgtttttaaaaaacattttatttggtttattttt

SEQ ID NO: 182321 - DNA, 1038 bp, Homo Sapiens
  misc_feature (70)..(82): n is a, c, g, or t
tgggattacaagtgtgagccactgcacctggccaaaagctattaattttaatagagtctaacttacaagnnnnnnnnnnnnnaatagttaacattttctgtggcctgtttaagtttttttagcctatgccagggtcaccaatatactctgtgattttctgtgaacactttattgctttatttttcacatttacacttgcaatccatctggaattggtttttgtgaattgtatgaggtaggatcaagctgcctttcttccacattcaattgatccagcaccattaattgaaaagagcatcctttccctcattgcactacagggtcactgttgccatacatcactctattatgctgcctttgtaatggaaaactataatgaggacttctagaagtttgtatgtgtcacaagttttgtttcttaaaaatgtatgtgttagaatatgcaatcagagtcagttaatgtggaactccctgtcttgccatgccaacatgaaaataatagataaaatattttatagagataaatatgtatctgagattgaaaataaggaagaaaaaatctttagctgccaagaaagaagttaagactctcagtgctgagagagactgaatccacctaggtgataaggtgactggacccagtaaaccctttgtgtgctggggggttttatgccttgtagaacccagtgtgagcaagatttgggtaccctacatacattcagtagccaggaaagggtgattggattgccagactctgcctgctggcaaaaggatgagctgtagaagctgaagtcctaggtagtagatataaagaagaaaattaggtggcaccttctagactgtgcaatgcatggatttggaattgaatttttcctctaattattctagggaaaccctgggctaagaaaccaatgtaaaacctgatgaggtagtctgtagtcacactgggtagaggtagaggcaaccacaaaattattcttaagaatgcctcccaggcgcctggaagatgaaactttctggtgaatatgagctcatggt

SEQ ID NO: 182322 - DNA, 1442 bp, Homo Sapiens
taaaagccaactttgtacaaaaaagttggctagttgttcaccttgtttagagtatctatagcaaaataggttacatgtagtttgaaataaggtatcctgagttactttggcaacaagttcttttacccttacccgtggtatttgaaaaaaatcaaggtaactgtctgaatactttaatatcagcttgttttgtgaattctctgaatactgtcaacactcttatctaagtttgcctttatgatgcagtggcagcattttgaattacttttcaaagaatactgttcatatgcattgtttttgtgtttcaaactaaatacaggcagttttgtgccagctgtgatattgtgcataccatatggaccattttaaagaaaattttaaaatttcaaatagattcaacaattacattacttgctttcacattttaaaggcactttaaaaaaatctacttctcttgtaggttttgcggctagttggctattcaagaaacctcgcccctctgaatgtcatactgtaatctttaaggaagaaagctacatgaattaattgtactctatgggaaaatttctttggaaagatattttgtaaaacttttttttccaagtaaaaactttatgaaacttggtctcaaaaatgttgtgaactttatgattcaaaattgagtacagatatgtccttgattcatatgtatgctacatgtatcacacaacagatctggaattctttcagttcctcagatacttctcccttagtttttgcagtttcactgggattatgttttgggaaacaaggaaaggtctagatgcttaaacattttaaataaaaattccttacagtttcatcttcccaacattttcattctttaaggctactttcctactaactgaaataacacatttacttttaccacaattcctcaaaataaatttattctaacattgaaaataacattacaagttaatcattagcttgatgcatgctaaaatgtagcttttaaaaagcattctgcattagtactaaaataagccatcaatgccagtccaccctctctattcatggctaaatatttaaaggttatttatagcttctttaatgaattcttcttaaacaaagtgaaattatgtcctagaaaagtagaagctattcgtaactagagcagtgcaactttaaagttttatgaatatgtattttaatgacaagggggcgagcttgcatccccactagttaatggataattcaaaccgaggactgattttgaaagatcacctaaaaatgtagatttgttctttagtaaatttagatcaactatgcatatattttgtaggtaaatctttcagtccatgccccaaccctcaccaaaaccaaagcagaaattacacacacaaagatgctcccgttaggaattgctattcacatgagctttctgtgctagatttttttct

SEQ ID NO: 182323 - DNA, 905 bp, Homo Sapiens
ccctgtggaggtcaggatagtagtcggttgcggaccacaatctgcagccagcggatgcggatctcagcgttcatcgagtccagcagggaggagtagcacttgacaggctcatcaccacctcctgcggcagcggggacccatcccaggagccggtccaggaagagtgctgtctggaaggtcctccacttggagatgtcaatggcgctggccgaggcagctgcctggtccagaggttctgcggtccacagctggaaaagggcctccacgggccgggtcaggctggatccctgagacaggtccggctcagccagcggcgggcctgtggcattgagccagcgctcgaattccagccctagaggggagaagtgaccctggggtccctgcccaggctaggaaggggctgcctgagcaatctgcccaggagaccccagaccctgagtgtgttccaggcaggtggcctgttccagggacgtgggctgttcaggaaggcggagtcagctccagccagcactgccacttgaagccactgaaggggcttctgtgaaggggtacagggaagcagagacttgggttggtgaccaagggactcgcacccactccacgcctctcctgggtggaagacaatgaagtagtctaaacccaacctcagtgctggtggaggccacctgcgccatgaaccagcaggggcgggatgggggcaacaggctcttaagatgatattcctgctcttaaagggcagtgcccattccctacccacaaaaagctcttgatgcacttgctgtaccttccaaaacttggtgtcaccatgcacagccctcccagtggcacctcaccaccctccagcaattctggcctctccctcaatgtctgaaccctgcagtgccttcctgggccccaagccccaa

SEQ ID NO: 182324 - DNA, 267 bp, Homo Sapiens
atttctcggaaagctgaggatgggagtgttctcagagtttccagaggaactcaattgtgatgaagtcacaatgattaccctagagtaatgccgagggccatgaaggctaaaggttcgggtatgaattacgggttttaaagaagacaggaggcaaaagttagtggtggggaaggaaggtgtgggtgaaacttcccctgtcccaccccaagaacaggtggtaagatgtgagcagcagctgccagaaaagaagaggggccaagcaagact

SEQ ID NO: 182325 - DNA, 800 bp, Homo Sapiens
agttcctgtagaagaatggtctgattactgggccagcttttttttaaaaaatttacaaattgtaaagttcagttagttacccacttatcccctcttcaaaaacaaaacaaaaccttttatttgacatttacagtatttttagccttttgacatatcctgcacatgtatcattattctgaaataaagatcaaagtaaaatagatacttaaatactattttttattcctttccttaatcccattcttaaagactagagcccaaaagcctcacaatttaaaatatatatttgtttgcgtgtgtgttcctagacaaccaaaaaggtaaatttgattttcctaaggcttgaaaatctagcataataccacagttctcattaccaggcctgaccatccttcagtcactgtaacattgctcattgttcagtattccttattgctcagcactttcctttcctgctgaagtagaggagtttctctgtctcgtggtaaacttgttttcatatttgtcaattttcctttcagcctctgcctgtgagtttctggatattgtagagctgctgctccagtctggtgctgaccccactctccgagaccaggatggctgcctgccagaggaggtgacaggctgcaaaacagtttctttggtgctgcagcggcacacaactggcaaggcttaatcaaaagactggaaaactgcagtctgtaatagcataaacttccattatgaaagaaaactacaaaaataatacttcttttccacccgtctttggtatgtattgggctaataaaatcagttctgtg

SEQ ID NO: 182326 - DNA, 1785 bp, Homo Sapiens
  misc_feature (312)..(423): n is a, c, g, or t
  misc_feature (602)..(610): n is a, c, g, or t
  misc_feature (636)..(752): n is a, c, g, or t
  misc_feature (754)..(768): n is a, c, g, or t
cctttcaccaaaatattagctgacacaagaaatgttgaaaggttagctgccttagctttattgctgcctataatctccaaagatatctgaacaccctagaagattaaatgtagcaagaagtggaagagaaacacagtttataagtcatttaataactataattgcatagaatttactcacttttcaaatacttattctgaatgaataccaaatttgtgaaacaaaatatattctatggtgcttagaatggttgttaaatggtgagttagttttccaagtaaaaactttacgtgcattaacagaggggaatgnnnnnnnnnnnnnnnnnnnnnnnnnnnnnnnnnnnnnnnnnnnnnnnnnnnnnnnnnnnnnnnnnnnnnnnnnnnnnnnnnnnnnnnnnnnnnnnnnnnnnnnnnnnnnnnnctgctgggcactgcaaactaggccacttttaaagtaagatcattttaaattgagtactcttacttacaaaatgaacacattaatgtgataattgacaaaatatttcagatgctggacttatagaaagtttaaggaaaaccaagattaaggattccagattcaggtaactctctttatcnnnnnnnnnagacaggggtctcactttgtcagccnnnnnnnnnnnnnnnnnnnnnnnnnnnnnnnnnnnnnnnnnnnnnnnnnnnnnnnnnnnnnnnnnnnnnnnnnnnnnnnnnnnnnnnnnnnnnnnnnnnnnnnnnnnnnnnnnnnnncnnnnnnnnnnnnnnnagagacagggtgcagattagtggctattgttagcagtcggaggagaagggaatggggactaactgcttaataggtatagggcctcctttgggggtgataagaatgttctccaactagagagtagtgatggttgcacaccactgtaaatgttctgccaacgaatggtacactttaaaatggtgaattttatgatatatgaatttcacctcttttaagttccaaataaggcatcagtgtagcggaggtcctctaatctgtctggttggcaaagcacctagtagtttacagtacagaagaagctttaaaaatgcttttaatttgtataaagtgcaaagaaaaagaatattgagaagcacatgaaagaatataaaatggctagagcctaaaaaataagctaatatacacgcatagggacacatctgcatatttgagcatacagagacatgtaaatactcaggagagaaatttgcttttcctcataacttattttgtgtttctccaaaacctgaagagtagataacagctgacagttacccccctcgagtgtgacaagaggtcacgcacagggagggcctctagctgccatttcctgttgcttccctggtcaaacaacgcaggcggctaagtcactttaggaaacgctcaacagggctcccattgttccaacctcaaaattccgagatacaacgggccccattaatacagacagcttacaggctgggggatggtcccttagtgtgcagtccactttttattgggacactgaattttcaaaaacactgacttgcacaaatagtgttaattattttttttaaatggtacagaaataaaattcaaacgatactaaactgggagtcaggacacctgagtcttaccctcagctctctgatgcgactttaagcaaagtcgcttgctctttctggacctcagtttccttgtttgtaaaaacagaaatgatttctaagccaacttttttgtacaaagttggctttataagaaaagcactgctcatcaatt

SEQ ID NO: 182327 - DNA, 1356 bp, Homo Sapiens
ttgggtaagtctttaccaaatcttagaatgaaccaggaataaatcaagtgtttggatttgaatgttacgatttttgttgacaaagctgtaagaggggcacaatatcaagtcctttatttcactgttgatttttgcagtaccttcacaaatagggttattttgcctaaatattagagggcacttcactttttcgaagggcatctcttaatctatgctattcaaaccattcttttgagacgcataacctatcattaccccctttgcttttcttcaaacatttactagatgcttatttgtcaaatctttatgtgtgatttaagtagttcctcatcacatctaatcacttaaatcctgctatttgcatttaattggcattctgtttgcttcatgagagtaacaaatatactgacacaataaatatggaaatatatttgtatcacatgggaagaaatgtttaaatggagactaatatcataagtggtcacttctaacaaacactccattctcatgtaattatatttatagtaaaaatcatagaagacaatgcagatacaaatctgacaactaagaaaattgtaaaaattatggaatagttttaaaactttttccttgaatgttggctctttaaacaaagaagccttaatcagagaaatttacgcataagcatgtgattctgaatgagccttttcaaggactttatgtatgagtatttgacttttgaggttaatagaatcaattctttaatatgggttgagaaataaaaataaagtcctaagcttctccaactgactgaacacaccatctcttggcccaggggactccagagaaaccttagaaactgagttcctggccatgatgggctagcaggtcgaacatgcctcagtatgccccattccttctaacctttaaccagaattctttcctaaggcgtaagtaagcagaaaccagctctggaaaatgagaaatggatgactcattactttgtcaactttagccagtcctctgaggctgccacaggactccctttcccacattgcagtttcaacatgacagctcaccagttaaaccataaatcccttcctgataagagaccaacaaccatgaagtggttctggccaatctatgcagggtgcacagccagggcatttgtgtcctccccttcatcttttgacattagggggctgaaaactccactctcagatcatgctaatgccacaattttttgtacagggaattcatgaagatgcataaagctcaattgtgaagcacatgtttctcctttataatattcatgactcctcctacagcctaataaaaggtattttcagccactctgctcagcataaattcccggtt

SEQ ID NO: 182328 - DNA, 1295 bp, Homo Sapiens
atttaaagtatcttttgttgaggtgacagaagagagaagctgtttttcctaccaattctgatgtagatctcacattatagcataacattacagtagaaggaatgaaaactaagaaagtaaatagtgaacatacagaacttactgcatttccactttaaaacctatttattttccctttttctaattttaaacttttgtggtcattcagaacctaatgtgccttgtgttgacatttccatagacttcacactttacaaaatttactgtttaaaaatacttgtcaaatgatttactgaacctttatacaaaagtaccctttctaaattgaccatttaaaaatgtatttttgtgataccgtcattatgttctgcatttgcctcattttggcagatctacagtatgccattaaagtttagtgttgtttttggttttggagggtttttttctgaaactgaatttataatctatttctctgtatacatatatttttaaaatcttctgaaaggaactatgttccctgctgcttcttccctttctgaagtgaatatgatcttttcatggtcattgcctagataaaagtagagccttttcaatcttagatggaagataattcattttcccacacagaaaaaaaatctgacctttacatgatttaatctgaagggctagaattttttaatttctagcccctcctccaaaaaaattttaaacacatcacatactctgaaaagtcagatttcaaatgcaagactagactttatatggaacatatatgttgggttttgattttgggtagcaattgacatatatttttctcaaaacaagttgaattttgttaacatatataattctttagtgaatttataaattaggaaccctgagaagaagccctgttgtttttcttaagagtctaaaactgacaatcttttaaaaatcataatacttttctagtaattgcatcagggaattggtgataattgaagaaagatccatttcttaagaataatttgatctaaattattatatggaaataaacatacttgtgttaactaaattgatcataaattcttgttcctgcctcacccctcaccccccagagaatagtgagtgactcgtttagattctctgctttttttcagttatgtacaagacttcagcatacattaatgtctttagtttataaatttgccaatgctttaatttccataatttgaaagttaaaagatgtaactaaaatactagcttttttattcatttccttttggtggagttgtatgattgaaactttgcttttt

SEQ ID NO: 182329 - DNA, 1000 bp, Homo Sapiens
gtacaaaaaagtttggcaagcggtggctatgaggaatagatgtggcaggaagatagtttcagttcctctttactaccagctctctccccagcaagtccaaataaaaataataatgttttcaaacagattctcataagtgttcaataaggcatcttttacaatttttaatttttccactgggactaacaatttaaaaggagtgttcttactattcaaatagagccttaagtaaattcagccagtccaaagatcttcaaaacaaaatatgcacattcttgggttacaagaattattcccaggggagcacttggacacatataactttaactttcatgtttattatttcaaaaattgaactgcctgagaatttccccatggtcaagagccattgtacttctttattgtcttccctttcacaattgcccttgtcccactaaacttcgaaaggtctactacctctctcccatctccaatcttataatactgtaaatgtacaatactttatgatatttgcaatgatttatggctaatacatataataaccagatgatttttaatgaaacacttagaccattgagatcatagagaaaaacctatttacataatttcaatttatatacatagttttattgcaaagaaatatgatgaaggtgatcaatgtgagggtgtaagcacaaaaatatattaacgtacaattctgtgagggagtgaaaaggaaacatgaattcaaggagcaaaagggactattaaagagcaacttattgacatttagaaaaaatgaatgaagggagtgttaaatcaccatattatttacattctttaagtaatataatattttttaaaatatcaatatatacaatatgttggaattgcctcttttgctactaatggttagacttatgaaaacatttttatatttagactttaaaacgtttgaggacttcatagtatctaaatgttctttaattgtatatccaagcaaaatggtttaagaagcaca

SEQ ID NO: 182330 - DNA, 951 bp, Homo Sapiens
ttggataaaagagaggaattcattgttctgacaaatggtatctttggagcctttaagagtaaaaccttttaatttggtattgaatttattgggtctatctttgaccacgtgataccacttacctgattctatgtactgattaatgtatctaacagttttatagtgaaagtactttttaaaaaagtatttgaatggtcatttctatttttccccctttgctgtacaagttaatttttactcatcttttgctgtacaaattaactttcatcaatacaaataagaggctagttttaagtcaatttatttgtcatgagcccaggaacaattaaattctataaagtaatgtattaaaatagtacactttaaaaattattttccttctttttttctctttaaattttaagaccatcataataaattatcattacaaagtcaaacatactatatactactatcagtcaatggggaaaaataagtcatatgttttatggtaaaatgctgtaatagattggattgtcaaatttgcttgaaaaaaatcacagcagtttttagtttttcttatttgtagattacacgttactcagaaaataagtatcaaagtgctaaaagtaataggtgtaattgctgttatttgtcaaaatcagtttacatttttgtgggaaatacagaatcacaaatatttctttctggcattatgtcctgagttaaattctagaaaatttagcaccttttatactcatatagctgtgacaataactttaaatatgtgaacattaggaattcaaagcttatatattcttagaagctaattttgaccacgtgcgcaattatttttcttttttagtagaatggtgcattttttgcctttgtatttgaaatttagctaaattacaatagctatcagaactacattgaccttagtaatttcaaatcatagttataaggttttaa

SEQ ID NO: 182331 - DNA, 817 bp, Homo Sapiens
aagaatggcatttttaaaagatggctttcttaaaaaaggatactaagttgctcttctactcataccaaggtcatgaaaagtgccaaggataaaactggccttgaaccagctatctttggagcaagaagaccaaagaaggaaccatctgattgcttggataaagtgttgttaaaaaaggagagagacaaaacagaaccatctggtcaaggacttgctggcttctgatgtctgcctgttctcttgaggctaagtcctgcagacacattctgggactgcaccttatgagtgctgctcactctgtttcctgcagaagacatacagagccgttcgcatagagtagggccatgattttgattcagcaattcttcaaaccactgatgctggttgaccatttgactttgtttttgaagtattttttacatacagtgtacagaacatttccgctggatatttggatactgaacaggagtaacaagaggaacagctcctacctcccccctgccccttccctcacaagcctgtgagtcagggcaggggcagccactgaaagtagcaaaggccttcataaaggagaacacttctccatgttgccatcatgtgaagaaggacatgtttgcttctgcttctgccacgagtgtaagtttactgaagactcccccgccgtgctgaactgttgaaggcaatggtgatgaaagtaaatatttaaaaacactaccatagctgtccccaatttcaaagacaggtaccactggaaccatttaattttgttggaacacagaatgaccatcttgtgatcagtttctgcatctttaaaata

SEQ ID NO: 182332 - DNA, 753 bp, Homo Sapiens
tgaaaataagcaagaactagggtaaatgtaattaggtaatttaaaaagacagtaaaggcccgtgtgatggatcatgcctgtaatcttaatacttgggaggccaaagtgggaggatccccatgagcccaggaatttgaggtgcagtgaggtaggttgccctccagcctgggcagtagagcaagactctgactggtaaaaatacataatgcatttttcttctactctctactcttaactgatttaaaaagtgatcatataaaacagtgtatatataatgtcatttgggcctataacatatagaaatgtaatatgttttcgcatacagcaaaaaggacatgggtggtattaaagttgtactgggataaggaaattactccagatgataattcaaatcaacaggaactaatgaaggaagccagaaagataagataaatattaacaagagctataaacatataattactatccttttcttagcatttttggaagacataaaattatagaaggtcataatttataacaatgcattatggagtttgtgatgtttattgatatgtataacagcaataccacaaaaaggggataaagggaatagagctatataggagtaatgtttttgtggttcattagaatatagtataaatttttgcagttaagatgtacatggtaagcttagagcaaccacaaagcaaataaaaagtagtgaaaaattattaaagtaaaatcccgtactaccaaatattcacttcatgc

SEQ ID NO: 182333 - DNA, 368 bp, Homo Sapiens
taacagtgtatttgagggcaccactccaaaccctactggggatgatacgttatgtaaaatatttacaccaggtcacctttctgaaatgggaaaaattctgactcctgaaacacatctggtcctaagggtttcacataagggactggggacagtgaatagtcgtgttgtgttatgggctcagaccgagacacttcatgcattcttcactctcacctcgtgttcctcatctgtaagacctccaggagttgagaattatggtagatttacatttcaaaggctcacttcttatgctcttgaaagtctttttctttctttctctgggaaatgggtaacttctggtgtgtaacattagtggggtgctcaggaaa

SEQ ID NO: 182334 - DNA, 256 bp, Homo Sapiens
ttggattctggatgctattgttcatttctctactagtaaaataatcaagccttcatttattttaggctttgttttttgatccattttgttttccctgctgtaatgagaataattgtttggaaatgtcatattctgtatttatgattctctgagaaatgcttttgtataagtcttaggtttgacattgcagtagttgacatacacggtaaaggataacctagtgacaaatcactgaagatgcttcctttgttacctc

SEQ ID NO: 182335 - DNA, 455 bp, Homo Sapiens
actttgtacaaaaaagttgggccaaattattttctaccacgtatgtacaactctacattcccatcataaatatataatgttgaatttttgccaatgtttgttgttatccctttctttgattataaccattctattgtgtgtaaagtagtatctcattatgggttgtcgaatttgcatttcccaaacgattaatgacattgtcttttcatgtctttttggccttttgtatatcttctttaaggaaatacatattcaaatcttttgttccttttataattaaaatattgttttattgttgagttataagcatttgtatatattcttgaactagacttttattaagtatgttttgacagtgtgttccctcagtctgtcaatcatcttttgagtttctttatagtgttctttgaagtatgaaaatacttaatttgatgaagtaaaatttattgattttt

SEQ ID NO: 182336 - DNA, 896 bp, Homo Sapiens
aaatagatatctcatctgttgctgttagaaaggaatctgtctctttccccagttcttgcttcaatgaggtttccttgacccagagtctggtcctcacattttagattcagctttgggaattttgttcaggaactgcatcatacaacccaaaagcaaaagaggaaaatgcataagccaggatacctaaatgttcatttatttaaacttgaaaatgtgactgcaaaaggagtcaagaagtttagtactcaacacatttcttctttgtagaaataactgctcaagaagataaattgttacctaacagttgattgatgaatatgaaatcagagcaagaggggctaattagagattttactagctagggctatttacccaaaccatctatccagactgtagacatagaatcaccagatggctaggatcctggtgcagctggttcccctttttccttaccctgaatgtcattaaggatgcattgccaaatgctgcccctctggcctgatgactacactccatattggtcacctgccttctttttcctacagtcttcctccagacaggcacgccatacaaccgactacacttgggctcactgaatgaatcacattcttctgctgtgcctcccagagatttcatcaaagcacccgcagtggccttctggaggctcctcaaactctccactcaatgtttcctgaaagtgtcgtgtttctcacctctagattgttattctcatcagttacatgtgggtttcacaaatttatttctcagaatgcaagtctgtctcttatatcctcgggaaacacacctttatatcccagttagtactgacaaaaattaaactagggactggccaaaaacagtgcctttcctcactttaatctcactaaagtagccaa

SEQ ID NO: 182337 - DNA, 886 bp, Homo Sapiens
ttggcacgtagccttcactgccatttgtcctgagccttttcaagaagcataaatcccagaatgatcgaaacatctcttagatcccagagtgacttaagatccatgctaggaattaatcctgcttcctaggaagttacacaacagcagcatttgtgacagtgccacagcaagccagggactggcccacgggcggtacgctgtcattcccagtgctttctctgccttccagagaaacaggaatttgccacatgtctgtgactcatttgctggagctgttaagtggtgatggtgtttaaaatctcagggaagtaaagccaccatttactgaacacttcctgtgtgccgtgcactcagttgtaaccacattattttacttggtcttgacgagaagcctttaaaggcacttttattatcccaattttacagatgaggaaattgaagttctgggaggatgagtaacttgtagaaggtcacaccatatataagtaatggacccagcctctccaactactctcagctgattatagagattaaattagaagcagttcttcctttcttggaaaagtaaacctaatggggaactcagaagccataaaggaaaagagtgattaatttagccacgtaaacatttaaggcttctgctcaacaaaccgcaccaaaaattggatcaggaatgtataacaaactagtgggtggggaaggagactgccaggctgtgataaaaggccattttttaaaacataacaaaaaactcttcaacagtcagtgagcacgagacatacagactgctgtgaacatgggacaggatgctcagccctcactcatgattagagaaatacaaattatttgctgcaaatgacattttcagctgtaggtttgacaaaga

SEQ ID NO: 182338 - DNA, 667 bp, Homo Sapiens
ttggatttatttaatatgaactgaacacatcttgcaagcattctccctctctagctcactttgcatttggagtgtaataatcctagatgagaatatttctgaaggtaaatcactacttcgggactcaaattttttttaatcaaaaccttcttgcctgggaagtctcttgcatgtgaacattttttctaaagattgtttaaagcttgtttatgtttttttactttcttgattgcagattcatttgtttggttaaactccatgagcttgcagtggtaaaatttgagcaactgaatttcccaagtcactgctaattcctgtgcacacacttgtttgtggatgtaccataactgacaggtttaaccaaaactaaaactctaatgtatgacctgtactatatccatgcaatagacagtctttcttaataatcaaatggctttttccttttactccctgactttattgttcataatgacctacattttatccataaaggagagaaatagtgtattttgcttttctttatttttgtttgccttttcagaggctttttaacttgatcagtgtaaagtaacatcccttttcttgaatattttttactgatagtcttgcttccattaatcatttctccaggaaaacttcatgtttctagaaatagtctttttgaggt

SEQ ID NO: 182339 - DNA, 771 bp, Homo Sapiens
ctgaaattcatttttaaatgagttaatgtgtatagagaaccctgaatagtgctgggaacacagcaagtgcttaagtggtggctattattattaaaacaaaaagggaggattctgcctattcattaggttattccaaacctaatgaatcagaaatgggatggaggaacaattgttttaacaagcccttcaaatggttctgttactctagtctatgggtctgcacactaggacctataggccaaatccagcccattgcctgtttttgtacataaagttttgttgaaagaccgccacactcattcatttacatattgtttatggctgttttcactctaccatggcagagctgagtagttgcaacagagatgctatggcctgcaaagcctaaaatatttactatctggctatttacagaaaaagtttgctgacctctgctgtgacttaaaacaatgtttttcaaactgctgtttttaccatcagtgtgtaaaagctcattgtttcaattttgtcttattttgtttattatgctctctatcatatggactggatcacgccaagtttcttgtatctctgttcctgaaaacttccgccactggctctgggtgactttcctctctcactcccatgtcacaggatcagtcttttgcaggggtggattaagtatatgacaattgctacatttatgagtgcaatgctatactgagatgaagatcaaagctcattccccatgaatactgagagatgtccatttccaaaccaacttttttgtac

SEQ ID NO: 182340 - DNA, 773 bp, Homo Sapiens
cctttaaaaaacaactttgtacaaaaaagttggcaaaatgtgtttgaattgctcctaggagcaagtacttgttggatattttgctgcactcacatttttcttgatggggtgttaaatgtgggatgttagggtgcactgtgccacgcactaaagcagtgagagaaatggccggtgaaggtgaacagctcatcacccctgggccaccttgtgccacgtaaatggcatggccactcttcactggatagttcccggctttgggagtagtgagtgaaaggggaccctttgtttcacaccggtttagccttcagacctgcaagagcctgagtggtgagttggattttccacccaccccctaaaagacgagggcagctatgaacttatagaggtacaattctgagaattcaggccctccttagtgtgtgaaatatctgttgaaaaaaagttcagagaaagtgtgagctgttgaaatctgctgcttctgaatactaacatatccaagagtatttaattttttaaaataaaaatgcactccaaagaaaaaccttttaaagcaaaattgctgcctagagttaaaattttaataaaaaatgacttattgccaaccatttatgccggagccaggcaggagcgctggtactcttagggagcaggaaggcttaggggctgaagttcctctgacttcgctgctttggctggaggccagctgatctgaaacgaaagactcttactgtactgctgagagatctaaaaataaatattctgcaagtatattc

SEQ ID NO: 182341 - DNA, 566 bp, Homo Sapiens
  misc_feature (288)..(311): n is a, c, g, or t
  misc_feature (342)..(357): n is a, c, g, or t
ttggatcttcaccgggaggagattcatctcaagaaaccactttttttgcccatccgtaagaagccacttccatccgttcaagtttgatcatgagattgcgacaattcagtcacatcttcaggctccacttctaattctagttgtcttgctattttcaccacatctgtagttgttgttactttctctgctgaaggcttgaatccccaaagtcatccatgagagttggaatcagcttcttccaaactcctattaatgttggtattttgacttcttctcatgaatcacgannnnnnnnnnnnnnnnnnnnnnnncctctttattcataaactgattgttagtgcnnnnnnnnnnnnnnnnctgaaacagattaaaaatgcaacttggatcttcagtcttctcttttcaactcaatcctggaatattcataatattctagccatcgggttctctcctttcttttttgtcttcaaagtcctttccaaaaggaaacatactgcttggcattctatattattcctaatttccaggtggaaaaatgagacagtgacatctaaaaacattggaga

SEQ ID NO: 182342 - DNA, 962 bp, Homo Sapiens
ttggctttttttccttgctcagcattattcaaaaatgttttgcaataaaatcctaacaccatgttgtccattttcactgcccccgacccctcattttaaggaatatcactgtacccagtccattttgggtatcctgacttcataaatgagggaagtgttagcagagtggatacttaggagtttgatgtcttatatcctgctccgtttggactagaaccttaatcttttcaatattttctccttaaagtatacttcatctgtcattaatctaaattatcatctcacataaagcagctgactgttgacgttttcagttatcacagtgtgatcctgaaatggggaaggactgaacagagccctgaaagatgagagttcggctctggctgtaccctagcttgtgtgatctgtgagtaaatgaccttttcctcctttactttcttcagtctaaagcagaactgaaataacctattctctcctcacccctagggacattgcaaagattcagaacatattctcattagtgcgctttggttttctgcaataaggagggtgtgtagacagagcttggtattgttgccacgagtgctggggtctaataggaacgctggtttttggttggttgtttttttaacttgcatggtgttttaatagcagaagattatggtttcttcaaaatatggtaaaacgaagggatttttacacaaagttttttactaaaaatgacgatgttaatggcgtactttatttgaaagaagccttatttttattagtaaatacttgatgtatgttttaatgtgtgtagatttaaaatacattctttaacattattctccataactattcaacctcactaggttttcctgtttagttagcaatggtcttttctttattagctaaaaaagaaacccatcaaaccctgacatgagtcacatgatttccacatttgactctgaattattggg

SEQ ID NO: 182343 - DNA, 282 bp, Homo Sapiens
  misc_feature (152)..(162): n is a, c, g, or t
ttggcaaaactctctatctaaaacatcctcttgggggcaaaattgccttcagttaagaaccactgcactaaaaatagaacaatctactgtctctaaaccagtgtagaacatagaagaaataaactaaactttattgacccaagagaaggagnnnnnnnnnnnggaaaattaagggaaaatatagtttaaaaatctaaatatacccatatcacaatatatgtaaatacttcaatttacttttaaaagactgaggtgatataactgcatagaaaaccgagatcc

SEQ ID NO: 182344 - DNA, 321 bp, Homo Sapiens
gatggtgttaggaacccaggacacagtggattagcttcacttccattttagagcatatggagggatgggtaagtgttgagcatgaataaattcaactccattcaataagcattttctgaagactgactatatgaaaggtaataagttaagataaaagagtaccgaggccaggtgcagtggctcattgtgcccggccagcaaacaagttttagacttagctttatttgaatgcaatagaaaaaaaattaggcattaaattgaaggggatgctgaacttcagataaatgtttcttcattggttcctaaaagggataaataagc

SEQ ID NO: 182345 - DNA, 934 bp, Homo Sapiens
ttggcttagttttatttagttgttataggtagatatttctgtccctgcttcacatataaagatactggggttaagagaccgtgaccaaccctggggaagcgccgggctgtggatctctggcaggacttgggttggaattctctttggcaggagggaagccactgactcagggaagcagactgaaaatggtttggcaaactgtcctggccgtgttggcatctcggatgctgctcctcccctgtgctgagacccagggaggggcatgggatggggacgctcgggagggcctggaggaagagtgaggagaggcagaggtgctgcttcactgtgcttcataacacgtcagcgctcccagcatcctgggcatctgtgatctttcggtcctttcaagggtcccttcaaggagggaggaatggcacctctgcttgcagatgcagaaatggaaattcagggaagccaagagtttctcccagtctctcaagttggaagtggagagtggggctttaacccagttctcctgcctccgagcttggcgttcctctgtcagctgaatggccttgctcctccactgcctggccctggctccaggtgggtcaggccctgggcagggccctggaggctgtactgcaggctctgacaaccgcccagcccccacagcacctgtcctgcatgagaataggttctgctgggatccagacacccgctcaccccgtctcttcttaccagtcccgggggccgagccaaggcaggactgcgtggggactgatggagggctctcagcaggcagtgctgaccagcccggctgggagctatagatagctctgagctcacccccagtgtgtgggatgggccctctgggaggcggaatgggaggccgagctgagagctgactcagacctcagctcaccgttggctgctcccctcctgtcttctc

SEQ ID NO: 182346 - DNA, 436 bp, Homo Sapiens
  misc_feature (243)..(299): n is a, c, g, or t
ttggcttatatctagttattttagggaaacttaaatttcttcctttgactcagtctgtcatagagtaagctttttgatgcaaagtctgcctcttcaatgttgtcaagagtgttaaaatcatttaacaactttttaaaaggacctccactccctcattttgcctaaagcatccagaaacacccatctttaatttaacaccatctttagttgaagttttatgaaaacagagactgatataaaatnnnnnnnnnnnnnnnnnnnnnnnnnnnnnnnnnnnnnnnnnnnnnnnnnnnnnnnnnaggtggtggcttattaaacatgaaaaaatagactagcacttcttaagagatgagtatatgttgattgatgagttagttgattaaaacagatgtgtgatcagactgctatctgaataaaataagatttgtcaaaactc

SEQ ID NO: 182347 - DNA, 899 bp, Homo Sapiens
gtgacaaagtgaggtccctgtctctaaagaaaaacccaaaaaagatgtatatgtatgttcatatgtatatattttctgcggggtgttccctcaatctagattattagtgctctatttttgtcacattccagcctaaatatagtccccagactataaaattatgccatactggattatgttaaatttgtatttgaaccatgaagaattgcacacatacattacatatttcagctatcctcctgacattggcggaggatttaaagctatcaagctagatataattaaaatagctaacaagaggcacaagtcactgagtcctacatagatccatgaggtgaatatttatatgaaggaaaccagtaataaagatgataattttgagtgtgatttcctgagtcagttttgttggtagatttataaaaccaatcatcctcaccagttttcattaaaatgccaagatactctccactcttatcacatacttagtcatatcaaatttcatataagaacaccaatgacctcttgcctattccttccttttctctccattacttaattgtatctcaaatcgtaaagagaagcatctatcttgtactgaaatgtgaggtcaaggctctcacctccagcatttccttaatgcacctggaacatatctttagttacttaccatggtggctgcacatgaccctgtctgcatggctatgttaagttacagtgaggagaaaaagccaaatttctgtaggcacttctgattcttttccaagcctcgggatagacctgtataatactcactgtattttcatctacatcaaaatttcaataacttggtgatcctagtgaagagtataacagttatagaaattttatgtagagtacaacttacaagtatttatacccaa

SEQ ID NO: 182348 - DNA, 528 bp, Homo Sapiens
tcatgaatattatccatagaaagcgtggatgaacattaattcttgtcattattcaacatcaaagtaagctccaggtgggaagggagattttgctccctcatatagacagacccaaggacctagataagtgcatggtatgtagtatgttctttaaacacatgtctaatgcatgaatcaatgaatgaatcaacctatgaattggctaggcactctcctaatctcagggtaagtagccttgaataagatacacagaaacaaggaaacatattttcacacaatgtgtacatgctgtgaagggtgtacatcggagaaataggttagagactccagatgaatgagcagtattaagtgaggtgagtagagccatgctaagaacgcttgggaggatttcagcaaagggaacagcaaggccttgggccctgagtggagaacaagttggctactatagaccttccccaactgcccaaaaggctctttgatagtctgtcttcccactagactgtaaccattgtaaagaggatttcatct

SEQ ID NO: 182349 - DNA, 943 bp, Homo Sapiens
ttggctccagcctgttgtgttgtttttttgaaataataatttaaagtaattttccttttgcaggatggcatagtcaatccaacaataagaaaagatttgaaaactggaccgaaattctactgctgtccaattgaaggctgccccagaggccctgagagaccgttttctcagttttctctcgtaaaacaggtactctctactctgaggatgagatacagatgctaaaaacctattgtgcattctgattacttagcagacataactacagaattgagtagacagctgcttgtgaggggagatgcctgcgtgtctcccagttggtataaacctgagtatgctgttacacaagtggagggaaaagcggcacggtctggagggaatatgtctagaagtgagttaaaatacagagagagagagtaaaccagttcagcaaagaatgagaaaatgtttgctcgcagatctcctgtgtgagtctgcatacctccaagggcccagcgcaaaggcacaaaggaactgttctcccaggggaataagaacctgcagaatccaggaaaagaagagttttggaagccgcaatcttaagaggagggagggccccagtgactgggacaagaggtgattcagaactggaagagattggcatctgaaatgttcccctgagggtctgctggagggcgtcctgagaagagcattgtaaagacatttttttcctgcctgcagcacttacagatcagagtgtaaatgctggagaccatagatgtttccaaaacaatctcctcacttttcacaaagcaaaagcaacaagaagaggcatatatataattaactgcgatgttcctgcttttacattcttttgacttggactgctgtattttatgttatttatattaatagtgtaaaatcattattaatttgggtgtatgatggatttctgaaatgtttt

SEQ ID NO: 182350 - DNA, 783 bp, Homo Sapiens
  misc_feature (202)..(213): n is a, c, g, or t
ttggcttatggctaaccacttcacattgacaggaagggacaaggtaggaggatctgatgtacagcgaaacacaccaggtatgcttgaccgtagtgcttttatcttctttacaatttgcagaaagcaaaggatgaagacaaaccaagaggctactgtcattgaatttttggttttcttctcattactaggtttgcagagagannnnnnnnnnnnaattaatcttgggtttaaagcactctttgttctttcccaaccttatcttttagactttattttctattacaaagaacttaaaatatgatattaaaattgctttctatttgctttcagttggggataacaacaacaaacataaaatagcaacagtgacatgtgttctgtgctaaacaaattgcttaagctcacacagtttataattggtggagccaggaactgaacctattgattctagatgccactcaactattccacacatgtcaaaggtcctgaaatatttgtatatttcatcatttctagtgaaattcacatgttagcttggagatggataaaaagttttctttacttcgtgaggcctgtgattcagtttttgttctttaatgcattgctatacttgtgtgtgtgtttgtaaatgtgaattttacatgctgcatttagaattttctgtttccctttcttcagaaaattcaccagagtttgaaataaacacagttttataaagtaacacaatgaaaagatggtaattaatgtttgacagaaaattagattcattaatatttaaatgtg

SEQ ID NO: 182351 - DNA, 905 bp, Homo Sapiens
  misc_feature (414)..(425): n is a, c, g, or t
ttgggtcattatctcctgtggtttgctttgaggctgggctgggagaaaagggaagaaaaaagggaaaagactcagggattctcctactttctgtggcccttcatagtaccttttcccacttgttggaccaggaagagaggctgccctgggagctctgtctggctatacgcagggcacgcctctggagtccacgctgcctttcagttgaggccaggtggtactggagagagatgcagctcactgccagttcagaataacttcagtttctggctcctactgtgatccaccttctaacatttattttttgagtcttcatcttcagctcagtgcattctatgatttatagttgcattcagtgggagagacagggtagattgtgcttactccatcttttccagaattggaactcaccannnnnnnnnnnnaacacaaaccaattcatgtcactcatctgcttaaaactctcaaaataccttcccattttgcttggaatgaaatatgagtatttccccatgacctttcctctgtttttactcctacaccactctctgcttgttctgttccttgatcacactgtgccttacgatttttgctttaactgctcattctctctggaaagctgtcctccaagaccatcacatgattgctttcttgttgttggattcctaactgaaacatcatttcttcagggaggcccttgtttaccatcagatctgaagtcattttaaaacatccgtgttaatgtcaagagactcacttaatttttaagaaatagttgtgtcatacatgtcttatgctctgcctcatatagtagcccacttttagactagctattgccgtggcaaccaaatttatgcaagtgtcacctgacagcaccttaccatagccgtcgtgagcatctcttg

SEQ ID NO: 182352 - DNA, 1032 bp, Homo Sapiens
ttggcataaaagcacgttttgtggtacgccttggtttctagttctggatatatgtattaatcttaaagaatgatctaaagtcacagcttggcatataggaagatacttggttagaataggatgggtatcttttaagcagaactttgtaagtaagttttaagttcctaagcaacaagtatacagtttgttaaggtttatattgaacattctaccttgcttgaggttttctgctttatcaaaactattcataatagaacatctacctgcatcattactatcataatatggattattcataaagcgtatgtactgttcttctgagtctaacaaatactgtgactgaaatgcatgcaccttgttgaagagaaaacattttattaatctccactataatgtctgtgaaatgtgcagtattccatccttagagagttatctggttcatcagcatctgcatgtatcctctgaataatgaagcaacatttcagcaattctgttaaccacaccattagagacatttttagaagtgctgcaacatggtgggaacctagtactttaataatttcctatgatatttattagagcataaaatgtacatcacgatagtacagtatgtagtcctttaagaccagaaggtatgttaactgcaccatcattaagcagtctatcctgttttcttatttatttgttagaattgaatcctttctcaatatctgtaccattcctatgatggtagccattcttctctttataaaatatttcctctttgaaaagcgtcctaaaacattaatttcaaatcccctcttggatgcaaagtgtccctaagaccatccattcaacagtatttatgtgagccaacttactagagccgctacaactaatcatgatagacagtccagaatctccctggactttatactgggccagcctcattgtccctaagatttctctttttatgtctcatggattacttctctttttaattgccccaggcacattccaaatgagaacctggtaaaagtcacattggacccc

SEQ ID NO: 182353 - DNA, 891 bp, Homo Sapiens
caatgcttttttataatagccaactttgtacaaaaaagttgggacatctcagatttcccgtctggggccattttccttcctcatgcaaggcatcctttagaatttcctttaacgaagacgttctagtggcacactttttgtctggcttttcttttgcctctcgtcttgaatgtaactttcatttggttcacatgggagtctagactggcggttaggtctctcccgacacacggagatgccatctcaccttctgccgctcccactgggaaatctgcaggtcccagggtttgccatcgtctgtcctcgttcctggccacttccaagatgactccgtgctttgtgttctgcaggctcactagacacttaaaacaaaatcatattgggcttccttgggcttcttaaatctgtggcttgtatcttcttcagatctggaaaattcttagcctttgttgcttcaagctgttgcctctgtcccacgtgttctcttttctcttcaaattctgacagtgacatcctgcgccacatcctctcttaggcaagtcacttccctggacccgctttccaggggatgcaaaacgcagggccccccttgcagacctgactcctcagtgagctgaaggcagggcctgactagaatgtgtgtgtatcaagagccaaagtcaaaacagtagagccagccgtgcttagcatccagctcctctgcaaagaaggaaatgtgtgtgccctagtgggtgggaaatacaaattgtgtgcttttggtgattccacgtatgacttaaatgctctaatatttgcacttaaaactgacattctggtgtaaagatgcactgtgaaagtcataaaatttataatttaatttttttcttagataacattaattaaacagcaaat

SEQ ID NO: 182354 - DNA, 579 bp, Homo Sapiens
ttgtacaaaaaagttgggtcatggagaaccccctacccctgacttctgtttagtctcctttttaaataaaaattactgtgttagagaagaaggctattaaatgtagtagttaactatgcctcttgtctgggggtttcatagagacccgtaggaaagcgcactcctgcttttcgatttatggtgtgtgcaagtaaacaggtgcattgctttcaacctgccatactagttttaaaaattcactgaaattacaaagatacatatatatgcatatatataatggaaagtttcccggaatgcaacaattagcattttaaaatcatatataggcatgcacattctaaatagtactttttcatgcttcattgtttctctggcagataattttactaagaagaaaaatagatattcgactccccttccctaaacaaatccacgggcagaggctccagcggagccgagccccctggttttctcgtaggccctagacggtgttgcatttatcagtgatgtcaaacgtgctcatttgtcagacatagctgtaaatgaaaacaatgtgtggcaaaatacaaagttagttaa

SEQ ID NO: 182355 - DNA, 322 bp, Homo Sapiens
tgaaggaggctgggtgcaatggctcagctgaaggaaggatttctatttgagctacagtctgttccctgtcaagttagtaagaactcttttttttcctccccgcttcctgccccttttaaggactctttccgcatgacctggtagcttatttagctctcccaccactcactcctttgttcactatactccatcaacagtcttcttttccaacttagggcctttatacatactgccacctgctttgtttccttcataacacttataatttttggttacttcagtttattttctcttttgttgctgactcatctcactactatca

SEQ ID NO: 182356 - DNA, 901 bp, Homo Sapiens
ttgggtttactttctatattttttaaaccacctattaaaagtcagtcatccttctacatttgggtctaaaataaagattttaacttacatttggttgttaaatgaggctctgagtgtggaaaaggattactatatttgattctctttttttgatcctagaatctgtatctttcaggaaggaccggctctgtgtgatttggggtttagcataatcttattacagaatataggaggaggagagacaatgcttggaaaagtctgttaggtttaccacaagcagatcctaagacaagggtctggttacagtaatttagttgggaagtggttctctttagcagggtgagggcgtgggaccatgaggtccgctccctccaaagagggaagttagctcatgaaaggggctgatggtggaagcagggctcaatcttgcctgggactctctgagcaatgtgccgaccgatttctcactgagggatgttgttgcaaaagctggagtatttattcatcagctacctcttcattagcggacacacaggaaagcatacattcaggaaggaacaatctacagtgacccccaagcaaggaagaagggaatatgagtaggatattgacagcctcagctataagaagcatagctagaaactcatgtaaacactgggaaagttgactgattgttttaaattcaatggaagatggtattgaatccacctacacacaggttatcatcataagctctgctaatggagagttatgtacactgagcacctgtggcttggtgcatttcatcttgtctcagcctttgactcatcacccatcagaaagagtacaaaatgggttttaatctaatcaagccaatcttaagacatctctgtagatgaacagatgctactgggatttctaa

SEQ ID NO: 182357 - DNA, 722 bp, Homo Sapiens
atgacacagcaagatcctgtctctaaaaaaataatcaattaatacttaattaaaagttgtgcatgcagaagtaaatatgaaagcattatatttgtcacatgagaaacatttctctgatagaaataagaaaatcagaaataaaaattaagggaagcatttttagttttggaattattcaaaaggtaatttatctctttatcttcatttatctcttccaaatatattaccgaaatctttggcctaacgaatccacacccctctcccaacacacacatgaaatatatgtaaatcagttggctacttatactaatgctataggtgatatttttaagcgtcagtaagtatttttaacagtcatttcccaacaaattagtgatactcagtacattataatacattcaaaccaaatttggtcatagtatcatctctctctagctcttgagaaatacagcagaactttatagactctccaaaaagtcccgaccacagagtgtcaacccaccatttaactcactgtccagaggcttttttaaaaatctccaaatctccttctaatccactaatctcttcaggaccacccgacacagttctcatgctcacatacctctgcttataagatttagtcgtcagagggaatctaagatgcaaaataacctatattcaattaatcgacttggcaccaaaaataacttaccctgatttattacccaacttttttgtac

SEQ ID NO: 182358 - DNA, 681 bp, Homo Sapiens
ttggcagagaagtgagtcacagaatttgagcctgctctcttgactgcccagccagagacactgatttctgtaacctcttcacttgatcctgcctcttaagcattaaaacattctcctaaacctctgagtgttttgtgggttctgggtgttttgtacattttagccaagctaaccacttgtctgcaagtactgactttcctatgaattctttgaagattattgagtcagaaaggaaaaatatagccccaaattcccaggcttttaatgcattacattaactgcctattgaaatgagaagttcttcacaaacttgtatacccactaacaagattgcacataaacatgcattaaagtatatactaagaaaccctctgtccaacggctcatgcatatgaagtccgaacatgggagtttgccaattgcattcatcaagtcgttttgcggagtcagatccctgatggaagagctcacaggctctgccttccaagtcctgggttcctaactggtgaccttagcctggggtctgtggggagaccaaccctggcttccaagaaaaccacattccatggactatcagaaatagacacagatttgggtgacaaagctggctctgtatttgcattttatttttgtgttcttgtcagtttgggaatgattaatattaaacatttatttgagaaa

SEQ ID NO: 182359 - DNA, 1241 bp, Homo Sapiens
  misc_feature (175)..(184): n is a, c, g, or t
  misc_feature (1005)..(1038): n is a, c, g, or t
ttggcagtttaattcacaagctagtacttgactttttttctgtatttgacatttttgacaacccctactttaaagatttattcccttgacttcttacattttgctcactcctgaaccaccccccaccttttggcctcttcatttattccttaaatgttattcctcagacctccannnnnnnnnnctctcttaatcacaacaccacttctcacgcttgggtaattttaattcagcagttcctaaatccttatctttagccagactcctcaatccatctgcctgttgcacttttcttggttgtcccagagacacctgtgtgtgtcttaaaacattcattctctgcaaaacctactctaatgcctgtgtcccttactttggttaattttagaaccattatattctaagttttctaggctcattcctctcctccaccttcccctatcatttagtgtctaagttttactgattttatctccacctctctgatacatcactctttcatcttcattgctattattaataaatacctacagtactaacctgcctcctatacctagctggtctcctctctgttgctcaatgttaccacagcaggctttctagaagcactctgacagtgttactccctaatatccttcagtgacttcaggaactttcaggagaaagccaaactcctctgtttggtgtacaaggtcttctgatgtgtttcctccaccgaatgttctggtgaaacagacttacacttcttcagaagccacatttggccaggcctcccgccttggtaaatgctgtactctttgcatcaagtgtgctagtcatccttccccacttggaaaattcctatgcatcttgcaggcctgacataagcatttcctctgtgaaacctcctttgctccactcaaggagagtcatctaacttccactttcgtgtcaccactgtaattacaacctacctctattgtatgtcacttaaatcgtactgtattgttttatttttcaaaagtnnnnnnnnnnnnnnnnnnnnnnnnnnnnnnnnnnaaggaacctttttattttttgcatctccatagcatagtttttggcatatgaatgtttaataaatgtttgttgaataaattgattttaaagtgacatctttattatattagaggtcctacctatattccaaatactttcactcccttcactttacagcaagggtcagtagagtcccagggatttgtaagacttaaaggggtcaa

SEQ ID NO: 182360 - DNA, 1148 bp, Homo Sapiens
  misc_feature (587)..(738): n is a, c, g, or t
ttggcaatataataagtaaagaaaatttaaaaccccaaaacattactgtgtttgtagggggaggtctgatttacagagtaaccacatagtaattataattattagaatgtccagttttcaaaaaacgttacaaggcatacaaagaatgggaaagtgtggctcattcaaaggaacaaaataaagtgacagaaaatatccctaaggaaacccagacatcaaacttaccagacaaagactttaaaacaactctcttcattatactcaaatgtcaaaaggaaaacataaacaaagaaataaaggaatcagaaaaaatattaaaaagtaggaatatcagcaaagagataacaaattctggagtggaaaactacaatgataaaaatttaaaaatcaccagagggatttaagagtatatttgcacacacagaggaagccatgaacttgaagagaagaaaatggaaaatactctgagaaacagaaagaataaaaaataaacaatgagcagagactaatgaatctgtgggacatcatcaaatagaccaacattcatattctagaaggataaattatgttgttaaaaagtttaccannnnnnnnnnnnnnnnnnnnnnnnnnnnnnnnnnnnnnnnnnnnnnnnnnnnnnnnnnnnnnnnnnnnnnnnnnnnnnnnnnnnnnnnnnnnnnnnnnnnnnnnnnnnnnnnnnnnnnnnnnnnnnnnnnnnnnnnnnnnnnnnnnnnnnnncaattactaagagatgtttaagtacccttagcatgttagtagatacggttatttctccctttagttctcttttgagatttatagtcactcaaataaagagataacccaaacataagcgtcacaaacaggctttcataccattcttaatttggtcctgtaattcttcattgctgtattaattttctgatgcttttagggatgttttataacaaattgtgtagctttttccaatggaatgtttattctgaattatctaattcatattgtaagtatagagggagtttaacataaaattattaaactaatatttgtgaaagaatgtatttgtgcatttaacaaatatgttaatcctcagactgttattgggcagctgagcatacaaggaataaaaataacacaatttttatgtg

SEQ ID NO: 182361 - DNA, 1725 bp, Homo Sapiens
  misc_feature (164)..(215): n is a, c, g, or t
  misc_feature (1148)..(1180): n is a, c, g, or t
ttggggcaataattcatgctgaagaggaaccctgcaaacctgaaagatgtgacagtgctgttcccaacacctccaacgtttctatacataaaaaaattatactagtgtgaaactgtagaaaagtataaaatgtgacaaagcctttatttggttgccgcacttgnnnnnnnnnnnnnnnnnnnnnnnnnnnnnnnnnnnnnnnnnnnnnnnnnnnnggagatttttggaagcattgtaattacattaaaagtatacttgttttcttgaaaaaaagtttttcaaaagtgaataatgatgtcatacagctttcaaattactttatgctgttattttattcctattcacatgtgaaaacatatgagcaatttttgctgcatcagagataccagagattctttttttattgggcattatttataaccttttctataaaagtaaggacactaaaatgtaagatgcgtgatgaaaagataagtggagaggctcattgtagttaacctatattaagtaatgtataagctaggtgttcagactattttctacattatggtggaattgttaattatagttaaaagtatattaaaataagtatattattaattgtacttttatgtaataaaatgcagtatatttaaaaatcattagattatgtgcaaacttaattttatttttttaacatgttaagactattgtgcatttaatgaagcattattccactaactttaacctatcccaccttactcaagggtgtaggtaaaagatggtagcaatatactatttggtacatagtgaaataacatctctagtaatcactttgcgagtggctttaaacagcaaatgaatttaagaatattgtttccataggttagatttttattcttttttcttattgaaatttattattggtatttgtgggtatatagtatgtgtatatatttatgccttatatggcatattttcattcaggcctacaatgtgtagtaattacattagggtaaataaggtatccatcacctctaacatttatactttttattacaaacagtgtaattatatactttaattattttaaaatgtacaattaaattgttattgactacattgttatttttatggtcataataaaaattatacagaaatagaatatnnnnnnnnnnnnnnnnnnnnnnnnnnnnnnnnnaagtgctgggattacaggtgtgagccaccgtgcccagccaataatcctttttttagtagtcaacaactctcttatttgtcttgttattttaaataccagaaaccacattagattttaatttttcttctcagtatacatttggggagagggggagttaccaaaaagaatttcacatcactatgggattattcttgttgatagtttttaaatcaaattatgtactgataaactatccctactcttactctagccccctaaatatgccatttcctatatagtatttgatcagcatagtataccagcattttctgctatcaaagacgtcttttagccactgctctgtgcctttattcaaaatagcaagttaaattatattcttaaaaaacatgaattaaaattctgttcagtattgtgacttttttctgtagctggattcttttattataataatttctgatattttctcagtaatatgtattaccaaacattctttaacttgtattttaatggacatttaatacaataatttgtaaatgtttttaaaa

SEQ ID NO: 182362 - DNA, 1634 bp, Homo Sapiens
ttggatcacatagtcctattactttcaatttaacttgagtcactattaagcaagtttaccaaagtgccacaaagttgatttttaacgtttgtaaaggtttgaatgtttatagaagtgcatcatgaaattttgtgtaaatccagatgaactgtcattatagtactataaattagagatagtccataaagttgggttgaaggagattgaaaatatttcctttgattaaaagaaaataattaactaacttgggcttgcttgtgattgaagagggagattagatagtcctctgtccccccaaaaaagaaactagcagagaaagacataaaaagctctttggtgtctgttcatgtgctgtacattttttccgttttaatgtcttgtgtagataattcaaagtttgaactatttctttcttggaataagtaataatttattcaatatggtgtatctctgagttcaatttaaaacaatccaactcagtaatatttatttttaaatacaaatcctaactaaccaattaattaataaaaaggcaagacttacttgctgtagtattggttctcatctgtagagaactgacattggagcaaattttaagtctcccctttgaaaataagccttgttaactgagggcgtaatacatttcccacagatttatccagaaacattttattagagatcttatagtagtatctcagttcctactacagctttctaaaggatgagacttgcatttaacaaaatgacatatataatatttttctatagttttgcaactgaattaaaggaaggtgatgtattataatgtgtagtgaggtataaagggctagttcattctctcccaacaagaacttagaataaaataacacttttttttcatgagacttacctcatttttgttaggctatggcagttttgtccagttcctctgtcccttgagtgaattagatattggtgaattaatctcagaaactgacctataaaataatgactcattatagattgggtgaacttctcattttatttagcttttaaaagtgctaaatcctctcataaaggaaaaattataggaaactatagcggtatccagattctgatgagctttaaaaattataaaatatagcaaatgtcttcatattttagccagaaatattagtacacaaccaatatagaagtcttgtttgtttctgggttctccagcagagactttttgtttgtggcttactctgtatagcctcatgtgccttaaaggtggtgaactctagtttttgtcagtatcaggcttttcaaaactcaaaaacaatccaaatgttgtaatttgttttgcataatgcccatggaattggatatcagtaagcaaagccattaaatcgaaccaatcaatgctaatagagtataaaaacaaaaaccttcaaattttaagtttcatttgtgtaactttattttcggcctagctagatcattgaagagccttgaaagttatctaaagtatggcttaatgtatttttttccctctgaaaaaaatcatatgccaggatacttcttcaaaccagatcacttttaatatctagaaagataattttcaaggtataggcaaaagcacttcaaggacagagattatgtagcaagttgat

SEQ ID NO: 182363 - DNA, 1414 bp, Homo Sapiens
ctttgtacaaaaaagttgggcaaagcacaaccacttttggggtccatgtagcatgggccacgtaggaggctcctgacttgccaggggcccagcctcagcatacccaccgagcagctgccagcctgggctgagggtgggcatgaggcaggagtcagcacttggacctagggatgtgaggttttctgtgccccaagtttgtgggaaggtgggcactactgctgggcccacagacacagccagctggcaaaagggaggtctagcccagcagagagatgaggacattttgcttctccttcatgcccacagcatgagctgagcttctgctttgctggaaatgaaataaacttggtatgaattgtgccaaggcctccccagttgtcatcctgcctcttgttgccctccctgtccttgccccccaccccacacccatgcccctgtttccttacagattttgatattgttctaatgtgtaatagaaccagccgagtccccttttatcagaagggtctgaaaagcagcagcacagagtaggtgaacacaggcctgcaagtgcgaccacctcagacccagtacgtgtgcccacagtggacacactcacacctccaacacacccacgcgcaggcatgtgtacacgcatgtacacacgcatgcatgcacagccagatggccactcagcacagatgtggcagagggaatggtctgatcctgctgaaagccattaaggagaaacgaatttcccagtgcccgggctgcaagagagccttataggggccctgtttcctgggcatgcgcttcctctgccagccaacccccacttgcccaagtcactggtgcaataacttttctgccttcctcagagcagagaaattgggaattgtgttaggtgggtgtgggcagctctgctgagccaagcagacacggatgtcccctcttctgggaggagggtagtgctcccaggcctcaggagtccagacagagacccccaaagcctgactgccaacagaaaccctctcctagtgaggggcaggtgggtgtgccccaggtccccacacccacagggaggcttcacacactgcccagtaccggggatgccaggaggcaggcccctctgctgctgccactgctgccaacactgcccagcttgtgaggccaggaggagcccctgtcccactcggtgctgctgctcttctgacccctgctgtgaggaatgggattcttggtcgaaaaaattggttttccttttttgtataaatgaaaagaatccaggagaagctgccaccctcccctcccagcgtgatgcgctaccttgcttcggcgtcttgtcgccctttccgcctttggtccagggacagcccagcagatcctcctggttctgacctggggggtgtttgcatcacccccttttacttgtatt

SEQ ID NO: 182364 - DNA, 1050 bp, Homo Sapiens
  misc_feature (242)..(301): n is a, c, g, or t
  misc_feature (313)..(508): n is a, c, g, or t
caatgctttccttataaaagccaactttgtacaaaaaaagttgggaattaactacttgaattagaaagcattttcaattctaaattcattcaccagttctgagtggtgtgcaacacagtgggtgttttggcttttctcttttactcgctgatagatctacgtgccacttgcctacaacatacttttggcacatagtaggctctgttactctaaagttttccttttttcgagacagtctggcnnnnnnnnnnnnnnnnnnnnnnnnnnnnnnnnnnnnnnnnnnnnnnnnnnnnnnnnnnnntgggttcaggcnnnnnnnnnnnnnnnnnnnnnnnnnnnnnnnnnnnnnnnnnnnnnnnnnnnnnnnnnnnnnnnnnnnnnnnnnnnnnnnnnnnnnnnnnnnnnnnnnnnnnnnnnnnnnnnnnnnnnnnnnnnnnnnnnnnnnnnnnnnnnnnnnnnnnnnnnnnnnnnnnnnnnnnnnnnnnnnnnnnnnnnnnnnnnnnnnnnnaaaagttttccaaaatgatttttctttcctgttgtagttcgatatctcaatgcctatactggaatagtgctacttcgatgcagaaaagaattctatcagcttgtgtggtcagctcttcccttcatcacatacttggagaacaaaggacaccgttacccatgctttttcaacacattacatgtgggaggtaggagtgaggtggtatggctactgattttcaattggtgacacgttcacagttcagtctaaactggtgggtgggtcttgctgctgtcccgctaacaagacacttccccctacctctgaagtctgtaaggtcgagacctttcacaagctgttgaccacagtaactcatatgccaggtacaataagaacatgtcagaagttcctaattcagtacaacaggagacagctgttgatctttgttgcaaactgcactgatgaaggtaaagcaacactagcccagtgcccactgagcagtgactgaccttaagctgaaaaatcacttcccaagatatcctttcatcctgttatctgccttc

SEQ ID NO: 182365 - DNA, 1272 bp, Homo Sapiens
tacaaaaaagttggctccactttatataaaactaatttatgaaaatctggatttattttaaaaagatatcttgccatgaaggtatttgttttatagaaatatttacctccagatttcttggctctaataagatggtgaatttaaaacactgtgttatttagaaacactgcatttacacttcatttattgtataaagcaaattgcattgaatcttcgccacttgacccaaaggccaaaaattggcatgagaacaatttggactacacatcaccaaacccggggttcacacctgtccactagcagttccagtgccttcccctagccctggatttggcaaagcacagaatgttaagagctaaaagttattgtagaggctactcagtcccacccgggaaactgaggatgaatgagggtaagcggttgcccagagcccgttaacccctccgtggctggggccctgcctagaacccgaatttcctgactaccctgtccaaggtattcatgtcacatcacactgaaacgctaaacctagagataggagaggccctctgggataaatccctgttccaccaaagaccagccagtcatcaaagatgagagaaggcatccctgtactgtaacaaaaagctggctttaggcgtggcttgtagaatcaatctaactactagacaagttacatctcatatatgtgtggcttctttttcttcttttcgggggctacaaggaaggtttggagaaattatttccatcatacctttttgttagcctttttccatttctggccagtaagtaatcccgttcctgacaacagtccctttgttttctcaagtggtctgatgaaggactgcaaaccacagctcttgtgttttttgcaccatgggttttaaaatccgtcctctgcctcccacaaggagctactacccaagggaagggagaagattaattggtgacctttcgccgtgttaaaataggatgagtatgttgctggtcaaggcagaaacgctaacttccaactgtggtctgttaagagatctgctgggaaccttcagaagcactgccttccaaggcggggccacagcttggggtgttcagcacttgaggacgggtggagcttgttcaacccaaagatgtgtgcgatgaacggatctacacactggaaatacgtatcaaaactgcaacagcaaaatcatattttgtaaattaaaattgtgtttacttactgtgactactgttcagtctttattcagaaacctttttataggctttcttagc

SEQ ID NO: 182366 - DNA, 597 bp, Homo Sapiens
taggttgggcgttctatttatgtaagtgattgtatttcttttccttttttatcttttgtgcaatgtattagaccccttcccccacccacaacagtccacaagtatttcaacagagagtcagtgaaaaatatatgggaaataggtgttcatttttgtacactcaagtaattagtaattagtagtgccttcagtctttgaataataatgcaagcataggattggtgtggattttttttcttaaatagatagtgtttttttgggagaattagtgaagacatacgaatttagattgccagcattccttcagttacccagagagagattcaataaatgattgtgaatgaataaaagcattcaatgatagtatgactttatttatattcagaaagtaaaaataattcaacacacggaacatacttgattgtaccagatattttgttaccagaattacagggatggtcatatattaattataaattacaaaaatataggttgttttgttaagaaaaataatgttttcaatgaaaaaacaaactattcaaagtgataaataaaatgtattaagccagcctcaattccaacttttttgtacaaagt

SEQ ID NO: 182367 - DNA, 886 bp, Homo Sapiens
gggcgggaccccaagactgccatgccagggagaactcaaacctctgtcagccccagaacaccagtggggttggctggagaccccagataaaaggaccctcattgggcaggacctcaagaactatgtgccagggagaattcaaatctgtcagcctgagaacaccaggggcgggtggctggaggcccgagctgaaaagacccacactgggcaggaagtggagacctccatgccaggaagaattcaaatctctgtcagcatgagaacacaggtgggggtggccagaggccccagttaggagaacccttactgggcgggacttcaagaaccaagaactgcttacctgggagaattcaaatctctgtcagccccagaacactggcgggggtggctggaggccctggttaggagatccctcagtgggccagaccccaagacctccatgccagggagaattcaaatctctgtcagccccagaacactggcgggggtggttgcaggcccctgttgggaggtccctcactgagcaggaccccgacacctccatgccaaggagaattcaaatctctgtcagccccagaacactggcaggggtggggggagttggctagaggcctgagttgaaaggacactcactgggcaggaactggagacctccatgccaggaagaattcaaacctctgtcagcatgagaacacaggtgggggtggccagaggtcccagttaggagaaccctaactgggtgggacctcaagaactccatgcctgggagaattcaaatctctgtcagccccagaacactggcggaggtggctggaggccccggttgggaggtccctcactgggcgggaccccaagaccgccatgccagggagaactcaaaccccaa

SEQ ID NO: 182368 - DNA, 790 bp, Homo Sapiens
cgaatattttccatctgaggttggttgaatctacagatgcaggacccacagatacagagggccaactatgtatgcaatacaagttataatgatatttagataataaaatactcaggccggtctgacatcagcaggctgcagggatgaagtcagcactcacagcataaggactttggtaaggcctggatgacatccccagtgctggccttcggaacagttgggagcagagtccaaggatggcttgatggagtcacactggaggagatgtctgtgggggtttctgaaggtgggaactaggactcttttcttgggacaaagacttggggttttgggtggctgcaagcacagtagcattgtgaccaaactgtccaactgtggaacctaccacatcagtagcaacagagggttggaggcagaggtgagggtcctgctgaagctgggccgctttctgagcaagactaggacagctgagacagatccagaggggcgccaggccggggaagggcctgagccttcaaattccgtgaagctctggagatccagggtgaatgctaggcctcaatagacccttgtcccttaacgatttgtgttcttggtctttgatcccatctcacaggcgtttcagcctctttgcaagggaagtaaagaatctaagctactgcggtatttcattcaaggcagggcttatctgttgtgagatgtacccttattttagaatccattaagaaagaaaaagcaacagaaactatatgagttggcatcccagtttcagagatgttaaaatgtaaaa

SEQ ID NO: 182369 - DNA, 707 bp, Homo Sapiens
gcatttatgtagccccttgggtatgcatagctctgtgccaggcacaacagctggcaaacaataacaaggttaccttataaaaggaggccagctacagcagttttgttaaaatttaaactattttggtaactcaatttatattttaaaataatagaatcctagagttcttaaaaatcactaagaaaaacccaaatatcctaatggaaggaagactaaaagccacagaaaaaaatttagcaggataatttaaatggctgatagacacatgaaaacattcaaccaaatgagcaagaaaaggaaacaacttttaaagtgaggtataattttaaactatcaaatacgcaaagatcgcattcagtattggagtgggttccagaaactgggcattcatatagtgctggtgtagaatttggcattgtgtattaagtgccttaaaaatatcaaaacaccttgactgctagaattatatactaaggaaataaacgcagatgtgtacaaagatttgtgtgcaaacatattcatggcagcatcatttatcacagcaaaacacttaaatacacaacgataaggtattcattaaataaaatataatccacataatgtaatgatctagagtcttcacggatatttatttttcagtttatactaaatgacacaggtaaatgttcaagagataaggttagtgaagccaacttttttgtacaaag

SEQ ID NO: 182370 - DNA, 945 bp, Homo Sapiens
ttgggttatactggtagaggagtctgggaggaaaagtgtcaaaatgggttgacctaaaaagacactcttaaattccatattcgtatgaattcctgtagaaaacatgcattccctatagttatataatacatcatatatatttctgttacatgtaagatactatctttaaaaaacggcagcagtatcagttttgtttatagacatcagtcagatctaactgcttttgtcacacatcatgaatcagtctgttctttagagaaatatgcctcaggaaccagcactattgaaatggccccttccagctttgattgaatgaagggcctgactgaggtagcctgtccctgctctggcaaatccacagctcctgatgttcatcgagcctcctcctccaggtgccaggcactggaaatcagagaggaaccagaccgatacacagtcactaccatcctggcacttagtcttcaagagcaggaggcatcttttatttcagaattctgtttgctaacccaacagaaccctggcttcccagacctgcctgtagctgcagagaatcatctctctgaccaacactgactcattaggctgcttaccctaaacatgcttagagttcatataccaaactttgcccctttttgcccatgtactttatgatattgaattttctcctataattacattttaatttaaattcacaattatatgcacattataggtccatgtatatagctctgtgtgtttatgcttgtggaaaggaaatggtctaaaaactgtgtatgccgcagtgcctttgggaagggaggtatgagggaagctgacctggactttgcgtttatatatttctgcatttaatttttataagactgttaattttaaatagaaataaaatttaaagtaaaaagctggctgtttaagaagatttatatataaaaaaagtttgttgaaatg

SEQ ID NO: 182371 - DNA, 505 bp, Homo Sapiens
tttgtacaaaaaagttggccagatctctgtaataaattacctgggaggccaaggcgggaaaagaggaaagaacaagactgaccatcaaggctggacatccctttcagttcttttgagaacagactagttggctagatgtgaagaaaacaagctttggagtaatcttccctctgcacagcctgtgatattgggatccagtgagtgacggtgagaggtggagatgtatgaacgagacctgagacgttggacctgaacatcacagcaatcacttgcagggctaagattcagggccagctgtccatggattctcccgagttggatcgtctttcacacacctgcttcctgaggttacatctcttttccagcctaggagcaaccaataaagagcagagagcaaagaaaagcagacacacaaatcatctctagactatgtcaagggtatccccaaaatgggaaagaaattcatgaatgtacacacaaaatgtcacgtatttttgttttacat

SEQ ID NO: 182372 - DNA, 967 bp, Homo Sapiens
ttggcaatgtgaacacttctatttaaaaaagagttaatttatgtattaaaaatagtgttaggtgttaaactgctatggtattttaatccaatggttacatttaatggagagatgtaatccttttgttttaaaatgtcaatatttacaattcaacagaaattacagtccgggcaaatgtttaaacttatgataaaagtgttgctgcaacttaaaatgctgcaaggtattacatagatttttcaaaattcttttagggtacacaggataaagtttgaagacatacacactagacaatactttgttagcctaatttggtttacagtaagtatctgacagtaataaaattgcatttctttgaagtagtctatagtacagagattgatacgaaaataaaaagttaccatagtaatttaaagatggacagtgaatcaactgagacaggaatagatagaaagtcaaaggacactattgcctagctagtttgtggagatcaaggtcttaaaaatgcaaaagtgaaagattagagtcttccactagagtctttcaacctcagctctaattttaaaatgcacatttctttcatttaaaaggggcccttttacaaggacctgaagcttcagcaggattgttgaccactggtaggttattgtttccctggagattagaggtattttgctgtggccttcatgctatattaaattatttcccactatttgagccgcaagttttgtcagagttatggaatgtcagaccattatttcctgataaacatgtcaaacaagttacctaattataaaattgctttttctttaaaccttattaaaaaagccatgaatcagaaagtataaaggtcattatttgagttcagaaaaacattctcatagattaactctgctttgtcttaaggatctggaaaattactacgtcttcatttctattcttgatttcttgataaaacagaaaattc

SEQ ID NO: 182373 - DNA, 744 bp, Homo Sapiens
actttgtacaaaaaagttggctttaaatttgcacaaaaaacccgctaaatccccttgtaaatttaactgttagtccaaagaggaacagctctttggacactaggaaaaaaccttgtagagagagtaaaaaatttcccacccatttaaggcgtaaatacttccaccaattaagaaagcgttctccgggccaccgtctacccttaagatcccagtgttgctgctgattaccatgctgccaggtagaacatagatttttcaaaattcttttagggtacacatgataaagtttgaagacatacacactagacaatactttgttagcctaatttggtttacagtaagtatctgacagtaataaaattgcatttctttgaagtactctatagtacagagattgatacgaaaataaaaagttaccatagtaatttaaaaatggacagtgaatcaactgagacaggaatagatagaaagtcaaaggacactattgcctagctagtttgtggagatcaaggtcttaaaaatgcaaaagtgaaagattatagtcttccactagggtctttcaacctcaactctaattttaaaatgcacatttctttcatttaaaacgggcccttttacaaggacctgaagcttcagcaagattgttgaccactggataggttattgtttccctgggagattacaggtattttgctgtgagcctatcatgctataattaaattattttcccactatttgagccgc

SEQ ID NO: 182374 - DNA, 928 bp, Homo Sapiens
ttggaatttcttattgttttccagagtaaggcatacattaaatttggtattacaatttatcctaacagtacagagcctgcttaggaaacagttcatttttttcagagtataatgaaacgttaaactttgtgtatctttcttggagggccaagtacagcttgcctacatctgcaaccctaggggaaatgatcactgcataaacttcatattttttaatggaaaagaacaagcaatagctctccaaagactcctttaagaaaggcaaaattatggaacttgaatattttctgaaatgtttggcttcatgatatatttacattaggaactcagtgttttccttgagccctcaaacttttattttaagacttgtatcattctaaagctataagttaactgctgaaggatggaattttacaggatgtactgtggacagggtgcaggcagaggaaagcatatgttctcacactttaagttgctagaggaaaaaggtattttagcccaaattggcatcagatggcaggaaagtcttggttggttaaaaaaaagtctgctatgttgaaccacaatgaatgagctcctcagaatcatgtacatttaaaaaaatgattcatatttttatgcaaacttggagaaaatttgggaaggaagggatcttgagttcgtaggtcgaggttagatttccatcagcattttcatcttccattgcggtgccagtgttgcaatatccattctagctgaggaaaatacaaccagagctcattctcaaaatctccaaccaccagacatttccactcaaacaacctgccaccatctgaaacttatttaatgttggactgatcttttcactgctccctgaacctattccttttctttccttccttgtattaatataattgttttctcatcccttagacatgaaggcttgaaa

SEQ ID NO: 182375 - DNA, 1355 bp, Homo Sapiens
  misc_feature (205)..(223): n is a, c, g, or t
  misc_feature (709)..(968): n is a, c, g, or t
catggtaaagactgctttattggtggcagttactacaagtcaataaatattgatccccaaagaagagctcggttatttatcagattactggtccatagagagctgaatgaaactgaaccaagcgattgctgggatgactgaagtcactcctgcttcttgggaaatgaagccacagccagctcatatatggcatatgctgttcctnnnnnnnnnnnnnnnnnnngaacttaaccataaattctaagatctaagtgtataaatttaatattccagttcaaaagttgtaagtttgcattaagactaccttaattggaacacaaaaaagtattttgataggtgctggaaaaattttaaataaatatatgtaaaatatatttaatctagttttaatatagaaagtgtggcacaataatatatttgtcaacataaaatgcaaaaatttttaaaaataagattaagaacgtatacaaaggttatttccatattaacccaagactgcctgagaaatgctaaggatgattaaatgccaaagaaaaaaatagttcaaaatatgcaagccttccctaaagtgaatgtaaaaaaaagagtgatataattttaaagtaatcaaatgtaatataaaaaatagctgataactgggccgggcatagttgctgaaacctgtaatcccagcctataccttttataataaactggtaaatgtgtttcnnnnnnnnnnnnnnnnnnnnnnnnnnnnnnnnnnnnnnnnnnnnnnnnnnnnnnnnnnnnnnnnnnnnnnnnnnnnnnnnnnnnnnnnnnnnnnnnnnnnnnnnnnnnnnnnnnnnnnnnnnnnnnnnnnnnnnnnnnnnnnnnnnnnnnnnnnnnnnnnnnnnnnnnnnnnnnnnnnnnnnnnnnnnnnnnnnnnnnnnnnnnnnnnnnnnnnnnnnnnnnnnnnnnnnnnnnnnnnnnnnnnnnnnnnnnnnnnnnnntttcccaaacaggtaattaatatgatttcttcatctttaaaatgaggacatattatagacttcatgcaagactcacagaaatccaagtatgtggcattcctatgaatatgataggcataaaataatcactcaaatatagcatcccttctctttaccttccagtggaagtattgttctgtacaaattttgttttggtcataaatatgtctgtacaaagtttagatgtaaagtgtgcttttattttgcatcacagtcaaaatgttttaaagcccttgctgtaagaggtgggatataatggatgtttttgactgaaatatagccttcactgccatcaatgggactcagaaagccaactctatcacaacataatcatcaaatcttacccaa

SEQ ID NO: 182376 - DNA, 909 bp, Homo Sapiens
ttggcatcctacatatacttttaactttccacagctttattgagatataatttatacattgtgtaattcactcatttaaagtacaaacttcaaattcttttagtatattaactggatggacaaataatcatcataatataattttagaacattttattttccttaaaagagacttgcgcccattagcaatctttccccattttctccagtcttttttaaacccctcctagtctaggcaaccactcgtctactttctgactatgaatttgcctattctggacatttcacataaatggaattataataacacatagtcactttttactcacatctttcacctaacatatttttaatgttcatccattttggagcatgcattaacagttttttaccttttcttgctaaataagattctattttatggacacaccacattttatttatccactcctcagctgatgaacatttctgttgttttctactttgtgttgctataaacatttgtgtactactgtttgtgtagcatttgttttattttctttttggtaaacacataggagtggaattgctgggtcacgtgataactctatgtttaaccatttgaagaactgcgagactgctttacattttaaagtctcaccagtggtgtagaaggttccaatttttccacatatttttatctagtcttcagttgataagcacttaggttgtttctaattcatgggtattatgaataatgctgcaatgaacatgaaattgcagatgtctgtttttgacatactgattaaaattcctttggacacgtatccagaagtgggattgatggatcatagggtaaatatatttataatttcttgaggaagcttcatactgttttccaagatggctgtgctaatttccattcttacc

SEQ ID NO: 182377 - DNA, 596 bp, Homo Sapiens
caagcacaatttttttgaacataaattttacctaactagagaactataattaaactatgaatttggatagaataaacgttcctaaaagctagatccattcagaaagatcccagttgagttagtctttccatcattttatacttcgtgtttgtcctttcccagtaccaaaagttgtaaatcttgccatgggtctgattcctctctaaagaactgcgtattacaatccggcagaaaggggatgaaaaccttaatagttctgcctgcttgcttctacctggcaaaacgtcctttgcattatctgatcaaattcaatcaggaagtaagtcctgccggtatccacagatctgatattagagtacaacatattgtactgtcataggttttattcagtgtgcttgttcaacacagtaaatgtagactgttgcattgactactatgtgcatgcagcagcactcttcctgccctttcagtactttaaatccaagcttgtgacaatccttacgtaaatgctacataaacattacaccgcaatgggttcaggagttatgatagcgtctcctttttctctggctgacctctttattatggtggttttg

SEQ ID NO: 182378 - DNA, 3068 bp, Homo Sapiens
  misc_feature (452)..(547): n is a, c, g, or t
  misc_feature (708)..(746): n is a, c, g, or t
  misc_feature (1195)..(1224): n is a, c, g, or t
  misc_feature (1226)..(1480): n is a, c, g, or t
ttggctcagtcactacaggaccctggggggctgttgccacctccgccgggggcgaggagtcgcttaagtgcgaggacctcaaagtgggacaatatatttgtaaagatccaaaaataaatgacgctacgcaagaaccagttaactgtacaaactacacagctcatgtttcctgttttccagcacccaacataacttgtaaggattccagtggcaatgaaacacattttactgggaacgaagttggttttttcaagcccatatcttgccgaaatgtaaatggctattcctacaaagtggcagtcgcattgtctctttttcttggatggttgggagcagatcgattttaccttggataccctgctttgggtttgttaaagttttgcactgtagggttttgtggaattgggagcctaattgatttcattcttatttcaatgcagagacagggtctnnnnnnnnnnnnnnnnnnnnnnnnnnnnnnnnnnnnnnnnnnnnnnnnnnnnnnnnnnnnnnnnnnnnnnnnnnnnnnnnnnnnnnnnnnnnnnnntccagtatgggatattttaaaagattgttggaccttcagatggaagtagttacattatagattactatggaaccagacttacaagactgagtattactaatgaaacatttagaaaaacgcaattatatccataaatattttttaaaagaaacagtaagtgnnnnnnnnnnnnnnnnnnnnnnnnnnnnnnnnnnnnnnntcatataaaattatgagaattttaggaccatagaaaattttaagaaaccgtataaacctctcaggtacccctatgcctgaaacatctccaatcctttgaaaagcattttagtccatgctcatggctccttcggttcccacttcagactctttgcagtgcatatggttaaaggacaaagttcacaagaaaaaagtaacatcaaagcaaaaaggcatttattatttgatggttatgatgaaagtatgtgccgtaaatagctcaatatagcagatatttctgctgcccatccctctaagggtcagtataatctttaacttccttctttgcttctccttccctgaaactgaaaatagatactgaaagagtccaaagcctgaattccctgtaagtgcttcttctaacctaaagtttggctctggctgtaagaattattggcctcagctttatcnnnnnnnnnnnnnnnnnnnnnnnnnnnnnngnnnnnnnnnnnnnnnnnnnnnnnnnnnnnnnnnnnnnnnnnnnnnnnnnnnnnnnnnnnnnnnnnnnnnnnnnnnnnnnnnnnnnnnnnnnnnnnnnnnnnnnnnnnnnnnnnnnnnnnnnnnnnnnnnnnnnnnnnnnnnnnnnnnnnnnnnnnnnnnnnnnnnnnnnnnnnnnnnnnnnnnnnnnnnnnnnnnnnnnnnnnnnnnnnnnnnnnnnnnnnnnnnnnnnnnnnnnnnnnnnnnnnnnnnnnnnnntgagccactgtgcctggctggcctcagctttaaataagtgataaacctgctgaagtcagagataccatcctttttcctggttcaactctctggttttctaggactctgctactacaaggttttttaaatttcaattaccatacattagtctattctaataatcttccaataatgcaaacttttactcaggattttggtagaatatcaggaaaaccatttcctggtataatgattctctgtaatagagaaatcctatatatcatgtagggtgaagggtagtttttatgtaatagttcactttgagctgtctagcagctgtctagaagctttcatagacacagacaggtagagagaaagacagggtagatgtcttaaccattatccttgttctagggttttcagtcaactctatctcaaaggactgcttctagaggccagcaagagaatagacatttgttttctgtcttgtagaacagaaacaggatatgaagtatacttttgccctttaggtggatttttttcttttctaacagtaaaattatggatatgccttgtagttattgtcatgggattgaacagtgacacaccctcaagatgtaaggaatttattcaactgattgtccaaaaggttttccaaatcttataaactgtaagtcattgagccttaaaattagaataaagcttagagatccatctacctcttcttaccaggaaaaaaatcaagacctaaggaagttgagagtaagatacgcaactaattagtgcaaaactgaaactagaatctaggtcttccatacattctgtcacatggttgttctcttcctcccatcctaccccagctccagtcaactgtatcattttgtattaggcatttttgttttggaaattgtttctcctattttatgagaaggattgtgtagtttcatgtaacttttattattcatactgtaaattgtgtctctttcaaaagtagattgtttctaaaccatagtgtgtaaaaattaagcaaatgtaattttaagaggaatctcattcttggtagcctattatgtaaacatttaggtgggattccagattcagatttgaaacttaaaacctgaaaggcccattgagaaggccagtatctgcattatcattcatgtaatctctctacattatacagaagtgctccaagaatgagaaaaaaatacattgagcaaatgaaatgttaaaatgtacatctgcaataacctcattggactcttaaaaaatattgtgttttaacgtatttcttctttctgttttaggatttgagcctccttgattttaatagagaacttctagtgtatggatttaaagatttctctttttcattcatataccattttatgagttctgtataattttttgtggtttttgttttgttgagttaaagtatattattgtgagatttatttaataggacttcctttgaaagctgtataatagtgtttctcgggcttctgtctctatgagagatagcttattactctgatactctttaatcttttacaaaggcaagttgccacttgtcatttttgtttctgaaaaataaaagtataacttattc

SEQ ID NO: 182379 - DNA, 874 bp, Homo Sapiens
ttttggtggtattggttggtgtggttgaagtaaatttgagctttacttggggaatgtgtattatattatcattccataatgtaattcctttggtaatcaagctttaaagatcttatatctatgaaactcatatagttatcaccttttagtattgggttatctcactgtaagggaaatacagtaaagaaaaacatctgttgactaaaagggttaatttcaggactatgattttcatgtggaagtgtttgcctggaggattcttgaaattttgccttcatctagagtatttaaaatgtttctatttgcaaaaagctattatactcagaattttctaggaaaacatccttttcagtggactcttcaatagtaaagagtcacactgtatggtgttagtgtccatagaacagttgaattcataaattaatatttttagacctatcaactaaattaaattcacttaaaatgatttggcaagcaggtatgaactgaaaataaacctatgtatttttgttttttagaagtattgaatcagaagaaattggaacatcaaagtattctctgaaccaaattgatgttttatttggttgagagtccttacttttggtatactatttataccagtaatagagtatttgaaagcagtgctgggaaatgaggtgcatggattctctcaatgttgaatcccatttttttccctcagtgaatcttcaacatttttaaatcttagcattcaacaaaaactctacagcctagatataaaccatagattactttttatatagcatatacagttcatcaacaaacagtaaagtttccttcatgacttaccttgaaatctttattcaaaggatatactattcaatttttcagtgtg

SEQ ID NO: 182380 - DNA, 520 bp, Homo Sapiens
ccatgtatccttataagagggacacagaaggagactgaatgcagtcccacagagaagatgatatgaagacagaggcagaggttgtaatgatgtggccacaagcccagggatatcagagtagccaccagaagctggaagaggaaaataacagattatctcctagagcccccagagggagtatggcccctgctaacacttcaacacatctctggcctccaaagctgtgagagaaaaactttgttgctttaagccaccaagtttgtagtaacttattactgtagccaaaataaactaatagcacctaaaatagtacctggaatatggcagacacttgataaatacttgttcaaagaaagaaggaatgaaaataaaccctgaaatactaccatctgattatacagtgtcaatataatgcctttattctgacaaaactattactgtttctatgggtacacgtgttatgtaatagaaatttcgcacaggaaaaccacagaaagttacccaacttttttgtacaaag

SEQ ID NO: 182381 - DNA, 658 bp, Homo Sapiens
ggaggttgggggggcatttggcatagtcgatttaatagtctcttcaaatacacaaagaattcaaatgaggacctttcttcctctctctgtcccctagccctcaacagctatgagtctggcatggcgtgtcaccatttttctctattaccaacctcgaccctcagggaatacattggccaagtgagtgagtaggcattaaaagctctttggaaaccacccccaaacaagtctagaatcaggaatcgtggttagaagacactgtgctctagataggattccctttttttcttctcatccccattttggccgaaatgcatatagacataaaatcctggagccagaagggtccttagacattctcaggtttatagcctacatcccatcattatccaagtaaagataccaggctcaaagaggacaggtgacttgaccaaggccacccagcaagggagtggcaaagtcaagagtcaaatcagctcttctgaatcgcggactcatgccccttccacagggaccccactcgcacggggtatgaaagctggaggagagaggagtccccagctcccccaccgtctgtcccagcacttctctggcaccagtacattcttcctgataaccacatctctgctgctcttgcctggtccggctcctctttttc

SEQ ID NO: 182382 - DNA, 882 bp, Homo Sapiens
caacctctagtctaaatttttttcagaccattatatcctataaaagagggagaaaattaactgctacccatttcatttttttctgtttcctgcccactagtcactagtgcaacttatcttcttctctatcttctcttctcattctgcacatagtctcaaaaacttccatgatttggaatattacctacatactagtaatgcttgtaactgtttttcttgcctcctcctattctcaactatgtcctgaacattttctaaatgcaacataaatatctcaaactcaacatgctcaaaaaccaatctatccctctgtgtatcagttaatactatcagcatctacttagtcacttgagcttttaaaaactttagttgttttcatttcaaaaatgatgatgcagggcattaggccttgtattgagcacaaaaagagaataaaagacaagacaggtccgtggcctcaagaaccctccatctagaagaagaatctagcaagcaagaaaagcacaactgagtgtgctaaggaacaaggggctgactgtctaaaaacactagcaatgggattcacaacagaagggaaatgggggctggatctcggaaacaagtaaggtataatgaaacttgtttcaggcaaaggaaacagcaagtgttaagggtataaaagtatcaaaaaatatcatggattcagggaagcttgagcattggggaaatttaggaagaaacgagtagtaaatatagctaggaaggcaagtttggataagaactgttgaggatcttgtatgctgcaccaaagagttaggatgttatcaactgtgctattcaaaaacaaaaatgtttccaagtatgagaacaatagcattatgtagaagtatatatttctgccaa

SEQ ID NO: 182383 - DNA, 387 bp, Homo Sapiens
ttgggctgttctaattattatatattcagctgattaataggagtacttgataggtggactgtgtcaggtagcctcaggcaatcctacttcaacaagctgtcagggagccatgccatgcttctttatgacataggtgaatttgataggctcactagcagaacatgggatcacaaggctggaaccattccatttccatgaaataatttaagtaagccaatacaaggggaaggggtgggaataaaggtctgagatggtctttagttttacattttgtgctagaggtatttttacatacttttaaagaatagagggtgcctgtatcttagtacacttaataagaaagaaaaattatactgtaattgggtatcgtcgttgtcaatcatttgg

SEQ ID NO: 182384 - DNA, 623 bp, Homo Sapiens
tttgtacaaaaaagttggctcatataatctagtaaattctttaatgaaatacccagccagatgttgggaggaaatgtgttgtgccattgctgtcctttcctcgctgtcctctgttgtcttgtgttcctacccacctggtaatcatgtttgaggagctgaggtaaagacagaaacaggtaggcctagcaggattacaggacttgggccagttcagtggcaggactctccaggttaggaaaattgaaagtatactgtgcctcttcacttctaaaatactgataaaggaatgtctagctctcaatctgtatttttaatgtttctttaagaaagagaaggattcctaccatcctgaaatgttcttatacttaaatgcctctgcagtgcagttaagcctaccctgaactctgcatttccacaagggagcttaggtgttagcctgtaataccctcttagccactgggctgtcattggatctgttgtcttaatttactctccctaaagccatcaaagacccactatttgcagtttttgtggtgcacacaaattaaaccatggctagaattaatttttgttaaaggaaattaattttcatatttattcatgtaaaaagaatttgctgactg

SEQ ID NO: 182385 - DNA, 134 bp, Homo Sapiens
tttatattagacatttacacatttccctgctccctgtgcatttcctcttccggactgtccacttctggaggtcatgtgcagagccccagctagcctatatagcatctgtgagtgaattagaaagacatctcttc

SEQ ID NO: 182386 - DNA, 640 bp, Homo Sapiens
tttgtacaaaaaagttggctataaataaaatttgtgggaggccattgttttggattgagctcctgcaccaagctccaacagaccagaccaaaccagaatggagttactggtgctaggcacccgtacaaattgaacttaaaaacaggccagttttccaaaaagcaaaagattcatgcaaccaatcaaaagggacccaggcaacctgaaccggcatgataaggaagccccctctgccttaacccacactaggaaagtaatctgaagtaacttgatgttaaccaatctgctgcttctactatattgtttccttgttcctgctcaagcgatttcacaaaaatctactgttctgccattcccagtggggcttatgtctatttatatactaaatgctgcctggttcatgaatagctaataaaagtcaattagatcttcaaaaatcaatttttgaaattttgttttttgacatcaccataaccaaaattctaggaagggagaaattaaagtacactgctgtatgcaaagtggtgtattacttgagaatagactataataaattaaaattttgtattataaaccttaaagcaatgactcaaacaaaaaccgaaagaacagttatagcccttaaacccaaaagggcaga

SEQ ID NO: 182387 - DNA, 864 bp, Homo Sapiens
ttggaaaataaaaatacatcacagtgtgaaaaggatcagttagctgggggaaaatggctgctcttattgaatagcccagctgtggccctagtacacagctaatggctgctgacctaccatgagttattttgaatttcatgtctaaataaagctgtgccctttgttggggaattatagacataagatagtattttattgaattaattcttaggttcagttttttagaacaaattctactgatactgattttgtgagaatttttattttaataagggaaccaggctgtcgattcgaactcctgtgcattgatgtcagagcttgtgaaaccaatggtggacgtaaagacgcagagaaaggtagagagggccacagtgcaagggggcagccatgagtagcatgtggatgataatcgcaaggcgtgtaggtttggggtatgtgttaaaatcagttacccaagttttagaaaataagtttatttttcctttttgataatttccttctgtactttgtgtcccttgttttatttctcccacttaagtatccctgtcggtttaactatttggctcttgaggaaattcatcatgccttgttctattcagaatgctcatttgggggactctgcctcagtttactctagctacctctgtgctagcagcgttgcatgctcccatgttccccacagagcaacacatctggtttaatgctctcactgcatctatttcagacccattttcagaatattgcaactcaactttaaaataggaaaacataaccttggcccattggtggctttcaatttttaaatatggagaagtaaaccacaggactttggcagattttattggcttatatattttacaggta

SEQ ID NO: 182388 - DNA, 827 bp, Homo Sapiens
actttgtacaaaaaagttggggcattgcgtggctgttttcaattaacttgaccactatcataacatcaaaggtgtgtgtaccattctatgaccattgaatctccatggacatgttttgggaaatggatttgtcccattacactgctttctttagtgcataagatcttgaagggagggatgcattctatgcaccccaagtttctggtttactcgtggtttcaggagtccctttagacaacatcactgacaactcactatgtaaaaccaaacaaattattagctttcttactgtgtgtttgcatttgctgtgcccagggaaatgggaagtgcattgaggaagaggccccaagacaaggagaagtcactccaactttccgggaacaccttttgctgtgccatgtgcatggaaggagaggaatgaatgactgttgaagccagatggccttgctcattgattctctcctttcccgccctctcaagccatccagaaggagaatgaaatgctcaaatcaagggagttaactatggccaagatgttagtaatgggaaactttggaggaaggcaaagtcagaaattattctgcagggagatttggggatgttggatgctaaggcccaagccgtctattgtatgccttttgctttggcataaaacaacagatgaccttctgttaggtgtatctctgctcatgcttgagagtggtggtgtttggaaagactcaatagcatatgcacatgaggaagttgaccaaatgattccacagcgcatactcattttttgctctgattctagcttttcctccaattttattcagaatttgttcttt

SEQ ID NO: 182389 - DNA, 917 bp, Homo Sapiens
caacattgaatacagaagacaggtttataacttacagattcaaaaaagtatcaagtacttgtcttttcttctctctttaatagttaaatttgacaagaaagaaagatatactcctgaaattaaagacgaacctctgccaggtgtttcctgggatgtcattactaatggacaaaaagtcagcctctcaggcaaacattaatcattagccaattgttgataattaactaatgatctacaagaatataccatggagtccttgtatggtcattcatttatttattcactcatttgacgtgcatttcctgatgtgcttcctgtgtgccaggcacaggattaagttcacaaggctatacacccaaatcagactgcagtctcagcctctaggaactcatattctagttccatccaaagtcactcagctaatcagccaaagagtcaggctgtcagaccccacagcccatgagcagaccatcacactccacgccacttcccacaacagttataaaccaggggaaaggggctggtgtctgtacaggagagttggactgggcacaggggtgtccagagggaaagcaagtactcagatgtaggcaggcggggagtggacaagtatcagagaaggctgaagggaagaagcagcatatgagctgtctgagaagaatagacagaacctaggcctacagaaataagaaagttcaattccaacagaatgacaaccatgcaaagacacagtcttgatgatatacagacctaacctccaccatataggctaagcccaaggagccaggttatgaaattgtgtttcaggtattatggttcacacctctaggtgcaaaagccatgagatgccgaactacgtgaccatgcagatacaacggacttgatttttaagcccagttaacactacactcagccaa

SEQ ID NO: 182390 - DNA, 1362 bp, Homo Sapiens
tttctactcagcatcgtggagcacacccagaacatgatgcttcttgagatttccttttaaagaccctgtcacccgtgaggtttccatcccagctactacagaagtcgtgatttcttttgtctttctctcagcttcacagacttcttggtccaccatggggagagcttctattcccagtcatccactgtcgtgtggtgaacctctctcctctcctcctggcccatttctctcccaagtgtgtgctcagtctgcaccatgtggccagatcatcttaggttttgatccagctcctaaagaagcactcactgccccttcactctctcactctgacttcccagcacttgggttttgctgcctctgtgtctggagtgctccatgcaaatttctcaccccaaccactggcatgctcagttacctttagtttttatgatgtgtcctcacccatcctctggccacacaaggctcaagatctaactccaaattatttcaaagagcattattactcaactattcaatttagtaagtcaatgtctactaagcccctcagtgtggcaggcagggagttaggctttggggttatggaactcaggagaccatgcctctgccttcgtgctgacattctagagataggaaagcaaactgaactttcaccacaatcacagagagaaagcaaaggcttcagtctagatagacacaaaatgctgagcaagtaggagagggaggcatggtgagctctgaccgggtcagggtgggattccttaaggtggctcagaggagaaaccagccccagcagagatgcagagtcccaggagggtgtgcaggttccaggcaccagcagtcagccttgacagtattttggaagggccctgtggatgtcaggtgagtttataaccaacatttagactggatccagggtcagaaagttcttgaaaggaggagaagcctggaggtcctggtaattggagggaatccagcctggcatttggaatatttgctgtgctgatacactgatgttctttcactgaggcgggaagtttctggactctccaggtgattccagtgtgcagctgggaggaggaaagcactgctctacccactgcaaagcacgcctgcatggtcagatgaaagctgcacctcccctcaaggagccaggtgtctgcgggaagaacttgacaacgagattcaaagagaggacaggggctggggaggtcggtgggaggatggagaaggttctggaaggttgcttctgggaggcttctctccctgggcttctgaaggccagagtgcagggtgtggattagccatacccaaagccacattcacagagggggaagcatcactcgcatttaatgttgacgccaa

SEQ ID NO: 182391 - DNA, 887 bp, Homo Sapiens
ctttgtacaaaaaagttggcaggctggaggtgctcatcagatgtttttgccaatccccaaatacggccagggccagaaagtgagaggggtgcctattatgtaaggccctgcggctggtccccagacaatgccacttcctcgcttggcgctgtgtgactgcataacaacgggttactcatttcctctggaaaacttcacagggcctctttgccccatttcctcctcccaccccatcctcaggcttcctctgttgaattttctccagattcctgggaacaccaccatggagggcctggcctttggcggtggacagtctgtggctgggtgggaacgtcaggagtggggcctgcctctttgctgggaatgccgtgcactcccagcccacttgccccatgccagcactcgaggcaggtgaggcccagccatgggtataaggtgctcccagggtgggattagcctcaaggatgcagggggtccatgtttctgctcctctcccattactaacgggtgtctgctttaggtttgatctccctcccttctgcccctctcctggtaaagggatgaataatgaaggccttccttgggaagtctgagatggattaccccaaggaggctcgaacatgggaggacatgcgagaactattgtcacatgagttttctttctatcctgtctgcaggacttcgcaggtgagcagtaacggaaatcagccccgtttattcctcccagcacctgccttatccaactccccacgctgtggctgagtcccagcctgctatggaagcatcactggactcccattgaactctgtgcagattcgctgttcgtagacatggtacctgatggacaccaagctacgtacagcttcaagccccttctttctttgcta

SEQ ID NO: 182392 - DNA, 1687 bp, Homo Sapiens
ttggatcaaattctatggctttcaccactacctctgctgatcctacttctataaccctcagcattttccgagacatctcaaatttccccatgtgccagagaatgaaccctcccaactcagcttcttcctcatctcatgaatggcctccgcacccacccctgcccacctcacagctagaaacctgagggtgtcactgactcctctgcaggaggctgtacccaggaagcccctactcaacaggacagtcagactcccaggtgctgcggtgcacatagcaggtgcggggtgcagcgacccattcaaggcttagaacccactggcaagctgaagtgtcgccttctgagtgttagttgtttgcgggtgcccatgtggctgggagtgtgagaggcagcaagccacagccctgtgttcctcccacattggcaggtactaaggatgctgaacttcaggaatctttgagataagaggtcatgggagccttgtccagccactgtcaggcatgtctcatttatatccttccactactcattgggtgtttcaggagtaaccctgatgggagaccatgttatataacatcccctatccttgaacttgggtcagtctcttgtgtttagcccagttcttctgctttctcatgcctatagattttagtaataataaaaatagtaaacagacattgaattttatgctgacccaggcactgtcctaaaccctgtttatgccttatcctactgttcacaacgccctgtgtattgtggatatgtttaatgttactcttccagactttgggatcaagttccaagtcatctcaaaaaagtgaggctttccatgcccttgcacccacctccccagacaccttttctccagcttcactgtcccctggaattccaacccctacatcccactcccacacctttgtctaacactggctcctcaaagagttagtttaggcctcacccactctagaaagcctcccgcaggctgcgatctgccacactgatcagctacactacaaaactgtttccaagatagaagcaggtttctggaaaggccgggctggacatcatatttctttatatctccccaaggcctggcatagtaggtgattaacagcgaatgagtgaatagacagacttgtgtgtgtgcgttgtgtaaaccaaaattagtgcctcagcttacaacagaactcgtttgaagactgacgatgagccctcagcaaactgctctgtgtgcagtgctctcgggaattctctctccttccccagcaacatctgtacatgtacaagcttaaatattccctacataaataaccaccaaggaatcctttccttcccttctccagtttcccagcattttttaagaatctataataggaatggatgctatctggtctatttaaaataaaataatgctgtttgtttattgaattgctacgctaagatgcaaaggaaactggtgtttccagagtccaaccttaatcaatgctatgtgaaataacttcagctctatacaacagcaagttccctttcctctctaggaaatatttcttttactgatttatcattttgctctcttaaaaaaagatggcaaacaataagaacttcttctaaacagtttaaattgcaatgacatagatatgtatattctaaaatatgcattgaaatcaattcacagttttaaaggctaa

SEQ ID NO: 182393 - DNA, 807 bp, Homo Sapiens
ttggctttgctttaccagatgaatcttgggtttgtctgtaaatctgtgactttaatgttacttagtatcatctccgtatctgaaggcttattccatagcaagtatatgctgcattgagattatattctaattgaactttattccctgttctggattagagcaatcaagaagtgtttctatatggaactttgttcattgtaaaggcattctgaaattatcttaaattgtggaactttattgcttttctgtgtgttaaggaggcagaattgttagagaaggggattctgattatttaacaacagagaaaggcttctgggttatctattagagatgaaaggattaaagagaaactatagatcagctagtccttatggagagaggaatataaaggaaagagaaaaaataggactgtggcttagtttgggctctgttgactgactataaaagtgagccaatcacatagtaattttctgacaaaatagagtttaggttaaggcttaggtcaaggctgtactttgtgttaatagtattataatgagcaaattaatagaaacaagaaaacacaagttagaggtgagagggccagctgtgtctggttaagtgcatttgtttctggtcctcaactagataactatagtaactgagagtaagcatttagaaaatatagcaatttgactaattttttggtcatttgaataaagtaataataaaattctgccggtactttttgtgtgccttttataaaacaccatttacctctgtggtttgcataagctggctagaaaaaagatttgtttgcctagaatc

SEQ ID NO: 182394 - DNA, 830 bp, Homo Sapiens
actttgtacaaaaaagttggattagaaaatcctgggaagggctctttagggtccctcaccccccacccccttggatctttggtgcaacaaatactactgatgaaagcaccagtgtttgtgacaaacatctccctatcccaagaaaatcgtgcctggttgcaggggacgcttgacagcacttggccccgtgacagcccctctccgggccaggtccctgccacagtcttcggacatcactgcagtgtcttcaacgtggctttggccgccccctcgtccggcccacgctgatcactgcaaattcaccccaccccacctcacgcagatttcaatgtaatgaaccaacacaggatgttttaaactattagggaaacattgtttccataatattctcaccagaaacagatgtggaagtggcagcccgtgtttacagtttctcattttttttgtccccctttaaattaccattatgggtaaatcattgtttccctttaaaacaaaaaacaaatcagtacccctgcctacagaaaagaagagggaacatttatttaaaggatggaaagactgggagttaggcactcccagcctcactgaggggcatttttgcctttgagaagtcctcccaggtatcctggtatagcacaatgtggcaatccgtagtgggaatgaagattaaacaggagagactttgtattagacctgtgagacgagttaggaagccctgcctggcatggggaatgcaaacagggaacattcaataaatcggggaacttgcttttctccccaagaccccagatggggcctacccatcgttctcgtgtaacaaaacgtgt

SEQ ID NO: 182395 - DNA, 170 bp, Homo Sapiens
ttggggaaattttcaaaagaaaaagttgaagggaaaacttagaatgaattaaaaataagaaataggcaaaagcaaatattttaatttaagtaaattttaaagactttttaaacatatttttggggaaaaatagaattgtattaaagaagggccttttaaaatttttctac

SEQ ID NO: 182396 - DNA, 899 bp, Homo Sapiens
ttggattctcttaggtcagagtgattcctgggtggccaatgaaactttggtttgatttactagactttggtttgatttactagaaagaacacctctctttttattggattggtttctgtaagagtgtaagcagggccacagagcagaaacttcttgtttgtgaaggcactgcacaggaaaatagagccttgtagacatcagtcatttgagcggctggatgcagccatgcctgaagccatcacccttagggcaggttttctcaaccttgagactattgacagtttaagctgggcatttctttgttgtagagactgtcctgagcattgccagatgtttaacaacatccctgacctctactcaccagatgccagtagcatgccaccctcccacccgccactcccatcgtgacaaccaaagatgtcttcaggtgttgccaaatgtccctggggagaaatttcctccactaagaaccaccatcctagactgcccataagttatgcaggtcaataattatccgttttgcttatttctgcttgagtttctgttcttgtcttcaaggggctttctgcccgaaggagagctgtacctttaggatggaccttccaaaggaactttctctgaattgcccagtgtggatggtgagagggacagtctgcatttggtcaggtccatgagggagaaatgtaccagagagaaagtgttgagtgagcacttgtttatgaggtcctgaaggatcaggagaggaattgatccccgtagcctctcatgcttagggaaggcttcctggaggaggtgaatcttacagggttcataggggtagtaaagagggaggacaggtttgtgtatgtgtatgtgttggggggaacctgtgagcatgaaacaggatggaatggggtggg

SEQ ID NO: 182397 - DNA, 660 bp, Homo Sapiens
  misc_feature (181)..(240): n is a, c, g, or t
  misc_feature (312)..(330): n is a, c, g, or t
  misc_feature (569)..(587): n is a, c, g, or t
aactggaaacaatccatttataaaatatgtttaatcacacaagtcatatatggcagtgaaaaggaatgagctataaccatatgcaataacatgacaatattaaaaaaattatgcatgaaaaaaatcctgggattctggggttttttgttttgttttgctgtttgaaacagggtcttgctgnnnnnnnnnnnnnnnnnnnnnnnnnnnnnnnnnnnnnnnnnnnnnnnnnnnnnnnnnnnnatttcaaagtggtcctctcccctttgtcccccaaatagctaaaactacaggggcataccaccatgcctggcnnnnnnnnnnnnnnnnnnngccttgctgttttcttgccttgtctcatcagtgtttatatcattaaaaaataaaacaacccagtgcagtggctgttttgttttttaatgatataaacactcacaaacacaccacacaatccaagtagcaccagcttggcaaaagtcaccatcaaactatgaaatcctactgaaaccatccctgtgcttctcgtgcacaggtactcgttgatctaaatgttgcatttattgggttcttgnnnnnnnnnnnnnnnnnnngtgtgtgttcttgcttttaaaagtaaagctatatatatgccaaaacaaaaattcgttgttttccagtgtcatt

SEQ ID NO: 182398 - DNA, 848 bp, Homo Sapiens
  misc_feature (131)..(141): n is a, c, g, or t
taaataaatgttggaataaaggaactatttaggttgtgaaatttaaatgacactttttatatattatacataaataacgatttgtgagactctgggctaggaggattttggcagtaaagccaagagttagnnnnnnnnnnnaatggcatgtgtctactatacagtgattaatgtgttatttcctctgcatttcaactgtgtcacactcctatttttttccttgaacatatgaagatgatgtttgcaaacaataaataaaatagaaactttaataaggtccataggtaactgtcagttccttctctttctaatataaaagatcgaacaatcctttctctttagagggaaactttcacataaaagctagagcaacttgtattctgtaaacacagacaacattgaccgaaatacctaaccatatcttctcttcaaaagtcttagtgactcagcatcctagggttagctagttacaatcaaaaggatttcaagggtagaaggggcaaagactttaaaatgagataaagggactgggtcagtagactgctacagggaggctattgcagagttataacaaatttctccacctctggggaggtaagcaagcagcttaaagaatcacagtattaaaacaaaacaaaacatcctaccacaaaggcaaacaataccataaagaaggcaaaagagacaacaaactgggagaaatacttgtaacacgtttaaaaatcagtaatttgaattcctcttagaaagctattaaagggtacacatatcagtaagataggggagaaaagacagatgccgtaccaaacgaataataactaacaaacaggctgggcgcggtagctcat

SEQ ID NO: 182399 - DNA, 899 bp, Homo Sapiens
agctataaacataatactcttttttgaacttgatgcaagcccccttcatctatgcctttatttctctttctaaatcttaagtaacatctgcctcctgttgtgattaatgaaataatattccaacttgtgggcaagaggggagtgggtccaacagctcttgcaagggacctgggaaatacgccactgaaaagaacgcaacttgtacgaaataggtaaatcccaaagccaccacatttctgccctgattaagggcacccccttgcttattcactttgaagtcttcttcctctgtcataaccaagacaactcgcgacaaggaatcctcttcaggaaatgtgttaagtcttatccgcacttgtgtctctgatgcgctccctccagctttcttttctaggatgcttggagcccccctccttcgcggcgttggagcgggctttggtttctgtttgaagcccggcgtcggctccggacgcgcgcagcgccctccgcggtggctcccaggaagtccctgggagtctgcggagggagcccctgggaggcccaggggtgggcgcggtccgacggccgggtgtccttcacggggcgtcctttccacccagctgtccatggagcgagcagagcccctggccgagcgcccgcccgggagcccggggcagcctgcgggtggcagtgggcaggagcccgcgttccaagccggccttgctccccaacccgctgctgccgcccgcgctgccgggcttcctaggcctccgcgagggcctcagcaacccacgggagcccaatccaggcagagaaccggggaggaacgccgaagcagctctttctccctcataatttgagatgctattttatcatcaacagtctgtgttcagacaggaaagattgccaacttttttgta

SEQ ID NO: 182400 - DNA, 863 bp, Homo Sapiens
  misc_feature (780)..(808): n is a, c, g, or t
tcaggttaaatagcttttagtaaatttaaagtggacagaaatggaattcaatggcaaacaaaatcctcagacagatcatttgcttaaattcgacatagcatgaaccccactttttgaattttggcaataaaactagttttatttcattagctttactcatataaaaatgcttcccacttttcagtaaatggcacatatttataacttccaagatgcccttataaagattacctaaaataatacacagaaacccaaaacacataaaaaacctgcaagtattatctattatatactaactaaatataaatctttatacatctattatacattttcaatttttccttagttattattccaacagatataaacaatgctgggatcaacatacttgcaaatgtgccaacaaatatgccagaatatataggacatggcatttcaaaattcccactccaattcttaacttaagtcaactttagtcatttctccactttttatttctatcattagaatagctgggtgaatctcaaacacaagtgaataaatagtagaaattcagtcaagtaatattaaggctaatgtaattaaattttcatgttgtacttttttaaagaaacagagcagctgccaacttttcagctgagaacaaatttctatagttcttattttataaattatttctcagcattctatatggactttaaccagacaaaccaataatttctttattaagaatctttttttaaaaagtatgtgtatatgaagggctttaataaacttccnnnnnnnnnnnnnnnnnnnnnnnnnnnnngacttatcttactcataattttgcgattaaacaagccaacttttttgtacaaagt

SEQ ID NO: 182401 - DNA, 1692 bp, Homo Sapiens
tacaaaaaagttggatatagtatttacgtatacctactaaagtgtactatgtagtatatatataatattgatacctacaaagtgtaaaatactaaactctaactacatcagtaccttgattaatactatttgaatttaacataagatgaatgcaccccagactcatttcaaagttatttaaataatgaagtcctacaggtaaaatctatgtggcagtcttaaatactgaactgaatgtttattttcactatcaaatatatacctgaatattaatattcttaaggttgtttactgaaaaagtaatgaaatgtttctttagcttattccatattgaaacttactatttgctcttcctcccctttatctagaaaatggagcaagaggtagaaaacttcagttgttccagatgatgatgtcatggtatcgagtattctttatattcagttcctatttaagtcatttttgtcatgtccgcctaattgatgtagtatgaaaccctgcatctttaaggaaaagattaaaatagtaaaataaaagtatttaaactttcctgatatttatgtacatattaagataaatgtcatgtgtaagataactgataaatattggaactttgctagaacaagaccctgtagtaatagtaataatagttgaagtttggccaactcttaataaagttattttggaactaatgttttatggcacttaagaataattagcagcgttaaattttgtttgtattaagcacttttaattttatccttcctaaaaatagtttattgtatctgacaagaaacttacttaaccattgtgtccttcccatcttttttgtcatctttgttttcttcaaatgccctcctcccatctgccttgagattccctcgtcttcacttaaaagccagagtgcaagtcatgatttgcgggagggctcttgaaccacttctggctgcaccacaattctgtacttgagtatcacagtcattgtttttgagacaaacatttttataattctaatttgggttaataaagattttaaatatttcttggtttacttttgtaattatatacacaacaaatgtattaataactaccttgttaaacaccttttaatagcacaaggtttttatatttgcaagctgttgatatctttctaaaactgtttaggttatagtctattgatactttttatatacaattttataaatataaatattataattttatattaatggtaccaaaaatacatttcttaaggttaaaagcatgcacttccatgcatacttgcttttggggagagtggggagaagacattctaataatcagtttgtgaaatagcttctgttggaaaccttttgaggggaataaggaatggtcatctaaaatgagagattctggattttaatgcagttcaaagttgagctgtatttttgttgttgatttatctggattttttttaaagccttctaaaacccagtgaattcaataccttaattagtacatactatcttatgtaatgcataaagcaatgccagtcactgagaacatttaaatatatttatattcctggagatacacattctcatttttgttggtttattataaattattcttctagatgcatcttttataactaggatttcattttgtgtgtatagcttatgtaataaattttaaaaggtgaaaactctcttt

SEQ ID NO: 182402 - DNA, 1163 bp, Homo Sapiens
aaaggagagagaaactgaaggggctgatatgcaaggagggaggctgagtgcttctgagacatccttggtgcttcaggcctatgtgacggagggctgccaactctaacattaaagcagaaatccagaagtgaggattttgttttaatccttcactttccctcctcactagatttctggaaggagttatttatgagtgaagagctggagaatccattcgcaaactgatgcatgaaagtgattagcaagagaaagttgtgagacaaaacagagaagctgagaggccagaaacctctacccaggacgctgagctcctggcggatccgatgagtccctccaggacaccgtccaccctgggatgaaggcagaggagttggaaggaggcgaggccgtcacgggacaacaggaccctatgaaggtgggcccacagcaaaaggagagatgattctagagcatccagtcttctagggcagcaaaacaacctaaattttctaagaggccacccagctgagggtgcccccggggagggctgaggcgtcagggtgacggctccactgcccactcacctgcgacctcaaagcccctctcctccatggggtgctcctgacagccacctccagggcaggcgagtggcgctgggacaaaggctggcccgactgcgccccacccaagcagacggtccttcccccagacctggcgccaaactggagtgaaagcccgaccaccgtgtctcacagggaaactgacaccagatgcgaacttccaaatggatccctccctgcaagtgtggagctggcgctaccaggcactgctctggccatgcgtctaagacacaggcagagggcgctgcccaccacgctggcgacggcctcaaagcccctgttcatgcctgggacagcgcccaaggaccttgctcatgcctgggacaggccccagggcccccactggctgcagtcagcagcgggcagggtggtgggggaaggtatggacactccgtgggccggagctgggagaacaagcctattattggacacctggtggccatggcaaccacacaaggatgcctgagactgaaaatctgtgggcttcaaggagctccagctcttgcactggctgagtcacagtgactatataactcttactcccacttttgggacactttttga

SEQ ID NO: 182403 - DNA, 376 bp, Homo Sapiens
ccttggaacttttacactggctgttccctcttccacaaatgctgttacccaggtacagtcatgttctctccttgctttcttcaagtctctgtgcaaatgtcaccttctcagtgcaacctattggggccaccttattcacaactgtacccaatccttgctcctggcacttctcctttatcacctacacctttatcaccttctaataacctatgtgattcactcaccaattttatttctttgtctcttcccaccaaaatgtaatatccaggtggtgagggattgttgttgattttgtttcctggtattccctaagttctgaggagagtgcttggcacataataggcattcagtaaatacttgctgaacacatggatgg

SEQ ID NO: 182404 - DNA, 939 bp, Homo Sapiens
  misc_feature (182)..(207): n is a, c, g, or t
  misc_feature (239)..(462): n is a, c, g, or t
actttgtacaaaaaagttggcttaactcctgctttagaattattgttagctgtttgtcttccatgtggcattgttcttattaatatttcattgagagaacagtagtaacaatatcctgtatacccttgtgtaagtaaagagagcagatcactattttattgaccatctttcaaaagatcgannnnnnnnnnnnnnnnnnnnnnnnnngagatagtctcacattgtcgcccaggctgctnnnnnnnnnnnnnnnnnnnnnnnnnnnnnnnnnnnnnnnnnnnnnnnnnnnnnnnnnnnnnnnnnnnnnnnnnnnnnnnnnnnnnnnnnnnnnnnnnnnnnnnnnnnnnnnnnnnnnnnnnnnnnnnnnnnnnnnnnnnnnnnnnnnnnnnnnnnnnnnnnnnnnnnnnnnnnnnnnnnnnnnnnnnnnnnnnnnnnnnnnnnnnnnnnnnnnnnnnnnnnnnnatgtgtgagctaccgcacccagctccccaactttgtttctaaaaggtttggctattgttggttttttgctgttccataaaaattttagagtgaaatctggcaaatttcaacaaaagctgtcctgaaatttttattgagattgccttggatctgtggatgcatttggagagaatgaacatctttaatgtcaattcctgattatttcttgctaatatagagaattgccattgttcacttatctcttgaacgtgtagtttaatccagctagtcaaagcccagttcaaactcactttcccttcctgttgtgagaaaacacctcaattttgcaaaagctcttgggatttaacatttctgctgcttttccctgtatgtgtggtgtttagtcttttcatagttcgttgactatggattcagagcagaaaccctatttcctaatttccttgggaagttttcagaactagatgatatgtaagtttc

SEQ ID NO: 182405 - DNA, 655 bp, Homo Sapiens
agggctttatcagagagcattgctctacattatggcaaactcaaataatattttcctcaaaaacaattcttccatgtcttcctcactgcctttaaagtgaaatctcccttcactcaacagagtcaaataaggatttttagtgtgtgtggtgtatagttatcagtacttcctaacaatttagcaaattacatttgtggtatatattcaacattcccaaactctataaataatttacagtagaaagacctcaattttagatgtaaaaaatgtagtaacaacctacatttcatttcacatcctactctacctattgatttatactacttgagtcataaagaatgctgatttatttctattattaatatatcctcaaggatgaggttttaaaagtacacatgagctcctatgtttgtgcataccgtatctgttactaacattcttacagtgctcacacagactgtgtaatctgatgggataaattgattcatatattgcacattgattacaataaactattattacaattaacataatggatatgacttttgggatatatagggattataagagggagctcaaaagatcattttttattgtggtttcgtttgtactgtttggtgacaggtatgactggtttaaagctgctaattaccaa

SEQ ID NO: 182406 - DNA, 442 bp, Homo Sapiens
tacaaaaaagttggaattttagtgctgtctctacaaactcatcctggtatgtaaggtcatgttgcactagtgattttagtgctatacctgacaacccatcgtgggctacaagttcagacagattcctcctatgttttcttctagtaggtttctgattttgcattttgcatttaggtctataatacaatttgagttaattattgtgaaaactaataaggcctgcgtgtagtgtcaggcctttcttttttacataacaattggttgtgttgtgttaaaacaacaaataatgatgaaaaacactattctttttctactgaattgtttctgctcctttgtctaagatcaattgactctgtgggtctatacctggactctctattctgttttacttatatatttatctgttccttttgcagatggaggaatttcttgattaatgttg

SEQ ID NO: 182407 - DNA, 654 bp, Homo Sapiens
attggaaaagtaattatttattatgacaaaaataaaactgttgaatgaaaacaaatgaatgttacactatattgcaccatgattggaaatgagccaaaacctgtctaaaagatgaacattccagagcaaacagcatcgttttacttgggttaagtaggcatgcaaacaactcattataacataattgcagaaataaaaattatgagtactggcaacctaaacttaacatataaaagaagcacttcataactaataaagtattaaaaactttaaaacatgtcatttaaacaatcccaccatcaggaaaacatgctttgaaccattttcaagaagtgatcatgtgaatgcattaatttacttgttttaaattttttgttgttgttgttaatgcttatatattggaccaatggaacacatttgtttggctggggttcagacacacagtttgtggtgtgaaagacatttttctttcctctgcacaataccggaggacccacagagcaatccaattcttaattctgaccttattaataccatcttccagttgaccaagcatagtaatgaagatattcttagagctttcgcagaaagcctgaagcttaaggagtaacaacagtttgtatttaaatcttaagccaacttttttgtacaaag

SEQ ID NO: 182408 - DNA, 1643 bp, Homo Sapiens
ttggggaaatattaatttggaggtttagaagcatacgaaaaacaaattcaaagcacttgaaagtaaagacaatatcatgaggtcgaaaaaacttcaaaaggatattaggtaagagaaaatgtgaatgaaagcagtgaatttctgcctctcctcgtatttagggtacttaaaattactaaaaaatactgtctttttaccatacagctagatggcctgtattattcttaatgtggccaaaggagtgaagactgattagggttttagaatttggaactgtagtcacataaaggcatcttttgcatttcttaaaccagtaatctacattttctcctggaaatggagaaatatgaaatgtgctgtgcatagcttttggaatagaaaacaaagttttaaaagaatggatatgttttcttgcacaacttgtaaaattttaattaaaaaattacctcatttttcaatccataaggtgctttgctcaagtttgtgggatgtttgtaccatcccataaaaacccccttcacccaaactgtatttgaaatatgcaaaattcataactaagggatagcattccttggagactttgttttgttttactcttgtttaccagctgggccaacatggtagatatatgagattcacatatggtttcattaaagcacataggaaagtgctcagtcaatatttaattagtttaattagataagggaaaggagaaatcctaaatttgatggattcttttatactgtgaatatatttccatcagtgttggtaagatatcaaatgactatcagttgatcccagtcatcagtgacttatttgcatatttaagccctattcacaagagaccataatcattttaatcttatattttccctcaggaaatttagggactctgaagcccctattttattctcttggagtaaactgttgagtgtagttacaaaaacttttatttatgacttaaaaaaagtttagctgctatttcagtgaaagtgtaaaataaaacggtcatgatttttttcaattacagaatagttacaaattttaccatgttcatctattccacagagcatgttaaaaacaacaacaacaaaaacctaacagcaattacaaccttggtgttgcgtttattctaatcagagtgaatgattataatcacactttgctattttaacataaattggtgctttagagcattaaagaggaagcagcaggccctgtactcagtatttattatttcttgcctcagaatgcaaaacaactttaaagtgtctatattcatatatatgtgcatttcttaagatttaaatacaaactgttgttactccttacgcttcaggctttctgcgaaagctctaagaatatcttcattactatgcttggtcaactggaagatggtattaataaggtcagaattaggaattggattgctctgtgggtcctccggtattgtgcagaggaaagaaaaatgtctttcacaccacaaaccgtgtgtctgagccccagccaaacaaatgtgttccattggtccaatatataagcattaacaacaacaacaaaaatttaaaacaagtaaattaattgcattcacatgatcacttcttgaaaatggttcaaagcatgttttcctgatggtgggattg

SEQ ID NO: 182409 - DNA, 903 bp, Homo Sapiens
ttgggaagaaatgggagaaaaaagcagaccccggagacttaggagggtctgtgtgagggagtctccaggcagtcttcctgggggtgtcctgaaggacctcctgatcgtgattttggtcagtgtggaggctgtggtttcttctgagctgtcagtatttggaggtgagttgtctgcaggtcacctcatcccacctttacacattagtaaaatggaattcgctgggtgattcttaggactgtgcggtcagtcgaattaccagacgtccctgcatgctctgtctaagggctggagtctgctttccttgcttctcttctagaaagaggtctgtccacaagggattagcctcgcgaagttcctactgttgttcattgacccagtgagtgttttacccactgtgggtttttcctacctaattgcccctctggttttcagtgttcaacatgctgcagttacgtgttctgctgtggttttacttagcttaatcctttattaattgcctcttgttcaaactccctaagagcagattatccttctctttcagcttctgctccattgctgttgaacttttttttggtcgtgacatcagaaaaataaccaagtgtgagtctgataatagcaagtaaggctattttatttctatccaatttaccccaaatttgagcagtattacaccttaaaataatagagctggctcttgcccagcatgtgaaaagtgtatgcttcacgatggacagatattttccagtatctacttaccataaatctcaagatttaccctaccccactccagccattacccccatgtcccatttgcctaacctaccctagggccatctcagtgccctgtaaagcaacctttgttgcagacccactgtgtgactggaatgtgatgcacacaagtga

SEQ ID NO: 182410 - DNA, 877 bp, Homo Sapiens
ttggctccgccgcgctctccgccaccgccaccactgcggccaccgccaatgaaacgcctcccgctcctagtggttttttccactttgttgaattgttcctatactcaaaattgcaccaagacaccttgtctcccaaatgcaaaatgtgaaatacgcaatggaattgaagcctgctattgcaacatgggattttcaggaaatggtgtcacaatttgtgaaggtaaacaagctttgttacttcttttggattatactgtaagattaaattctgatgggactgcttttctgtcctccagaaactaacttgttttgtgttatactgtttaatttcatactatttaaaaaacgcgtaagtagctaaacagtaagtttgacttaccatgtcaaaatttatacttgttactgattttaaaagacttcatgcatatcttattttttggtgcaaatattaaagatttccttttagctcatgctggagatccaggtgtagagggcatagtcaacagctttgggaacaaaagagttcacgaaatgtatactgctatgtatcgccttcatataccctctttacatgataccaagtatacaagtatttgtatacctatatggtatatgataccacatatacaggtacttgaccgcctatatttggagatgatattaagagattcatggttttctcatgcataccctgggcataggaaatgacaagagaaagagagaattttgaaaagacgtcatcttttgaaaaagtagattataatcatagaacttcatgctactgtccagagacagaatgccacaaagcatccttgtagggtgcagtttagcccattgatttgatcagcagaacaccatctgatatcaaatttacgta

SEQ ID NO: 182411 - DNA, 539 bp, Homo Sapiens
atgcaatgaaagcattggattgatcattgctaacatttctctctgctctaaaactgtgatttttatcctttgctatttgcaagaaccagaagagataaaggttgccttttatgttagatttgattctaaatctaatgatataggacagcggtgcttaagctatttttgtgaagtgataaggaaaaaccctgggaaaggttcagtggtggtttgcacagctgattatttgttatgattaattgttccacttttattttcttttgtggcctgtaacctaatttttcacttagtattgggattattttagtacaaacaagtgatatatttgtaagaagggatccagagagtatggtaaaatgtctggatgctgatgttctctaagttaaaggagattctagggggtagtctataataaaggaaaaacacattttttaaggttttaatttttcagagtgcagggaggtgctaggtgctttcctcacattaagtataacatttccttttacagtatgtcagcatattgttgaagttttccccaa

SEQ ID NO: 182412 - DNA, 1414 bp, Homo Sapiens
  misc_feature (270)..(370): n is a, c, g, or t
  misc_feature (505)..(541): n is a, c, g, or t
ttgggagactgcgaaggtggaactgagcagacctttccaccttccacccttggccatcgatccttggtaaaaagccaagtgtctgcttattcatgaatacactccttgtgatgattgttggcactaagtgtatattctgtaccagctgctgtttattgattgctgtcttagtagctcaggtatgctacgtgttttagttgactttattttccagttcagctgtaaattttaagatgcaaagctgtttttatttgcattatgatcaagggnnnnnnnnnnnnnnnnnnnnnnnnnnnnnnnnnnnnnnnnnnnnnnnnnnnnnnnnnnnnnnnnnnnnnnnnnnnnnnnnnnnnnnnnnnnnnnnnnnnnncttaaaagatctgatgttgttcatggatggatgttttgtccttttgcattctaaagtctttaggtggctcttttggatatgattcttcttgcaataaattgccaagaaccagggtttcatttctgtacagagcannnnnnnnnnnnnnnnnnnnnnnnnnnnnnnnnnnnncctagttactaaactggcattttaacctctttttctccttttagctttgaatctgtctttcttaaacttgtcttttactctttttcttctcatatgtattaataactatagtcagtgttttatatttagtttttagtactcagtgggaggtcatgtaactaattgtcataccagggataaaactaataaggtgctcattttttgtaagtaaaaggaaccactgaagataaaatacggttatagagaagaataatgagttctcatatgattatttacctttttaaattgaccctgaatctgtatgtggaccattgcaaataaacaagtatacattgtatgttgagaaagtactgtgtatcaacatgttttttgtgttcatgcaggtatatatttggttataaagtcagttttataatagtttagaaattgttttatatataaacagattatatataaatgtggactagacagggagggattaatatgaatttctatactagttttcctttacctatatatttataatgacataaagctcagcttatgcagttatacaattttaatttttagattgtaaaaaatttgtcacattttgaatatatatattttgtaaaagctacattgaaagaaattaaaattctgagattttcctaaatcaaatgtaaaaacatacaatctatccattaggattttctatataaacttgatatttctgaatggtcttttactcatttatgctgaaagtactgttttatttctataaacaaattaaaaaacaaactacctggttgtgaaaattttattttaaggtatttagcatttagaattcttgccttccatggggtaaaattttatatattcttttacttttta

SEQ ID NO: 182413 - DNA, 676 bp, Homo Sapiens
  misc_feature (86)..(140): n is a, c, g, or t
  misc_feature (147)..(225): n is a, c, g, or t
agttggacagcagcaggggaagggttaaagtcacattttagttttaaaatattcagcatgtattttgggctacaaaatagcacaannnnnnnnnnnnnnnnnnnnnnnnnnnnnnnnnnnnnnnnnnnnnnnnnnnnnnngagacannnnnnnnnnnnnnnnnnnnnnnnnnnnnnnnnnnnnnnnnnnnnnnnnnnnnnnnnnnnnnnnnnnnnnnnnnnnnnncacggaagaacgacccttatcttctggagatacatgctgaatgtcttacaaataaaattatctaagaactgaaattggcttcaaggtaaagcaggaatggggtgagaagtgtgtgtgacgtggacacaagggtgatatagaagattggcatcaagtgacagaagtagacggtagattcatttttatatatgtttgaaatactacattacaaaatgccagtagaaaatctgagtctaaccctaagaatgcagtacatcctacttccatgtttctttctttagagctgaggagaggcctctttactttggtcggaaacctcattagtttgatttagttcaataaaaatgtgtataggtgaaatagtccatacgaattcattacaattgatgtgaaacaaaattaattaataattaatccatgcaagtcttttggtagcctgcattttatcaaa

SEQ ID NO: 182414 - DNA, 872 bp, Homo Sapiens
ggacaggccactgtgcaagctgtcaggtcacgggtgcctccactaaccaatttgtgaaatgggactctaaacagaaacactacttgttctagtgtaatgacagaagcagagttaaagggactgcgagtgtcctagggccctgattatgggatgtggggaaagatcttcgaccaacctcagtcgctctaagtgagcgctgggctccgagaacggggcgtctgcctgctcccggagaggggcagcccagggaagtgaaagctggggctcagggctgcgagggcctcgggcgcccgtagatgtctgagtttgccacctccggctgagggagacgaaagtaccaaggactgagaggacaagcagagaccaaaaccgaaccggtgcggagggtgccggggtgacctcggtgcaagtgtgggtagagaagaggaggcggctcgagaataaggcttcaaactccctcaggaccctgtcaacacccgcgagacccgtctgcctggccgtaagtttggtatctggctttttctcctcctagattcttcaggccatacaagaagtggaaataaatatccgcagacgacaagtttcaagttttcccactggagctccgccctttggaaacctacaaggcctccccttgccgcgcgcagttaaaccttcgggacagactcggatgaccgggagggcccaagtctcccactgaggaatgggaagaagtggtcagccaaacccaccggcctcccaggcatcccgctggcccacctgggtggccgggcccctccctcgccgccacacccggttgcaaacacacaaatcccttgctccccagaccacccaagtcggaatccgagtgaaataaatccaacttttttgta

SEQ ID NO: 182415 - DNA, 936 bp, Homo Sapiens
ttggattattaatgagccttctaaaaatattttagaacaaactttcatagaaataaatgtctaatattcactttggcatctttcatcttgtgtgttgacttaattctgcattctacatagttatcttcagtttcttaagtgtattcagctgaaatcgagccatcttcactcagctcatttgctctatctagatagaagtacatacttacattaaaaagaaaataaaattaagtcttgaaatgtagagtaagaaagtccccactcatcctcttcaattttatgcccttcaaagtaacaagtattggttctcatgcacttcaaagtaacaaactattaagtattggtgagtatctttctgtatcattttatttgtgtttgtcttttaaatgtaaatgggcccatatttaacattgttacttgttctttttaaatatccttcttagtaatatagatctaccccattttttcactagtttactgccattaattacatcccatctgcccactcccaaccacccacaagtatgtatgaattactttcatgttgggaaagccatcatgccttgttttgcctcttccagtcaaaatggaaattcttgccacttgaatagagaaattatatagttgtctgtcttctttctataagaactgcttattcatcactctggttaactggattcctttattccttaacaactgcctctaagttattaatatttcttagagttcccagttcttgtagcccaaagtacaaaggatttctctgctcaaaatctgctcactgttcttatgggttaataaactcttaaatgcaaataccccttgtggtgggagaaacttataacttaaactttactgtgagttacttaagcttgacacttgacttcagtactttgaaatggattattactgaaatagaattgtgatttccaaaaa

SEQ ID NO: 182416 - DNA, 524 bp, Homo Sapiens
  misc_feature (338)..(375): n is a, c, g, or t
ttggtgcatttgctgttcaggtaaaattctttaggaattttctctgattctgatttctatttctaaaattttcgatcatcttcaccattttcccccaaaaaatgaggggtgcatttctgtcattttgtgtgtggttgggtggtattgttgcgtctcagttaggggttgtgaaatggaagctctggagggaggaaaggcattcttggtttgcaactgagagcaaaaggtaccacctaagcatcttctgtgagactagggtgcttcctttagataaatgtgtatctgtaatcagcttaactaagcaggtaaggtgttcattagctaggcagggttttcannnnnnnnnnnnnnnnnnnnnnnnnnnnnnnnnnnnnnatgaatgtggaagagtgagaagaacaaacaagtcaaagcatttgttcatgctgcaatctacacatcaattatcccgctgtcctaattaccacctttccataccccaggtacctaagcattcacacttactcactttcatgcctctgatc

SEQ ID NO: 182417 - DNA, 522 bp, Homo Sapiens
  misc_feature (377)..(412): n is a, c, g, or t
ttggtttcttccaggtagagagaggatacttctggcctagacaattcttttatagcctgcttaaggggaaaagagtgggagaaggtcagagagacctgcttctgctcaaatgctacagtgccatattttggggttgagtgtcctgaaccccattagaagacatgaagaaaatttaaatttgccataatatgattttcattttaatcacaggagcaattatccttaaggaacactaatagatagtaaggatttgcagaaactaatttgcatagacatgttttgagatatgatttacagtgcttctgaacattgcaattaacccgatttttacattaagctaattttccattctattacagaacctaattcatatctannnnnnnnnnnnnnnnnnnnnnnnnnnnnnnnnnnnctgttaacagattttatcagattattgcatggttttacacattttttgtcataaagtttgtaaatagctaaatcctctagatttgcatgcttctaggaagcatataaaac

SEQ ID NO: 182418 - DNA, 224 bp, Homo Sapiens
aaaagttggatgaattaaaaagataaaatacacagataggataaattctagacatgaaatagatgaagataaaattagtgaataggaagatagtatttaagaagccaccaaaacgtagtgcaagtcagagttaagggcatgaagatatactgagaagctccaatttttatacatacatatgagatagtaaacctatctacctcaaggataaaaatgatagtatt

SEQ ID NO: 182419 - DNA, 504 bp, Homo Sapiens
tacaaaaaagttggatctattttattaatgttatgtgtttaattttggacttattttgggaaaaactgttcaaattgggtccttttaagcttattttaagcagcctagaaggaagaagctacttagctaatgaaagctgagacactttattaaaagcaggatcttaagagcattgtttttccttaaaaactttatactctcagataatctgcaacaacaaaaattaagaaatccctgacttttgtagaattcccactgtcaaattctcactgacttatgagtgtgagagaagttatcttttgtttgaattctgatagaacagtttaactcctttctaaggatataaaaaattcattggaaagtgtgtatatttcaaagactctcaattatctggactgaaggcactgttctcactatggccagatgaatgggagtattctgtacatgaatcatgctgtattttaaatcaggacatcacttaagtattaatgttgtgtgtacaga

SEQ ID NO: 182420 - DNA, 757 bp, Homo Sapiens
tcaaggtctttgcagggctgtggctggggctagtcctctggggctggagggacagttacatggtgagccaggagacgattgtcactggttatggtttttaagctgtctgctgtgaagagatcaatgacaccctttttgtgatcctcattgtattgctcctcaaatgacctgtgggagtaggatagggcattgttttattctgttgttatggaaaccagtgaagcatctgagtttcatattcagttggatggaggtacaggactcaaggaaccaagcctaggagcagagaagacttgaggatggaagcccctggaaatgtacagacattgtacagctggattttggatttccctaggcggtggcaacacggggtgggaggtatttctccaagggtctggagaaaggatgcgcagggttgaacaaggtgcaacatcttatggactacccagttcatctggactgcaatgggaatgtcatggctgagttccttctctgctttcaaaggacactgtctctcttgttattcttgaggcagacgctctgtcctctttcccttcaaagactggctttctctgcttatgcatagacttcggtttgccactccctcatcatccacctgggctaatctctctgcatcccaggagaaagactctgattggcccagactgagcaaatttggaccaatcagagaggagtgaggagaggctcaagcccccctacacctgaggctgctacttggtcccagctactcagccaa

SEQ ID NO: 182421 - DNA, 957 bp, Homo Sapiens
gagcaatgcttttcctttaaaagccaactttgtacaaaaaagttgggactttttgtggaatagcttcacttacacttctcaaccccagttttggatgtatgttaggtccagaccctcctacatatttataaagtgagttgaactttgggatgcctatttcaaaactgatagattttaattctggcaataaaacaaggcctctgtggacctatttctcagcagactactaaagctgccttcatgcttggtacattagttacatcattagaaacatttgaaagttaaaagcatactgtttttagaatggtacataaagcaaggcttggtaaagattccagaggaatctgaaggtaggaatatttagggatttccatactgtaaaatacagttaaacctcactagcctgtgtgtacagcatatccttagagacttctgcccagaatcctggctagatttttatccctgccatttggcaaaataaattcctgaccttggaaataaatgggacacaatatttcccatgctccctcagatgtgtgatgaatatgttatttattttttctcccaattatagtgatcctctccataattaataatctatcagcctcttccagtttgaataacttcctttcagtttagaaatactgtcttttcaagatcaccttattattggacttaatgtctttaggtaattgcttagcctctcagattcctctttgaagatggcatttgggcacctgagggagggatggagagctgaaggggtacctggatcctcctgctgtcctctgaacactcaggttccatggcaacctctctgcaccacctgactcttcctgaagttgaagctgaggtcggcagcagattaactcctgattactgacttctctgccagctggagcttggcagggttcccgggctccagtagcctcccttggctcacattggtaatggggt

SEQ ID NO: 182422 - DNA, 847 bp, Homo Sapiens
cataaatataagagggagatttaattcacattaaatcccacaatgaacaaaattgcctcagttaaaaagaccaaggtgtggttttttatgtttattacaaataaaaaaaatatgaaattaaatatacacaatttacaatagattaaagaaacataaaatatttacaaatcaaacttaagataagcaagaccactatggacaaaaatataaaatcctattggtaaaccttaaagaagacccaaatggaaagagaggtaaaccatgttcatgaatcagaaaactcaatattgtaaagacgtcaattttcccaaaactgattgatagctataataaattcccaaactatcaagtgcatcattgttgttggaattgacaagctgattttaaaacttatatgggagaaaaaccttacatgaaaatacaaagagccagaatagtcaagacactctcaaagaagaaaaataaggtggaaaagacttactttatcagatctcaatacataattgataataatgaagacagcttgatattggcacaagaacagacagactaatggaacagaggaaagaatccaacaacagatctacatatgtcatatgtggacatatgacagaggtggcattgcagatgggcgcagaaagttagattacaaacaatgataggacaggtgtgtaaccctatggagagaaaaaaatgaaagtgaatccttacctcacaccatatgcaaaaaaccaaatctaggtgaattaaaggcctaaatatgaaatttacatttataaggatttcagaatataatttaagagactatcttcatgaccttggagtggaaataatttcagtggttttc

SEQ ID NO: 182423 - DNA, 903 bp, Homo Sapiens
ctttgtacaaaaaagttggcattttttacttgattcatcatagctttaattctattacatactacaataaaaatttgacaagactgatacaaatatgtagtgggcaatagtttgccgtcttcttccctagtatggtgtttttcaatctggtgactagaataggcagtgggctataagcaggattcataaggcctggagctgagttatatgtgacactgccacctattcattgtgtgaccttggttttaaccttcaaagtgggtctcctggactaaaagaatgtgaaaagatggggaaataaatctgtaatctgaacatggaatgacttagttacagaccagacatattgttactgggaatgaaaaagtcaatatatttgaggggaaaaaaatgtaaataaatattgagaaagattttacaaatctaattaggggaagatagttatctcccaatactagagggtaccagagtgcttttaaggggaacatttggttacccttatttctttaaaaaatggcagtttaggaaattctgccctaactgtagtcccaatgtcagataggactcaggtctccactgcaaggaccaaaatgttaagttgaagactgaaaatgggaaaatttggaaatgtctttggaacctcaagtacataaaagcctgtaagtgcttcatactcattaacaacataggcatagaaaaaagatatccttattctcaagcatagccttttctaataagttcatgttagatgtcatgaagtttagtgaggagtgaaaatctatgaggaaaaacatgaaccattctactctggcaaaagttcacgacaaacaccataggcctgtataccaatttttaaaccatgttgaataatgtgaaaaaaagcatcacattgcttatgaaagg

SEQ ID NO: 182424 - DNA, 409 bp, Homo Sapiens
ctatggaactattgggtcagtttccatttatgatcagtatcatgcattatgtactgcacataattgtttgtgctataatttacatgactggtagttcagttggtttaaaaaaacacataaacatgtgagtatcatataagcatgtgaataatgcattgcactaaaaactatgctacaaagccattaagcaacagtactttttcaacctcattataatcttatgagaccactttttatacacagtccctcatttactgaaatgtcattttgcagcacatcaatacttttcttaaactcttggaattatagaaagtaacccaaaatgtgtttcaagttctcatgactgggtacatctttggtaaataaggttagtttaatattgttcattttattaaaataagctggtggg

SEQ ID NO: 182425 - DNA, 127 bp, Homo Sapiens
tgagccaccatgcccggccaaaacagcatatttcaacacagcacccaggacacaatagcacagcccaaaaaaccagatctggagttagatggacgcggtttgaatcctcgttggtctcttagccttg

SEQ ID NO: 182426 - DNA, 417 bp, Homo Sapiens
aattcatggtggagaaaaaccctgtgtgtgtagtgaatgtggtaagggctttagggagacatcaaagcttgttaaacatcagagaattcatactggagaaaagccctataggtgggatgaatgtgacaaagcctttagtgggaattcaaaccttattaaacaccaactgatacatactggagagaagccctataaatgtattgagtgcgggaaagcctttaatccgaaagcaaatcccatgcaatatcagagaattcatacaggagagaaactttttgaatgtcaagagtgtggaaaaagcttcagtcagccatcacacgtgattcataatcaaaggaagcatgcttgagagaagccctacaaatgcagtgagtgtggaaggggcttcaacatcccacctgattgatcatcaaagaa

SEQ ID NO: 182427 - DNA, 353 bp, Homo Sapiens
ttgggtttctactgtttcaactgttgttgctcatagcaacaataatgctgctatgagcatttgtgtacaagttttttttgtggacatacattttcatttctcttgattatatatctaggagtgtaattgctgtgttatatggtgactttatgtgtttattggctgttagtatatcttctttggacaaatatctattcaaatcctttacctattttttgattgggttgtctttttactgttgcattatgagagttctttatatattctgtatataagttccttatcagataattgcaaatattttctcccatctatatcatttctttcttaataagttctttgaagcacaaaaa

SEQ ID NO: 182428 - DNA, 679 bp, Homo Sapiens
tgtacaaaaaagttgggactgctttcctttgttgcagaaaccagtaggtatttgggtgtagaaatgaaaccctcaattatattcataaggctaaaaatgaactattccctacttcctcatttgttttgatttttaaaataaggttctcgttagatattttgagaaacagtttaagattataattttgtatgcagaggagaaaatttagaaaatggtgaagccaacttttttagtgtataaacatttaatcataattatatatgtgtccgtgtggacatttatttaccaaggctttgctttaaggggaagggagaacacagagggccaacatttatggaacattctagtgggccaggcccaatgtgttaatcatctcatttcaattttgcagttatcctccaaggtggatcctattatcttcatttaacagacgtggaaattgaggcttagaggatttgacaaaattacccccatcattaatggcagagctgggtgtaaaccctgggattacaggcgtgagccaccgcgcctggcctgaccacgtttttgattcttgcttctgttatatctgtattaaccgttcttcttagcttcgtggcagatgtgataagcatgcctttgtgtctttctctaagtcactgacttttcagtaacatctaaatcataaaacataggtctg

SEQ ID NO: 182429 - DNA, 327 bp, Homo Sapiens
ctttgtacaaaaaagttggagctgagctctggacccacggccgacgctttgcatgctgtttctcttggaggtggtgcaggaggttgaggaaagcacctctgatgagcagatagctggaggctgttcccacagtcatgtctcagcgaagaagtcggagttcagcagccatcagaaccaagggattcaacttggtgtcatcttcaaagagagaagacagaaggagcaagattagtggaatcattacagcctttgtcactctgagtccagatgggatgaaagttcagcccaaactttcattttagagagagagggtcttgctccgtcaca

SEQ ID NO: 182430 - DNA, 910 bp, Homo Sapiens
cataaaagacaactttgtacaaaaaagttggcttatactgttcatagttgttgactccatcatatgatggaaatctatgctacttaaatcattgacagatgatctcatcttttctgttagttacaattgtgaatcatatttccaagcacactttccaatattttcttgagcatttaattctgaaggtcactatgacaggttcattaaatgccgtacatcatctaatcttcagaatgactacgtgagatgggcactttcactttcttcattttacaaagatgaaggctggcacccaagggagtgctgtgtggctgccatgttgagctccccagtgagcagggagcagggctgctgcctgggtctgtctgacagcctcaaagcggagctcacgtctgccacacggtgtggccgtgtgcacacgaaggccaggccatttcaattccaaattatgacaagcgtaaactgttatgtcatgaatctatacatcaggaatatgtgagatttggtatctttggtgcacaatgactctgtgatcccaccgcctacttcagaaccggggtgcgtagcccactcttcagttacactttgcaggtccgggtccttgtgcacgtcctgtgaggaaggagaacaaggagacatttgatcatcaatgcagggagaagggtgttctaagaccaaccctcattccagctacaactgtcacccccaccacgaccctcactgtgcctgttacctgaggggtgatttgcagcacaggcagagttatcttggctccagcactctgcgtgccagggcctcagcttcatgagcagtgctcttctggggggtcctggggtgcaattggctgtggggcttttgggtactttttgttgcaataatgttttttcagtctgatatatttatatgtata

SEQ ID NO: 182431 - DNA, 1649 bp, Homo Sapiens
  misc_feature (69)..(78): n is a, c, g, or t
  misc_feature (225)..(233): n is a, c, g, or t
  misc_feature (316)..(333): n is a, c, g, or t
ttggcctagagttgatggctgtgtttttttctacctctcagaattttaatgcatcttccttttagattnnnnnnnnnnggtaacttgggaagcttcaactctttgaccacagctatataagttattttttaaaacaaaatactttcaagtttatttactcactaaaaatataattatggtcaagacatttcttttcaataggttagtcattttcttgacgtctannnnnnnnnaacttgagcctgcataaaaagaattaaaccctgaagaagtattttatgtcatatctgctttcaccagattgggtatagttctnnnnnnnnnnnnnnnnnnaaaccttaagtgttctcagtgttttcttttcacttaagacgtaggtgtcctagaggaaaatgctaattttaaactgattctaaaattgttattttaaaatagtaaaaataacttaaatacagattttggtacaactaggttctcccaagagtaaggtcttctaacatctaataagctcattgatttactactattaggtgaatgcatatactaaataagttccagctaagtcaggtactacttccaattcagtgttcttctttgaccatgcattaatgcattatcagtaaaatgtagtgatctcaagcagccagaagtcttcattgtcattagcacaggcatttggatgcttcaggcttattgaaatttatctttttatggagacctttaaagaacattctcatacaccacttattcttaatatcttttaaactttaaggattctctattgtctggaatgtggaaagtagacctgggaaggtcatttgtaccttgctgacaaatttatatttctggatttctttctacattattccagcaattcaccttacacccttaccaaagatcactattgaaaaaatcatttgctttagttttccaacgttctcccttcccccaacaaacgttatttaaagaaaaattccatgtatttctagttgttttctattatacgtggcacagatgttattactttcagaagaaccctacaggctatctgagaaccaatcccctggcttgggggtgacatcagaaaactgatttgtcttctctgctggtgggggaaagcataatcctattatctggaataatatggaaagaatcatagaatcttaaccatcaggtaaggtataattcaccttttaattgagctaatgactcgattgtgtacttgaagaaaaattacatggtataaagacttctttgttgttttttagggcattggccctaaactgtgatgctccattggatgataaaattggagcagagtctcggaattggagagctggtaagccagtcagagtgatacgcagttttaaagggaggaagatcagcaaatatgctcctgaagaaggcaacagatatgatggcatttataaggtggtgaaatactggccagagatttcatcaagccatggattcttggtttggcgctatcttttaagaagagatgatgttgaacctgctccttggacctctgaagaatagaacggtcaaggagattatgtctacgtttacagtatccagcagttacccttcagataaaggaagggaagaagcctaaagggacagtcaaagaagcagctcagtggaaccac

SEQ ID NO: 182432 - DNA, 163 bp, Homo Sapiens
ttgtacaaaaaagttggatttaattttacactttttgttactttaaaatgtacgactaaactgttactgactgcctcacctctagcatttatcctttgtattacagaaaatttaattttacactttttgttagtttaaaatgtacaactaaactgttactgac

SEQ ID NO: 182433 - DNA, 698 bp, Homo Sapiens
gaaagaaagaccatgttcctggataagaaaactctcctaagcaagacaattctacaaaagtaaatttataaatgtaatgtaatccttataaaaacgccgcatgcttttccccagatctagaaaactaattataaagttcatgtgagagaggaagtgcacaggagtgtaaaaatagccaggaaaactctgcaaaagaaatggagaggtcctctgcccccgaaccatctcctggcctccgtaatggaaccacatgacaccaggacccatgtaggcaagcaggcccagggacatgaaaacccggggacagaccccagtgcctagaacattcagtctataaggtagcatatgataccggtgaggaaaggatggacttgttaatacaagtggttaaacgttaaccacttggagaaagacgaaaatgaatctgcacttcataccatacactaagacaaattccaaatgggtcaaaagtactaggaaaaagtgaattccttcatcaccggggagtgggcaaaatcttcttaaatatgacttaaaacccaggagtgataaaagacaaaatgtatactgggaaaaaagttttataacatagcacattttcaaagtgtcggtgacttgagtgggaagcagggcagtgactgtcggggactgagggtggggggatgggtgttgaacgggcgcggggtctcctttctggc

SEQ ID NO: 182434 - DNA, 464 bp, Homo Sapiens
ccctttgtagagccatccacgcagtggaaggcaggaggaacacatcagcataagcccttctttcaggaaggtgtctctggaagccataagtgtcctggtaagagctgaagcagccccaccctgaaagctgcttcatgggtggccgaggccagtcttgcccgagtgagggctgtgggctcaggtgagatttgagatccagggcatccagcaggccgagcttgcaggtggggccccttggaggatatgctcccttggccagccccagatcctggcatcacatgtgctgtccgccccacaaatggtggatctggagcacggccttggagccagctacctgccagccagtaaaactgttcttttttatctcctaattcttctacttattaattgtgcattctaaaaaaatctagactttgttgaagactataaaaaagtgaacaccctgagcagcgtgtggtggctca

SEQ ID NO: 182435 - DNA, 589 bp, Homo Sapiens
ttatatctatctatcttatttttagtatgctcaggctatatccaatgatcatgcctttctttctcatttgctcctttttagaaatttcccaggcagcaatctcaaatttcttatgctagggtattcaaattttcccctttatcaaaatgaagacggtattatcttctatattccatttcctcagagattatcgacaatggttctgagataatatccagtacttggaatgtaattttcctgactgggagatgactcatccagaggagctaactgcttgtgttctaactcctcaccaatcttgggcattgattcatccattgggataattactccatccttcccaatgtgaggaacactttgctttacagaaactacagatggaaaacaggaggtgactagctttgtcatttatggctcctgctgctgcaaatgctgctgttttcaccatgtaaccaaaatctccaagtggttgagaaatcatatgatttttcttcttggagggatatgagtagcaagctcttaaaaagtccttactctatgtgataggacttgctaaatgcttaaagaatcttatttaatattcacccaa

SEQ ID NO: 182436 - DNA, 747 bp, Homo Sapiens
aactttgtacaaaaaagttgggcacttacatggaacattgttcatgccaaacaaactcatctttattgtatctatttgtcacataaatccttacatggaatgttttgatttcttaagaaaaatgaaacaaaggttagcgccccttgttttagacatacaaactaaagctagaccctgttgcccagatagtcatattgcttctttgcaatatcaattcacagaggctgtgagatgtggttcaaagagtggagtcgagagtctggatgctaatcctgcctttgctgcaagaacccttctgtttgttaccttgaggaaggcaaatgtctgtaggctttgcatatctcatttgtaaaatgaggaaaggtagctgtaaaattttctaacatccgaattatataaactttagacatagtataaaataggaaactaccaatgatttctaaagataatatagttctttcagaccacaaataatacataataacatgcaactaagaacaacttgtaaatgcaagaaaaaaacaaataattggaaatcagaatatttctgggaattcttcgtaataaagcaaatttcaagcacaataaagtaatatttatgcatatttacatatttgcacctcatcataaggtcactctagtcctaaactgatgtagttcatctgttttacagctgaagttaagtatgtcccttatttgtgcttggcttatttctttcttaaataatacattacacaagtgaactct

SEQ ID NO: 182437 - DNA, 292 bp, Homo Sapiens
ttgggaattacaggtgtgagcccccgcacccagctagaaaatccactaatgttagttgctacattaatatattaaagaagagccatatgatcatggcttagtagatcatggatcagtagatttccaaaaaaagtattttatattcaaccttaaattgtaattcctaggctaaaggagtataaaagaggaactaaaaatcaattttacaggtgatctaattgtctacataggaaatataaaagaacttacagcaaggggctaactgtgtaggatcagtacagaagttatttgc

SEQ ID NO: 182438 - DNA, 741 bp, Homo Sapiens
ttgtacaaaaaagttgggtgacttttgaactgtcaactttagaacatgcatcattatccaggctggtagtagaaactgtaaatgccacaggacttggagaggtatgtaatttcccctgaaggcaggctggaaaggcattcctattaagaaaccatcagtcttgcagtcttaaagtgagagtgccatgaaagctaccagaggattttgtaattctgagcctctgtgacccaggcggagcactggaccctctaaaggtgagctcctcattgttcaggggctcaacagccgacctgccctgtgggtggggcagcaagccagccactgacattgggctggcttcagcagactttacctgggcaccaggtttctttctcctgcttcagccttggattccacaggtgttatctggttttccttaccccatctactgcctaacaagcagaacaccattcagtatactgatggacttttcttttttactatttttgtcaggatccctcattaagattctcatctcttatggattgggatttgtgtcttggaaagatttgtcttgcaccgaaatcagtgctaacagctattgatcatttccccccatgctatttgatgctttcttgatttctatataaagctttaaaacctaccgtagcacttaaatatcatgtgaaaacaaactcaaccagtctaatacaaatgtattaattgtcatttaaaatttgtatttatttacttagagacggg

SEQ ID NO: 182439 - DNA, 901 bp, Homo Sapiens
ttgggtcaacacacaatttttcagaataatctttcaaaaaatctttttctggatcccactttatctctttcccctgttctattttcagaagataacataaataagcttacacactcaatttaaaatagtgaaaggcttggctatgttggtagaaaaaaaccttaagccctgttcaaccttgatattgataaattcttgaaagtgagggaaggaagtaggggaaaaggtaccttggtacccgatgcctgtcccttatgtgggccaagggagacctgagacaaataaaaatggggaaaagaggggacaagaaggagtgattgttagagaggctgtctgaataatgctttatcaaaataatagcaatgttagcttatttatatttcataaaatattctggccttgtctcttctgaaacttaaaatgatttgcatagaaacaaggacttgattaacacgaagtcaccaccatacagtggattctttgacttgtctttgcaggttagttcatgtgctttcctaaagttgtcatgaactttagggaaggaattgggtcttcattccatgtatgtgaattttgaatccagattagcaagatgttagaaatgggaaaggctaactatttcagactaactctttttggtgtagtgctttggagggaccatcatggatgtagtgactagataaagtgcattttcaggacagtcccactttaaaaacctgttcccatcaatgtgcctgtggtctgatttttagttcagaagatacagccacttccacaagggcttcaggtcttgtataggttctgcaagttttagaacccagtgtctagcctacgtagggatgtgtgtcatgcctttggagagccacctcccaccatagagacacgcgtgagtttgatttgc

SEQ ID NO: 182440 - DNA, 894 bp, Homo Sapiens
ctttgtacaaaaaagttggccaggacaccccgatgtccaggggcttccatacgaacaggcacatgggctgggaagtacatgaggcccctgggtagaagggtctgtcagttctctcctcccttgccctctgggagggtcctcctaacatagcttccaggaggtgggaggagcagttactgtcagcaggtgtcagccaggtgtcagcttctcctggggatctctagatgtctgcttgtgatttttggcaagtatatgcaaatgagcctcctctcctgccctgagacaagtatctgcagtgtgaacctggcagcctcagacccaaggggctcagaggaaacttctctggtttctagagctctgtgctccttcagagaagtcttccttccttccagtcagtgtccctgtgaagctgggatactcatttcctgtgtaccgggcaaacaccggattgctgattttgagaaatgcctctcgatggacctgtaacctgctggagtctgggatggtagctgtgggctggacttggctgatgggatgacccggtggctagtgcagcatcacacaagcctggttcaagtcttggctgtgtcatttcctgctgagggaccaggcactgaatttcctacctcttagggtcattacctatgaggttaaagctacctcatgggattgttatacgccactaatgttgaggcagacacctcttggcagggtgactgctcatcttagaccctccccttttctgcgaatttgggccccttgatcctctgatgggagctgaaaggatgagaggtgggcatctagatttagggaggctgttcaggctttgcaggtcccttacctgaacacataaaaacccctgagctgtggactgtgtccctgtggtgtgtgttt

SEQ ID NO: 182441 - DNA, 272 bp, Homo Sapiens
ctatttagaaacaaagataatataaatataaatgtcaaaataaatggtggaaagagttggaaatggctgatgttgaggaaggtgactaagggagtgaagaggggtggacaggaaactaccatttttttaagcttctcagaatatttgggtatttaaatgtctatgatgtaaacacaccttcagcttgaacttgaaggacagaaaaatatataacaagcaaacacaactacaaggacaaactgacaaggatacttgacccaacttttttgtac

SEQ ID NO: 182442 - DNA, 373 bp, Homo Sapiens
cgggagtctttataacactaaaaattttataattttttataattaaaattactctaagtaattttaattttttataattaaaattactctaagctgcccaccgcccacccacatacacacataaatctaatcaagaccaatgactactgttttaataaatgttggctatcagaagattccaagatcacatctctggtgtaccttgaactaattaacaatttagcttgagtagagaagttcactccaggcacttttatagtgaagacaaagtacaaagttcttttgcatatcttaactcatttttcaaaaaaaaggatgtcctgaaggaaacttaataccagaaatgatttgagccaacttttttgtacaaagt

SEQ ID NO: 182443 - DNA, 491 bp, Homo Sapiens
aatttaaagatagaatttattctctgatggtttactcatgcaaactgcacataaaagaaaatagtacagtttgtgtaacattgcaaatataaggactgaaaatgctaggtacagaagtagtatgacatcctgaaagtcaaaatggaatttgtgtttatacaactaataatgatttttatttgctcagtacagactgatttacaatgaaagttttgctaaccttggtaagcttgttaaccgtttacatgacttcttacatctatgtagttttattttacagttgcaagaattctgttaccaaagaaccttaacttgcataagtaataagatgaaagaaaaatgtactgaaggacttaagagtgaaaaattgaggcttttcctaacccattcaaactacaataaaaaatagccttcttgcagaattcatattttgtgcctttgagataactccttagaataatgatatcaaaatcatgatttgaaaaacccaa

SEQ ID NO: 182444 - DNA, 502 bp, Homo Sapiens
tcctgtcttaaataaataaataaatagttgtatcgcatatatggaggaaggaaatgataaagaagaaaaattacaaggttactaatgatttcttttcagctaagcttttggtaatgctcatcttttaatgttctttgggcaaacacaaatcaaacaatttttacaactgttattaatatgcctaaagcagtatagcaaaacatttttcataaaaaaagagcattataaaatccttaaatatttaggatagttatacacttcaacttctctatttaaggggtggagaagatggagattgatggaacatgcctattttctgagaagtcttaaagaatttttacagcttagaaagcttaattatcagggtaacctatgacaggtttatactgttaaaacctctatactaacactctatgtaagtctttattgaaaagttctttattttgattcttaagactataaaagtagagagaaactggcttttggtgataaagacagccaa

SEQ ID NO: 182445 - DNA, 575 bp, Homo Sapiens
  misc_feature (120)..(194): n is a, c, g, or t
ttggtgcttcaaaacgatggtgggagaggaatgtggatgaaataaaattgattatgagttgtggttgctggggaattggggtcacgggggttcattagaacctcctatcagatgtggttnnnnnnnnnnnnnnnnnnnnnnnnnnnnnnnnnnnnnnnnnnnnnnnnnnnnnnnnnnnnnnnnnnnnnnnnnnngtattttaatcaaataaaatgcccaggggattcctgagcacactgaagtgtgagaagcgctggcttactctgttcaattctttcctgcatgtttgacattttccataatgaagaggttgtggggttttgttctgctttcctgtgtgttcacagtcacagggagctcttcctacggagaccggggctggagggaactgggaagcactgcctccccgctcctgcttggacccaccagccccgccgctggcccgcgctcggctgggaggcaccggggtcccgctgggcagccccgaccccgtgcctgggccgcacctgccgcagtggctccgtcgggccgggcggaagcgcgggagcgcagggctggacaggcccgggcgtggc

SEQ ID NO: 182446 - DNA, 648 bp, Homo Sapiens
tgtacaaaaaagttgggttttatatatggattggggaaagtgactttgttttacttttcctttttattcccctccatcctccaaacttccaatctatattatttgtaatgagaactttggtgggggaaaaaaagcattaagagaattttggatgtaaaggcatctggtatctgatggaccagcaggtagatgtggttggattgagaaattttgggtaaggtagatgatagaagaaagagattttaggagacacagttctctgtggaacactttctttcatgttcctgtaactaattgatcaagacccttttaaacgcttatctttgtcagttccgcttttgaaaaaactattgccctaggattgtttcttccatatgacagatgaaggttattggctctgagtcatttttggcattatcgtcacagataaaaagattggcaattaatctcataaaaaatctgaattattccagattgctgccgatttttgcctaagaaacaatatgtaagtatattttataaaccaaactttgtcaaccaattctattgtacgtctacccacaggcaactttgaatttacttctctagtgctaaataaacatttcagcgatttaatcccccaacttgggggatgcattatgaaaaggt

SEQ ID NO: 182447 - DNA, 899 bp, Homo Sapiens
ttggcaatatttaaccccctgtgttttaaattgtatgttcggattgcctccaagctttagtttcatctcacgagtggacttcctggtaggaggaagtgtctcggggacccagccaggctccaggtgtacctcatctgtgaatgaatgcctggcactcaagaaccacagagctgggagggcactcagataccttcagttccgatccctaattttaaggtgaggaaaccatggcttattaaaggatgtagcttaccttaggtcacactgccaataatgcatggccacagtcatggttagattcaggccttctgaatcccagtcctgcactctcttagaaacacatctattgaaagatttgtttgctgttccactcaaagctgagggccagactccacactgtcatatcttcaacatggtactgcctactagacaagtcttgtttgagttacctggtcagctttcctttacaacctttttctagaacaggataaacacaataaaaatggtactagtaaagagaaagtaatggcatttctctcatcctcttgtcactggggctatcatccccatgaagctgttcctatccactttgtctgcttgctattcaataagcaattgctaaaagactggatgtcaggcaagaaggttacaggggtaaagaaggtggacaaaggccctgtcccatgtgtttatgatctgaccaggggtgaaaagtactaataagtgtgaataaacaacataatatcacattgtattatgtgatatgaaggaaatagagggtagtacgatagagagcaactgaggctgggcgagggtgaaagaaggttgggacagtcaaggaaggttctctgaggaggtgatatttgagtgcaggaagtcttggagagaaagtcatttaa

SEQ ID NO: 182448 - DNA, 891 bp, Homo Sapiens
  misc_feature (536)..(558): n is a, c, g, or t
ttgatgagcaatgctttactatataaaaccaactttgtacaaaaaagttggcccctctctagcctgtgtggctttcccactgagcagccatgaagctgtgcccctcagaagaagctgtgccccttcaagtgtgtagttggctgacacttccagcggccgcatttttaggatccactggagcattcgcactgaggtgactctctccccaggttgcttctgccagtacctgagcacggtgggagtactagagttgggccatttctgcacaacacaggactcttccaatggccaatatttgttcctaaggctccaccattggcctggccaagacctcggagctgtgctgcactcagaggctcttcctacccgatcctccattcgctcctctccttcctcaggtcagacctacgttgctgcttgaaggctttccctgacttctacttcaccttccacgggactttcctccatcttggaagaccagaattgactaacgtatgcagaacagtgcttttaactagcaagaactatgcaaattnnnnnnnnnnnnnnnnnnnnnnncaagaaattgtatgagatgttgtttacaggtgctgagatttctgacttgtaaaccaacagcttcatacagacagtgcaaaccaacttttgatttatatttgatccctttgtcccacataaacaaggccagaaacacagatatgaatatttttatccaaaaaagtccatgaatagaacaactgagtcttcaaaatgtttattttgcatactaaactacattttctttacgtatttctatattagatccagatttttaaaaataaatttatgaaagggcccaatgaatcttgatttgctaaagtctctcaatgtgaagtcttctaaataaatgcc

SEQ ID NO: 182449 - DNA, 913 bp, Homo Sapiens
  misc_feature (631)..(675): n is a, c, g, or t
  misc_feature (733)..(780): n is a, c, g, or t
actttgtacaaaaaagttggcaatattttcaactaatttgactattatcaggatgtaacttgatcgtaagtcaaggagcatctgtagttggttttacctctgccatttttgttttcggtctcctgcttttttggtactctattccttttacttttgctttcttttacatgacatgaatatattttattttattatttttataggtttcgagggtacaagtgcagttttgttacccagacatagcacatagaggtgaggtctgggcttttagtgtggccatcagcagaatagcacccatcaagtaatttcttatccttcaccctcctccccacccctccaagtgtccagtgtctctcattccactctctatgattatgtgtatacaacatgaaattaatatattttagtataacattttaatttttaaaattatgatgtccctttgaaaatttatttacctagtggttgctctagaacttacctaataagtcttgccttatcaaaatctacttcagatttctgcttccttaactttagtaaaatacagaaacattacttatatgtatctctattttctcttctctatttgttatttttatatatattacatatatatttaaaacccaacaannnnnnnnnnnnnnnnnnnnnnnnnnnnnnnnnnnnnnnnnnnnngctcccaaatctgaaactgagtgccaacatgctcaacatgctagaaggaaatgcttgnnnnnnnnnnnnnnnnnnnnnnnnnnnnnnnnnnnnnnnnnnnnnnnnagtaagtatgatgtaaaacattccaaaatttggaaaaaatctaaagtgagaaacacttttgatgccaggcatttcagataaagggatactcaaccctgtaaatgttactttatgtcatttgatgggctttttg

SEQ ID NO: 182450 - DNA, 912 bp, Homo Sapiens
cataaagacaactttgtacaaaaaagttggaaacaaattaggaagagacttagtagaaactatcttgattgtctttgaaattaccttactcccaataataggaattaaattaattgatagacataaatataggtacataatgtgactgttctgtaaattgtatgcttttttgggggcgtggggaggagaagatcttagaagaatataatatgttcttgggggttttaaagctcattatgagtcttgggcttagcattgcaattaaaggaagtaacaccgagttttctacaggattgtttactttcctgcttttccaaatgaaattgaaaactcaaggttaatactcagggaataccacagacaaattatttctgtttattttggctctcgaagagctatttattatcagaaatagttcatcatggaaatgttgggtagccctttctaaacatccataagatggtggttatgtaacacaccttttttggaagaacagagtacctttattttccttaaatgattatatatttctcccagagaggtacaatggctaaaacctttttgtgtccactgctgttgccaatttctagctgaggaagtttgcattttcacagtgattaagatcacacattgccttttttgtagagactcagcttttgtattcctcccagaagatatgctgtgaatgacactcttttatttctcagagatttcttatctcttactctagggtgctagggatacaatgatgaattaagaatgcacggagtgtttgagaactgcagttcattgtggctggaatacaggatacatggggtaaatgtcagtagatgaggctagaagtgccagagtatgtaaagccatgtgtgctctgctatggtgtgtgtcctttatcttgtgggcagaaaggga

SEQ ID NO: 182451 - DNA, 617 bp, Homo Sapiens
aggcagattttcaagagagatgaaacagccctctgttggaagaagatgccatctaggattttcctagctagagaggagaagtcgatacctggcttcaaatcttcaaagaacaggctgattcttttgttagctgctaacgcagctggtgactttaagttgaagccaatgctcattgaccattctgaaaatgctaaggcccttaagaatgatactacaccaactcttcatgttctctgaaaagaaacaggaaagcctagatgacagtacatctgtttatagtatggtttactgaatattttaagccctctcttgagacctattgctcagaaaaaagattcctttcaaaatattactgctcactgaaaatgtacctggtcacccaagagttctgatggagatgtaaaaggaaatgaatgttgttttcatgcctgccaacacagcatccattctgcagcccatgggtgaaggagtaattttgactttcaagtctcattatttaagaaatacatttgtaagactatacatagtgatttatcagattgatctgggcaaagtaaaatgaaaaccttctggaaaggattcaccatgctggatgtcattgagaacattcatgccaa

SEQ ID NO: 182452 - DNA, 658 bp, Homo Sapiens
ttggcttttctttttacccaactcagtagccacctcccttctctagaggttatcactggtagcagtttattttgaatcgttctagagataatataggttacttaagcatatatcccatatagtttcacaaaattgtttaaatacaaatggtagcatactacacgtactgttctgtcccttgcctttttttccacagttaagtaaaatatatcttgtatatgtagcacatttgcaacttccttattctttttaatggctgtggagtatctgtagaatatatttaattggtttttctgttgatgaacatttagattgtttccagtctttgttgtaacagttactgccgcatacatcatttttcatacacacaatatatctttagtataaattccttgaagtagaattgctgggtcaaagtgtatgtgcatttgcaatttggtagctatgccaaattgtgcaccatggaagttgtagcaatttgcatacctaccagcaatgcatgagaggtgtgtttccccatatctttgtcagtttgatgcattttagacctttgacctctgccagtttcagaggtgaaaaataatatctcatatttaattctattacaaaaactgtcagacaataataatgaagaatgaatagaatattgaatttcccc

SEQ ID NO: 182453 - DNA, 933 bp, Homo Sapiens
ttggggatttattagaaggaaactgggatagttaacaatgaatggaataggtgtaggaaccagagcaagctacaacctcaggaaccaaaattgcacatctgtatggaaagtcagctctttgttattgctgctgttgaatatggtctctttagcttttgactttaccatgtaagtccatgacacgtgcctgtcaacagctatgggtcacattcttatagctcttgattatagaaggaagaatgtccctttgatttggaaactcttaggttgggatggacaatggactaatagttgggtcccagctgagggaacaaaattctgtggttagtcatgtccaaataattggttaatgatggctgacccaggactacagtcacatgatttggagtaagggaaaaggaattcatgagtaagatggtttattgagtagacaaaatgtctgctagctacaaagagcatctgctatgacttactcttttctcacttttttttcctacgatactgtcttgctcattctgtgggcatataatgttacaaaaattatttggtagctcaaaggtaagtgcttgtgcatggttttgttactattgggtactaagtggtactttaaatagtaatattagatactatttaaatggcaagaaagaaagtggtgaaataagaacagcatttttatctttaaaaaagacctttgttttgattgttaaaatacttaggtcatttttctatattgaatttaaagtagtaagtgtattgggctgattttatctctttgattattactaaagagatgtcttggtgatggagaacttcgaaagtaaggcatttagaaatgttaggagagtaacaagaacctgaaattacaggagtgaagagctgaaacccagtgttactagctgaaattatacctttcactctaaaaggatgataatg

SEQ ID NO: 182454 - DNA, 95 bp, Homo Sapiens
actttgtacaaaaaagttggcttttagttcccaccaccaacctcttaaagtgcagtctatttatttatttttgagataggatctcactctgtcac

SEQ ID NO: 182455 - DNA, 640 bp, Homo Sapiens
  misc_feature (128)..(143): n is a, c, g, or t
aggtagaagaggataaacaaaggtgggggagggggaagaataagaaaaacagaaaatgattcaaaggaacgagaataactggttgtatggcctgcaggttgtggattaaattaagattcaaacttgannnnnnnnnnnnnnnnaagatttggggctttcccctcccccaccccgtagtgagaaggttggaaggagagatggtgaggatgggatggatggaggggcatcctgctcttgtcaatatgccaaggctagtcaatggagggtgcagcacaagccggtcaccgaagtgactacaaagaagaagtgccagggaatcgcagcatggaccttcctgggtttgggttatcgtgattcgtgtttaaaccagaaagactaattttgccctgcaccaaaaccagcatctcccctcttcactactcattcatgtaagaaataggaatgagaatttcagagcccttcttgcttagcatcaaaggatgaggtcggggaaaatcaactcaagaaattgagcatgtgacttcaaagcttctcctcccattaatcccagtctgatgggatggtatttggtaaggaaaggtgagcctggggatcaaccccactaatgctataaaaataatgcagatacaggaagtgccaa

SEQ ID NO: 182456 - DNA, 876 bp, Homo Sapiens
ggagctttgaggatcattttctcacctggactccagtattttgaatataaagttcattgacaacacagccagaacactaggagtcctgtctccaaggagaagactttcagtgtctaatttctgcaattgcaaaccataaccatgatattataactgagggactgtagctgatctctgcatcttgagaaaaaaaggtttcacagattatctccaacacccacgggatgcattcaaagttgtgggggcagccagtaccattttatataacagcataaatcacccaatgatttcactttagcttccagccatatcctatgtgattttaaaatgtatgataactaccttaccctagtctacatcggtaaactctgcaaaactccagcagttacagagcctgtgctaggagctacagggtgaagagggggaagaagactcaagaaacctgtaaaactaatggaggagaggaaaccagctcatgtgctgagaagttttaaatatgctgcatttatgaatgaagagcttcgaaacttgtctttgtctggccatgtgggatttgacagcctccctgaccagctggtcaacaagtctacttctcaaggattctgtttcaacatcctttgtgttggtgagacaggcattggcaaatccacgttaatggacactttgttcaacaccaaatttgaaagtgacccagctactcacaatgaaccaggtgttcggttaaaagccagaagttatgagcttcacgaaagcaatgtacggctgaagttaaccattgttgacaccgtgggatttggagaccagataaataaagatgacagctataagccgatagtagaatatattgatgcccagttcgaggcctacctgcaagag

SEQ ID NO: 182457 - DNA, 815 bp, Homo Sapiens
actttgtacaaaaaagttggctctggggatggctttcctccgggcgtgacgacagatgagctgtgtgattgcacagcaggatacaagggtttttcctctgcccttccagacccgcgtccctggctgccctccctatcttcgttacaagcccacaggtcacccgagaaggacctgcagcccagccaccacccagtggctctgccttctacctgtgaccagaacccacctgtgtctcatgggcctgacccaggccactgtcagctcccgccaaggcacccacaggacgtgcttccaccaaggccccccagagtccatctgccacagatggtgacattttcttaatgtccctctggtcctggtgcccctgcatcaaaccacacggggctcccctgtcggacttgcatgaaaatctaaccacatttgcagggccctggaagatctgaccttccccatctcagcttctctctcccggcctccagccttggacccaccggccacactgggctccttgttctcagacccactctggccccgcctgcccattccccgccctcgcctgggctgctgtcctcaagctctgggcacgtccagctcgtttgcactgtacaggcctcagcaaccatttgccctgagcgccgccccacaggttcctatccccagcttccccaccttggcccggctcgtattggggccaattattttttgctgtgggggccgtgctgtgcactgtgggacactgagtggcattcctggcctccacctaccatttgcagtatcccctcgccacaagtggtaacttccaaaatgtctccatg

SEQ ID NO: 182458 - DNA, 476 bp, Homo Sapiens
aggagagggcaaacacaccgcagggaattaggggggccaattttcaggggtattggatgatgagaaatagaatgcaacaaatgtctttgggggagggcatgaagtgaagttctaggaaggaaaagtagaaggcagccagctgaatggcacctggcgctagtgccctgcctggaaggaggggggcacagtctgggacagatggcctgtgggacagccgggctgtgtctactgaacctttagccaatggggcactcaggatggctgagactggcactaggtacatttgacaggcagagcccagccactaccttgctgctaaattgaactggatcatattcttgctttgtaatgcagtaatttgacgtcaatatcaaggtttctccccatttcagggagcctttgctcctccagggagcatgagaaggcacatccaggaggtggatgttgttagtgatgatggtgattgttagtttcct

SEQ ID NO: 182459 - DNA, 679 bp, Homo Sapiens
tcaacactgctgccacagagttgggattacaggcatgagccaccgcacctggcctggttaatacccttttgaatgtcagttgagatgatagaaaaagtttgaaggttacgaatattgaccagtggtaaattgtgttccatattcttatatagaagacacatttgaaagtataaaatggtagcctatgttaataagactgattaaataaattacaggtacacatccattcagtgggataatatataaccattcaatgataaataattgttgatagtcatgtgatacgatgtagcaatatggaaaatgcgataagaataagaaaagcagaatacaaatgtactttactggaactgttagctttactttcatgttactgtatcaatacctatgaatgctactcttaaaattattgctaatgctacttctagttccatgcagtaaacttttcagagaatgaatttcacatctggttaactttatagtacagtgctgttagcaactcaaattaatactcataaatgcttagatatctatttaagtgaaacctcgatttctactctcagaaggtacagagactttttgacacataactttcagtttcctaaatacttttatatatgaatataatcatttcgctcatttaaaaatcaaggaatttctccaacttttttgtacaaag

SEQ ID NO: 182460 - DNA, 984 bp, Homo Sapiens
ttggcaaaataattcaattctagttgtggtgtgtgatttatgaatattttgtcctttagtttgtgtgagccaattttgtgccataagaattttagcctccttttccacaaaagagtgatttaatcaaacaaaagttgacaatcaatgtagtacatttgtgtgacagtgattaaacatggtgtttttctcttaggtgtctgagtagatttggaaatgcccattcagccctcagagctcctctgctttaagggtgatggacttcctgtaccactacgtagtgcatgagtgccagccactggtatctagaactgtgattagtgaggaaacactaggaggaacaaacaacccaactctttttatctaatctgttgactccaaagggaccttctgcttattccagttaaaactcaagctgcaattcaaaatgaaatcagtatcttttttctctacttttcagcaaagcaagatgctaccttataattaccacgtaacaatcaatcgcaaacatagtggcttaaagcagctcctcttttagcctacatatctgcaaactggcagtctggactgagctcagctggatgttttttctgagctgatcatgtatgtagggtctgctgctggctggtttagactgatggtggatgagaaaccacatgaagaagagaggcatgatggtggcagagttctgaaagagtcacacagaagggcgttgagttcgtggcttgaaaatagcatcctgtcacttctaccacattctatttaccaggccagcccagataaagatgtgaagaaacagactccatctcttgatgggagaagttgaaaatcaatggaaaatggcatggataaaggaaaggagtgatgattgtggccatatttgtaatggccatatttgatacccttttcagttttcctagccacacttctcatggccaggaaaatttaatgcatgtcaacactgagaaaacagatcctggtttaaaa

SEQ ID NO: 182461 - DNA, 1026 bp, Homo Sapiens
ttggctttttccctccagctttggaacagattgctgctgcttcagctgagcaccagatgactaacttggctatgtttaaggtgcatgttgaacaaaaaagacttaactttaaatactagaattcatgggtgaatgatgagtctctgctgtctcaagtagagagtaagagagtaagatacttcttatcattagctcagggcttcttatataatcttgtcatctgtatcatctcttattacaacaaatcaagcacaaagttaaccaagtagctaagacaagagttttcccttagatgagaacagtataagtgatcagtgaaatcctcttttgaaaactaggtgctgtaggagtgatgtctgttctgcaagctgacagtagctaccattgattactctttccttgtcctggatgctttccatgcaccatctcacaatcctcagagccctgaggagtcggcattactttcatttctctgacacaagaaaccctcagcatatacacacctttcattcatccatccatccattcattcagtaggtaatatgtggaaccataggaaattgatgatattccagtttttgacatacaaaaataattttgattgagtacaaaggccttttgtatttgcatatgtctttcagacaaagctccaggcagcatagtggatgtggtaactaaagccatggtccctagcacagctgtcctagagctgcagcacacctttaggctttgtagggaaatggcctgggccagtcagaatcaggtcgtctgtctgcaggaattagtttaggtcttactagctctgaccaggtaagacctaaaccctggtgggtatatgggttagtcttaatctgcttggtacatattaaagcaatttttaaaaatgatttgttcaatgtattcatcaagtgcttactgtatgctatgaactagagtagctagaacaaaaatttacccctcagggagctcacagacctccagactatgacatctgtcccatttctgcatggcctgtgttttcagata

SEQ ID NO: 182462 - DNA, 910 bp, Homo Sapiens
ttggcaaagtctcccgtgatgtatcctgtgtccacatcccaacaaccccatcggcaggactctttcctggtttgcccacaaggaggaaagtgaggaaagtgaggcttcagagagatgaagcaacttgtttgaaggcggccacacagctggccctgaggatatccagaccctagaggaccaatgacaggcagacaggcccaagatgggaaacccagaagcactctgagatgtcctagacgctgagatgtcctgcctgagacctccaggattaactgaaggccagcagctagtgctcctgagcccagtcataagtgacagtctatgagggcaaactgatccccacttcttttcactccttaagcttctactgaagcctccagcagactcttgggccccaaagctgctgcgtcccctagaaacacctaaaaggatgctcctggctgcaaagcgccctgagcctataaccacaggaactgctccatcagtatccagtgtgcctgcttattgcctggttacctgcccggcttgtccttgtgcagatgcagtggatgccagaacaccctacagctggagagaggcggggaaaccctcaggtgcttgtgcctacgagcactgccccagcctggcagcaccagggatgggagaggaaggaaagccccaggaatgcctgtggggtgtgacagcagcccctgagtgaagagctgtgcccaaccccagctaagccctcaggacccaggacaaggggccttcttctacataggagagtggcctcatcagcatcccacatagagggaggcagacaggccctgcaaacccttcctctaaacttcacgcatctcctcggaagtccctataataatgacaagtagtttattgagcactaatgggctgggtgcttggctaagtggtt

SEQ ID NO: 182463 - DNA, 982 bp, Homo Sapiens
ttggcagccatattagttctgttgacttcatgctcataattttgagaagtccaggcgtaaactaaaactcttttggtggacttgaatattctttgtttgttgatgtaaaatatgtaatctctgattttatagttaacaataaaaataaaattttaggtgagtgaaagcagtgatttaaatttaacagtgtcctcttgaaaaaccttaatcacagttaagtgatggcatgggcaatgaattttaatcatatttaggaataaaatactagatattagtgtataacaattagatatatgttaattgagcactacaaagcctgaaagcttaacaaagtggggctataactagtaattttttggtaaaaatatagtgatctttttctacagggtattattataagggacaaattatagttgtaaattagattaatgaattttgtgagttttaaaatttgtacgaaccatgtctcccttgtgtcatattttccaataatataattacctaacaatgacagaattatacattttccctttaattctctaagcattgagtaaacagaaaaatatagggatgaaatacacacatgccaacattcaaaactttgtactaactagaaacaaaaatagaaggggatttataaaggaaaatgatggagacattttagagaaattaagtataaatcgcaacattctgttttcttggatgtattctgggtagcttctagttacttgtaaacaaagtattcattgtttttgtaataaagtgataatgttttgttttatagttgagtggctttagggtaatttaatcacctggaaagtgatatttttttaattaccttttgttactaaatcttatctaatttaaaatactatgttttgaaagtatatatcttgtatagttatctttttatatgaaaatgaactctaatacatatctttctttcagtgttcatatcacaaagctcaattaaatggtcctg

SEQ ID NO: 182464 - DNA, 651 bp, Homo Sapiens
ttggagatattagaatgctaagaagatcaccacaaatgtgcttgtttgaaaactaataataatggtagtaataatagcaacaattcaaaaataacagtggtttggattttctctcgccagccctcactctcctccaaatgagataagaaaggtgtcacagtgccagggaagtataataacatcagaaggggtgaaacctgtgcagagctctgaagcattggcagagcctggcctggtggccagcaagaggctaatggtgccaattaccaacagagggagcctggagatggagcagactcctggaatatgatgatggaggagactgactcatttttggatattttatgagtaagtagtctattggaatatccaggcggattttttcagcagacctttgtaataatgtcagaagaactgtctgacattattataaagaacttaagatagaactgtagatttgggagccctaaacatacacagtgatcagcatgtacgttttttgtatttgtgaattaaacatggtttaaaaacattgaacagtctattttttgagagagtaaaattcctaagagacagaatgttagaagatatttacaatctgtgttgtagtaaccaacagagtatatagtgactactaaaacctgggagccg

SEQ ID NO: 182465 - DNA, 300 bp, Homo Sapiens
ttggaaatctgtgttcaagagtacttgttagagtcttttccatgaaaaccaattttggactgtaccttattccaaatgctttcagaaaaccattgtgaatgataaaaacttaaaatagccacagttaaaaatctgatgacagttcccaagtgacaaggaaacttagttacttccattacatgcagcatgttaagatagcaaccagaatggtgactaccagtgtcacatcagggccatcagacttttataaatttcatataatttttagaatacattaataacatatccagagccaggtgt

SEQ ID NO: 182466 - DNA, 892 bp, Homo Sapiens
ttggctttgccctggtaaggaaaaagagaagggacctgaatgaattaaggaagaagccatgaagcaatagtggaattaagcattctgagaagagggaagaacagtgcaaatgctatgtttcaggtgcaacgaaacatttctgtatcctgagctccacctctcttccttaaaatttgctgttttgtgcactggcgtagagagttatagtataaagccacaatgacaatggaaggttacgggacaaagccagaatgacatatagaatcatccagatgtaagtccaagtagaagactgagaaatgcactatttgataatctgaaggaactgtctatggcttttttttccccttaaatcatgaaacttctgttagtgcttcaaaatctttacaaaatattcaacttagtatctctttgggctaccaacattctgacaaattagtaaagtatagccaaattcactccattgtcatcatattcccatttatagtgattttttaaatgatttcctttctgggtgtaaccatagaaagacatttgaatacagctattttgaaactgtaaattacagcataattttaatttcaaaactatttgcaagtaccagtgtacaatactgagaacttctttataatgttatttttaaaacctacatattttaaaggggatgctgtctaactttaatcatttctccatttaatgttttttgttgttgctcaaaagagatacacgtatctgtgatttttcttgtatattaacagtttcggtgaggatcaaagtgaccttaatacagtctaccataaaggaagtttttgtcagcaaggacaaaatgttttagtcactgatacatagtgacttttcagcttaaatacgatgcttattgattaatactttt

SEQ ID NO: 182467 - DNA, 594 bp, Homo Sapiens
acaatcttacatgtttattgtattaaatggcacaggtagaacacttagcacaatgccagatacctagtaagtaaaaaatatgggtaacttcagccatgattaatttaactcaaaattacttaaatatttggaaaacgtttctctaataagtttcaaagttggacagctcccaaattggttatttcagatgttcagtgacttcatcaaaattcatatctctattgttccactctgctatcctcaaagaggtagtcgttgtcttcagactaggtaaccttatggtcacaaggtgactgctgcagttgcagtcttcaaatccagtcaaaacagcatccagaaaaacaaagaaaagcatctatctcttaacctgagtttcttgttaagaacaaagaaatctctcccagaagccttctagcatacttcccttcctaacagattgactgagtcacatccccacctcctgaatgattactggtgaagagagtggggttatgaattacctaggggatgggtttacacaaatcagtttatctccaggttttttgttgtatcatttttttaaaggggtggatgcctaaataacattgggtgttc

SEQ ID NO: 182468 - DNA, 351 bp, Homo Sapiens
ctttcattctagtactatactgcaactaaaccagtgattcaactgccagctccagtcatccttttctcagtcctaacattctgtgtgttatagaggtaaagaaataattacagtttgagaagtactttataacagagatacgcaaatcatgctaaatatccacatttaaaaactatcctacgcaaacccatcaattcaataattacaagacattttaaaaggtaggaaaatgtgacctaaaaccaagagaaaagatagtcattagaaacagatcaagatctcctaggctcaagcaatcctcttgaatagctggaactacaggcacgtaccaccatgcctggctgatatttt

SEQ ID NO: 182469 - DNA, 1246 bp, Homo Sapiens
  misc_feature (491)..(782): n is a, c, g, or t
  misc_feature (784)..(797): n is a, c, g, or t
ctttgtacaaaaaagttggctggaattaatggcatttcagttggcaggcatcattcccacccctcggtcttaggaaaaggaggtagaagccccagaaccacacggcagagatcagcaagttttgtctcaagtcagacaaggtctaggtggccttggccttatgcaaagtgggtgacatatttgattatatttccctttacctccatagtagtcaggccagcagcatggactgcaagaacctaagggagcaacatacttagctgcaaagtgagcaaatgaattgagcctaggaatatgtgatgaaaatgcatggctgatgtttcctgatctccaaggagactcccatttgctgaagttttgcatgctaagaaatcaactacagcagaaaatacaagaatacctttaagttgattattggcaatcttattcatatattagcaagaaaaagggagagatgcttactggtggatgctatagagtcctctgttttnnnnnnnnnnnnnnnnnnnnnnnnnnnnnnnnnnnnnnnnnnnnnnnnnnnnnnnnnnnnnnnnnnnnnnnnnnnnnnnnnnnnnnnnnnnnnnnnnnnnnnnnnnnnnnnnnnnnnnnnnnnnnnnnnnnnnnnnnnnnnnnnnnnnnnnnnnnnnnnnnnnnnnnnnnnnnnnnnnnnnnnnnnnnnnnnnnnnnnnnnnnnnnnnnnnnnnnnnnnnnnnnnnnnnnnnnnnnnnnnnnnnnnnnnnnnnnnnnnnnnnnnnnnnnnnnnnnnnnnnnnnnnnnnnnnngnnnnnnnnnnnnnnccatgaaggatgagtactagagtcagtaatagaagtagttcagcattatttaactacaacacaatgctgcaaatatttcacagtaattatcaaaatttaatgggctctaatttaaaatgttatttaataagtatagattttaattgagaattatctttgagtagatgtaatcacaaagtgcattaactcttgttggaatattttatggctattccaaagtatagagtgcctaaattttgtgttgaaaatgtctttcatgacggtattaagttttctgaaattacacatggcttttaaaatttctaatgtatccaagatgtgcaatgttgtaaggatctcattcttcagtgcatgaaaagctactaccctcagaacattttgtgttaattgtacctggcaagaacacctcaggcaagcaagaagaaatgaaaccctaataaacttgaaaa

SEQ ID NO: 182470 - DNA, 525 bp, Homo Sapiens
agcccatgaggtcaagtacgcagcgaggcatgatcatgccactcactccagcctgggtgacagagtgagaccccgtctcaaaagggggaaaaaaggcaaacacacccattaggaatatcgttctacgttcagcttgatcatcaagttttgcaaaaacatttttccaagtttactcacctaaatcatgggttaagaagcatctagaaagtccaaattctgagggtaatgattcacaacaatcttagcgcccagtagggctatcggagggaaaagaaaaatcctcccctcctggcgcccaaggaatccagccctttgtggctgcagagaagggaagcagtttcagcctcccccagcctggctgggccaatacctctgctggccaggaggggtcactgcagcccttcaggtgaccaggggagctaaagccaccaggggccaccgggcaactcacttcagtccctggtaataaccacaaaatgtgacgtttttccattttgcctttagatcctgaaataagaaagccaa

SEQ ID NO: 182471 - DNA, 147 bp, Homo Sapiens
ttggtggcattcaagaaatacttggtgtaggaatgaatttcccaacaaagtcagtttcaattcggggctgttaaaatctcctggaagtgtgccatggaacaaggttcagaaagtactggaagaattggtgcccgagtggtagaacaa

SEQ ID NO: 182472 - DNA, 187 bp, Homo Sapiens
cagcgtgggccacagagcaagatccggtttcaatcaatcaatgaagtgccaatggggtccacttgattccattcgtggcatgtgtccctgtctgaaacattctatttattcacctacgtatttagccacgtctgttgtcctaccctacagtgaattctgtaaaaaagagacccccaacttttttgta

SEQ ID NO: 182473 - DNA, 425 bp, Homo Sapiens
cccactttgtacaaaaaagttggcgcagattcaccaagtagacagaagggaagtgggtttccttctctgtcccatcgggaagagaacccaccagaatatctaacccagacccccaaatgccattctgatttctggctgtgctttctcccgtctcccacaatagccgttgctttcagagaaataccttctccaagtcagaccccctgcccttctcactcacaaaacccttgcattgaatctggtgacacttctccccctgtgaagcggcaggactcacctggaagttgttctggtctttccctctggacagaaggtcctgaaatcgctcaccaggcgttttttgaggtctccatcactcagccaggaacctcaaaatctctgtgaattcatctttctcaataaacactcttgctagccctgtcttg

SEQ ID NO: 182474 - DNA, 680 bp, Homo Sapiens
cttgattgccacacccacaatatgagataaatattattctgcatacttcctgggagagctgggaagataaaatcagatcattataccacataaagcaaagcaataacacttccatattttagcttcccacactgcctatctgtcctattttcatttattcatttatactttttaacaaacagttgctagtagtttgcttaatgtaagatatgggatgaatattttcatgatggcccctgcatctaagttatcatttagcagtacctgccttatctcttgtacagaatcagattagacagcataggaagaatgaaaaggtgaggtgggataataaggaatgttgtttgtggaaacataatggttgcttcaatttgagtgtaaactgtcctttttactgaagcaattgcaaccaagtgtgttagtttacaggtgcctacattgcttttttggcttaggtattgtttgggttttaatactgactggtatataatacagacaaatcaactcaatcaaagaaaccaactcaatcaaagaaagatgggtctacatacaacaaaactgaacaaaatctgcaagaagagtgattcatacatgggctattgaggcaacatgaaatggacattaatcgactaagtaaaaaacagatttcttgaagaattaataaagaacttttgttttgg

SEQ ID NO: 182475 - DNA, 490 bp, Homo Sapiens
gtaagcactctgtaactcttgctttgtacagtgtagatgaactgagatcaagtacgcaaaggctcttctaaaccactaagatgccagtaatatgattgttatcgttagcatcagttacttatatgaactacagatatttagcagtgttaggaaaaagttagaagtaattaataatatattgatgccttcttctagaagaagagttactgtcctttattgaacatatactggacactttgtatgttttgtcgcatcgaaaaattgacaagaatgcagccctaagcttctggcagtgatcttatgtgaatgatctctactgaagcacaagactctttttagacactgtgcagaataattatgatagctgatatttacatagcccttactctgggccagtcaccagaaggcaggcattgttatttttgtccctcgtttatagtgatgaaactgagacatggagtggtcatttcatttgcctaagaaaatagca

SEQ ID NO: 182476 - DNA, 1787 bp, Homo Sapiens
  misc_feature (116)..(144): n is a, c, g, or t
  misc_feature (412)..(433): n is a, c, g, or t
ttggatcctccttgcccggaaaagggagagctagagccactcactgtcattctgctctgaccttgaagggggcggtgttggcctggcttctggaatggactgagtccatcgtggannnnnnnnnnnnnnnnnnnnnnnnnnnnngggcactgcctgcggaaggtaggattagatcattagctcagtgacctcctagggtttcgatgtgctatgttctcatcctacagttggtttggtaatgatctgcaagtcccggagagcaacagcacagctctgcctgacgctctcattaaaatctatgcagccaagctcggcactttgtagcagccggccttgcgaagcctcctcagctcggggggccggggacccagtgagccgagaggccctctgggctccacttgcatatgcaccnnnnnnnnnnnnnnnnnnnnnnggcttctttagacccagagccctttaagatgataaaggacccaatgcaggtaatcctgtttttggactcacgtaatgtagaatgcaaagtttagtgattatttaatctgggcctaagctagtgagagtatggaacaatggcccataaggactcctaagcgccgaagccaaggagcctcctcccttcctggttcaccccgcccaagggacctgcccccattcctgtggccctggggcccagcttccaatagtgtcagaagcaacttgtggctttgccttggttgtgagatgggtacattccaaaggagcagcctgggggagggggcaggctcagccagcccttggaggctcaagcagctggcccaggctccagctcgcctccagtggaagcccgagcgccctcagaaacgaccctggccaatgtcaacgcagagccgaggcggtgttgtcacggctaatgtgaaatctcttcccgtggcgcccatcctctgactctgcagtgccagcttggacagattgaggtctctgtggctttggtgaccctgcttaagcattcccaccgtgtcccagctctgctctaggactgcctcccactgcggcccctcacctgacttcagggtatggggagggagggagccagtgctccaaggccagggggctttgctcatgagagatgtcaggcttcctggaggcatcaggctttgagccctgctggggtccaactgacctgggaccaggtgtcgcgcagagatgtgcctcattctgtgcctccttctgtgcctcctaccatgttccctttaactgtgcctcagtgtgggttagggaacaattttgttattgtattaagtttattcagttaattcacttgaggaactaaccagtttttactttctgtctagaatgatgtacatgtagtagagtaagccataatgctcccaaagtgccttgttttctctgatacaaacatatttataaggacatattcctgtgggttcttgggtgtgtttgccacatcaagattttagggaaggggggtatatgtgtagtagggatgccgtttgaaaacaggcactcttcccctgaggatgggaaaggagctcttcagttggagatctaggcagtgggttaagccagacccctaaagtgaccctttcctcttctgccctattcttctcagaccctcagaaagacatccaatttttttaaatccctgtagctccaagcctggtctcatttgcttccctgccaggctcatcgtgtgtataccacatttgtgccccactgacctgaaaggttccatgtaacctgtatacacatgaatacttaaatgccaacatttaaaaataatttgataa

SEQ ID NO: 182477 - DNA, 1445 bp, Homo Sapiens
  misc_feature (221)..(263): n is a, c, g, or t
  misc_feature (365)..(375): n is a, c, g, or t
  misc_feature (384)..(639): n is a, c, g, or t
ttggctattttggtttccttcaaggagcactgagtccagggtccagatttttcacttccttagagaggcactgtagcatcacgggggcagtgtacagcccagacttgaaatcctgcctgaaaatcccacatccaccattgaccagctgtgcaatctcggaaggccatttaatgtctttatggcctatctgtaaaatgggcatgataaagttattatcaggnnnnnnnnnnnnnnnnnnnnnnnnnnnnnnnnnnnnnnnnnnngtttactcctctgattatgatgattctattattattccatttcctcaggttggtggtatcttaaaggtactaattacttaagcaataattcactaaaattcnnnnnnnnnnngagacagannnnnnnnnnnnnnnnnnnnnnnnnnnnnnnnnnnnnnnnnnnnnnnnnnnnnnnnnnnnnnnnnnnnnnnnnnnnnnnnnnnnnnnnnnnnnnnnnnnnnnnnnnnnnnnnnnnnnnnnnnnnnnnnnnnnnnnnnnnnnnnnnnnnnnnnnnnnnnnnnnnnnnnnnnnnnnnnnnnnnnnnnnnnnnnnnnnnnnnnnnnnnnnnnnnnnnnnnnnnnnnnnnnnnnnnnnnnnnnnnnnnnnnnnnnnnnnntgaaccactgtgcccagccaaattcactaaaattctatcaatggatttgccaaatagcaaaactgctttagagactgctgtataaaggaagtacaggtagtctcttcttacccacatgtgatgcatttctgaaaacatggaaaaactactgcatctgagagaaagctgagaaatgaacagaagtctgatggtgccaggtcagagaggtctgtgtcatttctcagctcattggttaattcacacaggattgatcaggtacctcatgcatggggccttacccaatgtattgtaaaaatgaaatgtcaaagggaggctgccgcgggtactcaatgcaagtccaggttagggaagaactaaaggaagcacttcatagccagcatttcatatcgctgtccgtctgatggttgtttttaggtgataggggtgtcctggtggatataatgtataaggcttggttggaaggcaatctcagattaaaattcccatcagtagtagccatattgaattttctggggattcaaaggtgaactagtaagagtactttccagaatctagtgagcatatttttctgtttgtcagttggacaaaatagcgccttttgttttgcttctctctgttaaggggaaagaagtaaagctgtaattgtcatataattgctgagcctccactgctttaaggatcccctctgctctgattatgtcttcttttggttttcacagccaagcaagttgagtatctggtcaatgaaaagcacatctacctgctgccaagtggtcgaatcaacgtgagtggcttaaccaccaaaa

SEQ ID NO: 182478 - DNA, 2039 bp, Homo Sapiens
ttggctcacttcatagctgttctttgttagttcccacaattatttcccttcttactcgtctttcttaaatgtagttcctcagttctgaccttgttacctttactttctgtacacactcacacttggatgatcatatctgtactgatgttagtacctgtacattgataaaatgtttaggcttgccctctctcctaagcacgagagcctggtgtttaactaaattggtaggtgatggtatcatagaatgataggtttgtaggatttatgatactgcattcagttttggcagtgttacattcaggtatccaaggaacattcatatggttaaccacccaagtcacagcctttggagtttttctctgtgtctcctttgctcctgttgataaccattccctgtatcattctgtcactatatttacataattactctgattgccataggtcacttttaaaaaattgtttcttttcaactgctctgatagatctccttttctcaacctctttcttcctttctccatcttctacattgctatcaggtagctttataaagtgcaaatcttacttcactaacaaaaacttgttcgtagctctactgtcatctacttgagtccagattctttagtttgcagagtttttccatgatctgaactctgctttatttcctaaattcttgttttcttcaaactcatgctttttcaagcattgcattcatttttacatattgtatccaatctaccatatttcctctgcctgaggaaacttcctctttggcaaacttctttaacctataagattttaatttatatattatctttcttcttttcccttgaagatctgtttatgtatatatgtatatatccttgtcaatatattctgttatttgtctcagagtacttccaattagggttttccatgttttatatatgtgctatttgttcatatttgttgttataagcatggcttgtgttccagctttgctttcctattgagctctaagccttacacgttgaggttggactcaagggtttcttttagctcctaaaatagttcaataatttgacttatttccttgtgatgaataagtggtagaaactagatttatcgttttaatatgtaatagatttaaatatataaattacttttaaaagaaatattaaagtgaattgaatagttagtaatttatactttgctttactaagtaatggtggttccaaagtatttgataaatttacctctttccaatgcatatgggaagtcttttaataaaattactctattgtgagtttataatcatctcaagttatgtaataagttaggactttgcatgtggggtttccataaatcactgtacactaatgcagctgtaagaaaacagaagaatctagttgtattctagcctgggctgtgggtaatacaaaagctggttacatcgtaaaaaattattctaatgtccacatatttttataagctagtaatctgtgttcagttgtataatgtttgctgctttccagtgtttggaacatctcttaatacctcacttaacctaattttagtcttgctagttatatttgttgaatttggagattaaagtagattaatgttacttgtctttattattgtcaacacaaattgtgagtcgaagcttcaggttaagtggtcttttctcgagtgacataggttgtctataatgcaaagtgaatcacattttaaatgtagatttgttttatttggaaaagtaggattgtaggcgattaagagctgaaatatatcaaatattataactgtaatgtcatgtcaatcaatttttccccccatatagtacaaacaaaatcccgaaatgttcaaacagacagctcgactttgggcacatgtgtatgctggagcaccagtttctagtccagaatacaccaaaaaaatagaaaacctatgtgctatgggctttgatagggtaagtacataagggcatgttgattttgatatattgattgattttaaattattgcaaattcttggctgacaaaagtggtttagaaaataag

SEQ ID NO: 182479 - DNA, 2177 bp, Homo Sapiens
ttgggttctgttagagaaattaaaacagactgtttcctcaggcccattttaaactgaacttatgctaggaaaccttaagtatggggaaggtagaaagttcatttcatcacttagaaaatatgtcttctcaagaacaaaactgtgctgttacaactcagtgttcaatgtgaaattgctgccaaatgttatgtagtttaatagagaacttgaaaaaataaaacattaaaatggagcttgtgttagcatcaggtatccatttgttcaggacagtcctgttcatgtctgttgtcttggcatagttttttcccctagaatatagtactcccttttactctaaaaaatatcccagtttggacaataaaatacataattactctagttatattatttgctttacttctaaaaatgtaagaaattgaatttttttaaagaaaaatgttggttcctgccttgatctaagtctcatccaaaggagataaatagtcactagttttttatcttacaactcaggacatttgtctttggttattaatggaaattagtatgtgattactttcatagttatgccacaaatcacattgaagaaggaatcattccgacctctgttccaggacaagagctagaacaatccatttcttgtcctttgatttgagagtcacagtcagggtggcttctgccacccttagtaactcagagcagaggccaggcccctccttccctcactttcttttgctgagtcctttgcccacctgtcaaggtggcaacactgtgctgggtacaggagacagtcagacatgtcccttcttagctatagtcgagctgtctgggaaacagatgaaaaacaggagggttattttcttgtgccctctttgtcagctgatcccctcttctgctaccagctatttggccagcaagccgtttttagtccccactttgcccatttttctgttttggttcatcgtttcttaaaagccatgttataaaacatggtagtttgaatcctgttgctaattttaaactttcctctaaaatgtactgaattttgacaaaaatttgaaaatatcctcagctaactagaataaaaaggatcataaaacaatgattttaaaactgaaatctctagaaactcaacatccaagtcagccgcatttcttcattcagagtgtgtgtgtcacacctgccaaggtgctgcgtactctgctaaccgagctagagtagtgagcaaagccattttctctgatcacaagattttacatttttctgggattttgacctgcaaagtagtctcgtaagagcatttgagagacttacttggaactgccttcagaatctatagagccttttttctctttttcctctaaaatgaaaagagcttcattttatgattataacaaaagtgacactgtaagcagttagaacattaagaagtataaataaaaagtaaaaatcatctacaaccctaccatactcagaaggagaaaagaactgtcatgtatgtatacacacatacctatgtaattttaatataaatagaattatgttctacatgctgttttatttcctcaacagtaaattatggacatgtctgaaatgtgaaataaatttcaaaataaggcttcagaaagtgtagtaagtaatctctgcattattaaaaataagcagggtagggctggtacttggctcccttagcatttgaatgtccaacttggtgttatcactgtatcttccctccatttgtctttgtgattagcatgtaaaatggtattcataaagatcacaacccttgaatatcagatgaagagaaaacttgactccaacatcttaccacaactctggtttcttcctgcagaattcattttcagaggaaaatgatgaatcatccctgtctgtgaaccactgtgctttccttgagggtggcattgtaggttgacaccagcaaagactcagagtgacttgagcattggagatccttctacttggctgctgtattcatgcattatgttggtttgagaatagctagtgtattgatccaagtagtcaaagtgtcttaaaaggacacctatttgtccttttgagccccagctgagtgaatactgatagtggactagaaaagcatagtcaagaaaagtgacccaccttgttacttgaccagcagtctagctgagagatctgatttt

SEQ ID NO: 182480 - DNA, 1306 bp, Homo Sapiens
  misc_feature (411)..(525): n is a, c, g, or t
  misc_feature (678)..(699): n is a, c, g, or t
ttggcatcatcgtaagacagcaagcctccctcctacacatttgtaactaaactcagtgcttccaactcagagatggttttcaatcaatatatccattgtgtgaaagtaaatgcgacttggccttcagccaagactatgcccaagacattagttctgtgttccctgagtgaattcagcctttcttataggattcaggtatttaatcactccatgtctacacaatatcactgcgagccctgggaagcattaccacattgctgtttttattttgtcactcactccccttactggtttgtttttagaggtttaactgagcctttagcctaaaggctatttcctttacatgtgttatacagaagtatgtaggaatttcgccaagaggcaatataatgagtgttggaaatgggacannnnnnnnnnnnnnnnnnnnnnnnnnnnnnnnnnnnnnnnnnnnnnnnnnnnnnnnnnnnnnnnnnnnnnnnnnnnnnnnnnnnnnnnnnnnnnnnnnnnnnnnnnnnnnnnnnncatactacactccaaattgcataattattttgaaaattagaaataaagccatgtatctaacagatttttaaaaagtaaatagctcaggggtatgtaatgtatttaaaagaaaggattcacaggaaaatatgtgacttcttatctctactatcnnnnnnnnnnnnnnnnnnnnnncattaccctaagaaaataagatatccttgggtttttttagttctaatgtttaaattaatatgtttcacataaaaaatcttctaccagttttcgattacagatgacttaatctaacaaccaccatccagtaagtgtgaggactgtgctaagtgccatgagaaactcaggacacactgcaagagcctggcacttactgaggctcagaaaacaataccccaaagtctggcactttggcatgctgggtactttgaactaaaggagattggaaggcctgaaaagcagtctcagaagcagtatctctctgacctgttcctgcctgcctatctcccacccctcgtttcctcacaaagcaagccatagagactagaattcctctttctcaacctaaaaaatacgtctgtaactttcccctgcctttctgtgtaagatctggccatcaagacattttttgacctaccttccctcattccaggaagggtcctgtcctgtacccgggaggaagaaatgctacacagagaagccaagatgaatctgaacagacagcctttgatgttagaagacactgaggcatcaacagggtttaattccatactctgtcatcgaatat

SEQ ID NO: 182481 - DNA, 992 bp, Homo Sapiens
gagcaatgctttttctataagaagccaactttgtacaaaaaagttggactaagacaacaaccaatatagttaaaattactatgcatgttctactttatattaagttctagtgtacgttgtataatgcttacatcaaataaaaggtaaggttaatttacataaaacatgtttaggtaggataattgtaaaaattatttattagagaaattggtaaaattgtggctttgcatagaggcaggagaaagaaaagagcaaggcactagtgagaaaaattgctatggagaatattgagaatagatacaaggagacctacaggtttacaacattaatattggccaatacttgattggacagtttaaatttttcaacctgaaaggcctttgtgccccaaagtttggtaaggagattttgtaaaaacaaacaacaatagcaataaaaaatcagggaagattaagagatttcataaggagcaagaatttataggtaatacttaaaaggtataggtatgattactattttggtgaataataggcacatggtagactgaaattcggcaacagctactgtgcaaataagcatatctgtgattatggcttatatctggttggggacccctgttgtaagccattctttttagtacaggttaagctccatttctcaatcacagttctgttattttcatctgtgggaaataatgaattctgtttcagattttgattgtcttttgtgttctttgtcatccaacagaattgcacatttcactttgtaaaatttttataactagtgtttgacacttgaaactggcttttgagtcttctataatagtttgtgcagaagtctgacgtttaatgttatgatggcctttattcatactgtagaaatatatactgcagcaatatgcaccccaaatggtcagtaagctttttaaatgaactagctagatttttagttttgattttaattcttggtttgaattgctaaaagctatcttg

SEQ ID NO: 182482 - DNA, 629 bp, Homo Sapiens
tttgtacaaaaaagttggaattgaataaatttccttactatacaatcatatggatcttcattaatatttttgactgaattatcaattaaaaatatttcattccctttgtgcagaaactgctaaatccagggttcgattcttgaatgaactggcaagctggctgtggtctgtagatatacatcccacattttcttgttataacagttagtagttagtattgctttcatatatagactccagaatctaaattttacgataatgacatttcttctggtcatgacaaatgtaatattttacaaatataaatctacgtagaatccaaagacacacacggagcagtcctgtctgagaaataaaaaatcaggacacccatggcatcgtagtagcccctcgcgtccagcaggtggcgaagggaggtgaggtttatttattaaatgggaccgagtgggacggggacggggcagccctaagggtagggaagcattgtcaatttctggggatagaatgagacccaggcatagctggagtttgaagctttgaagcaaaaatatctgtagaacatcttaaacgtgaccaaaatatgatgttaaaatcagcaactctttatacgttaaaaactttgaaacctg

SEQ ID NO: 182483 - DNA, 1257 bp, Homo Sapiens
gggcccaagtggtggtccagggagtggaagggggatgacaggccagtctgggagcccctggggggcagtgcccacgagacactgctagcgggtaccctgtccaactccaccctccccccaccaccctgctccaatccagaggctctggcctcacctcgatctcgtgctgcagttcccagagttttccagccgaactgggcagaaggagtgtggtcaccagccatgatggtcacagccacggagatcagcaacatcagacccctactgccaaccctctagatctcacccctccgtggacccttcacaaccccatgggagctctgagagggaagttcaaacccctactgtctggatgagaaaatcaggccccagaggggcacaggctggcacttggtgactccacagcagagccaggactagcccaggcccgattcctcgctaccctcaggacacgggagaggccatagctgctgccagtcctgaagcctggtggtaagggaaggagtgagtccatgggacgtcagggcatgaaacagggaggtttacgccctgcttttccagccccagccactaaggggcaagtagggcctggcgcagctcaggtcagctcagatctctaacagtggcatctctcccgggtgccccacccttggcccaggccaacccccacttcctggtcctttccactcatgccccagccaggtcaacctcctcccctccaactcccccatcctcttgtccccctcaggcctttgctctccagccagaactggaccttgccaagacaacttcaaagtcccatctgaaggccacaaaggttgcccccctgcctgggccacttccagcctcagaggctacttccctcaagtcctttcctgtcagaaactacccagacccagactcggatcaggacaggcaggggccggcagctagacacagaagaacccttaccgagacttcatgttgctgaggaaagctgacagccttggcagctgcacaggacagacgcaaggtcggtgactcagctctgggccacggcagacgtcaaccttcttcaggccaagccactggggacccctccctccatgcctccccccagggcccaggtcggcacccctttcagcatgcgggttggctgaagatcgcaggggacagaggaggagagcagtctgggtggggactggagagaagaggaggccatgcctgcccaaaccaagagaggctgagggaggccatgccaacttttttgtacaaagt

SEQ ID NO: 182484 - DNA, 1333 bp, Homo Sapiens
  misc_feature (633)..(735): n is a, c, g, or t
  misc_feature (986)..(1030): n is a, c, g, or t
  misc_feature (1052)..(1079): n is a, c, g, or t
tctacacactttacaaggaacgttggctcccctgaggacttctagcattcaactcgttcagttaaccctattgcccatgctttgacctctcatgcatctggccccatagaaaccatgaacttgtaacagattgatgctgagaaaaagtcaatctacccgtccactcctccactcccaatacacatacccccatgggctgttctaattcgggggcagccagaggtagccaagaactctaagtccagattcctttcacctccaggaacctagagtacatagtgtgaaaaatacggttcaggcaatgattatgttaatgacgccatgcacattcatttttagtggctgagtaatttaaaacatgatgtgggaattcactgcatttccccaaatgtaagaactttttagttttaaaatgaaatttatagtcactgtagaaaatttggacactaaagtataagcaagtaaaaatcacccccaaattcatcattcagagaaacactattttgctgaaccattcacttgacttgagttatataattttatacagtacatattattttgtaatctgtgtttttgacttacttactttaccaaaataattttcttatgtaaataatagaatatagatttagnnnnnnnnnnnnnnnnnnnnnnnnnnnnnnnnnnnnnnnnnnnnnnnnnnnnnnnnnnnnnnnnnnnnnnnnnnnnnnnnnnnnnnnnnnnnnnnnnnnnnnntatcacatgcaaacatcataccacactcgtccagttatttcttagggttcttaacatggaagaggataaatatatatttaaaatttagatatctacagcttaaccctcccaaaggattaaacaacttacattctcaccaaggtagtcctttttttgccctcaccctcattgacactggatgttgtcaaatttaaaaaaaatccttaacaatatgatagatgaaaagatagtttaagtatactaaggcagtnnnnnnnnnnnnnnnnnnnnnnnnnnnnnnnnnnnnnnnnnnnnnctctgttgcccaggctgtctcnnnnnnnnnnnnnnnnnnnnnnnnnnnntgccactggactgcaacttataaatgattaaaatggtaaattttatgctatatatattttaccacacacaaaaggaaaaacaaatcacctggatcttccaaacattgtatatagaaaatttttgttctcactctggatacacctgccccattctcctagcacctagaggtaactgctttcatatctcagtgctatatgtttaaaaaatataagtaaacatatgtttcacccattttcttccacagaagaaaact

SEQ ID NO: 182485 - DNA, 487 bp, Homo Sapiens
ggtctgacatctaagagggtgaaatttccttactttagatcacaagcaatcaggctgatcccgcctgagccctgagctccctgggacccagcagcagctgtgcattggcacgtggtgccctgtgtctgatcagctgactcctcaggcaaaacctgcaccattttcaccagaattgcagatgtcctcagtgtcattacaaagttcctaagtcatgaccattctgtcctgtggaaccaggctggactaacctcccatttctttaagccatcctgtcccctgcagggacttccaaggtggagctgatgagcaatagttatgagtcattggaggagacatcccagaggcgccagctcccctctgccctaaactgaaattaagacctggtgctctgggtggggcccctggaaggggatgtgcaactcagaggggaccttctccacctccacccaggagaccccagagggaccatggcagagccggagccctc

SEQ ID NO: 182486 - DNA, 827 bp, Homo Sapiens
ttggtcagcccatctgcacccaggcgctcactgaaacagtgtgttgctccacaccgccttgttttgcttgttggcgcgctctcagggttccgaccaatccaagagccttgcagaaagcattaacgtgcttttctctttggcagagtttttctttgctctgatcttggagacatccctctgcctagtggaaacataaggaatacagaaagaatgcaaggagatagaccaacgtgagattctccttcatgcactcaagagaacgatgttgcaggaagagctagtctttcaggctgggctggtgacctgagaaagaatgtccagcttttcttctccacttggcatatcaagagccaggcgtggaagactaaaacaggaaatgtttataaaaactgttcagcggttcgccaacaagaagtggtaaagtagcaaaaatggggatggagatgccaggaggaaagatgccaggggtaaagtgggaaaatgggaacctgaagccaggaggtcaagccaagccaacaggtgtcctgtttttcaatgaggaggtggggcacaggatggatggaaactttccacagtcacagaactaataagtggtgctgaggactcaaacccggggaagcccactctagaacccatgctggtcatccatatccccaaggccctggtcagaacacagctaagcagatggcttgggtcatcaggacgtccattacatccaaaggaagacagcctgtgacgtttcaaaagcaaaagtcccctaccagccagtgaagctacctgatttctcagtatcttacgcccagtgacacgatctaccctcaaaactt

SEQ ID NO: 182487 - DNA, 364 bp, Homo Sapiens
atgttagattgtacctttaacatctgtttactgtatttcactgtaatttttactttaataagatataagaacagtttttgagaacattctggggcacctaaatccaggggactgatgtattttatctgaaaaagaccgcctatgggcagcatccagagcggaccagctccctgtgctggaggactccagtgtgaggcctgctgcttcctttctacattggcctgaaaccagcccaactcagtggtcataatcttctgggcctaccgaagagcaaaagcctacttctagttcttccgttgccagttcaagggctttatctgtcacttcctttggggaacacgtaaagtgctttgatttagaatga

SEQ ID NO: 182488 - DNA, 888 bp, Homo Sapiens
ttggctaaaatagatcagagaggtagaatgaaattttctctagcataggcatcattacatttaagccatctgagggctatgagcgtggcctgcaaagtcactctgagcaacacaaggtggagtttgaaagcagattcaaagccagaccactgggcttgagtcctcacatgcaagcatgtagtcttcaccatggagaagggggtttgcctttctcaaagcttttttcttttaaattaagaaaaagaactgatttatcagtctagtgtttcattttaaaaacatatgaaagggtgggtaacttgcagaagaaagtatttggagcctataattccattaaaagttataatggcggtcatggttggggaggcagcattttgcatattatatcaaaatgttatggtaccataaccatccaaatgttaatggtaccaatttcttctatcctagaaacatttcattttatgttgttgaaacataacaactatatcagctagattttttttctatgctttacctgctatggaaaatttgacacattctgctttactcttttgtttataggtgaatcacagaatgtatttttatgtattctgtagttcaatagccatggctgtttacttcatttaatttatttagcataaagacattatgaaaaggcctaaacatgagcttcacttccccactaactaattagcatctgttatttcttaaccgtaatgcctaggcctaacctcaaccaaccttccacaatcttgttcacagtcagagacccaaaaaagagtgttataagtggggtgtcactattgtgaaagtagtgctaatggtgttgaattggtacctatgattcttcttttgaattagattgtatgtttcatgatctcaacttac

SEQ ID NO: 182489 - DNA, 925 bp, Homo Sapiens
tctactagaatgtaggctccagatggccttccaaacaatacatgtggcccttcacgctgcaggtgatgacaagtacccgttgctgatggaagtagcagagtcatacctttcttggaatttaggttctacagtcaatgcttatggcacccaatgagtcaaaaacacccttggcaactcctaaggaaggctctgccctggaacctgatgtactgtttccccatcaccatccagggagagtttcctcctgggccggaacagaaagctgcctcctccatcaggcaccagaggaagtagggggcttctgtttagggaccactttgcataaatacacatttaaacatgtgcctcaccctcagcacagcaggatgctcacgccatgaacagccaacaggaaccagagtgaccgaccctccaggaggtacacacctccctcccatcccacccacttctgagcatatggttctcacatccaccagtgggtggaatcacccacaccatttaaactttttgtcaaggatgtagagctgaattcatgtgatttcccacatgagcaatgtccctccctccactgcacaattatagccagctcaagcaggtcctctccttccttctacctgccctgcaaatggctctctccttcactgaccccccgccctccttcttaaaggctgatgctccctaggactctatccttgatgcttctcattaattcttctccccgctggctctcagccctacttagggctcctgatcagttaaaaaagacccatgagacctcccctccccagttaacagagatgtggcccaagaggctccccacttctaatttgagtgggggcaaaagaagagaaagatcttatctaggtcttgggggcagggcttgcagggcacaaagaaacagagtaaatgtgccaacttttttgta

SEQ ID NO: 182490 - DNA, 1404 bp, Homo Sapiens
actttgtacaaaaaagttgggtaaaataccatataactggacaaagctagaagaacctttagaagatttgtctgaaaacagatttcaagagtgagcttttatacactgctcactaatttgcttgattactaccaactcttcttaaagttaacacgtttaaataaggtatttctggacttcctagccttttagcaagcttagaggaactagccattagctagtgatgtaaaaatattttggggactgatgcccttaaaggttatgcccttgaaagttcttaccttttctctagtgatattaaggaacgagtgggtagtgttctcagggtgaccagctgccctaaagtgcctgggattgagggtttccctggatgcgggactttccctggatacaaaacttttagcagagttttgtatatatgtggatttttctgataagtagcacatcagaggccttaaccactgcccaaaagcgattctccattgagagtacatatcttgaacttaagaaattcatttgctctgatttttaatcttgtaaagtttttgctaaactcaaaacaagtcccaggcacaccagaaggagctgaccaccttaggtgttcttgtgatttatccttacttccctatgttgtcatagttgcttctaaactcagctgcactatggctgtcaacatttctgatacttattgggatatgtgccatccagtcatttagtactttgaatggaacatgagatttataacacaggtaatagctgaaggtaccagtatggtggtgagactcacacttagtgatccagctaaggtaactgatgttataatggaacagagaagaggccaactagatagctaagttcttctgaacctatgtgtatatgtaagtacaaatcatgcgtccttatggggttaaacttaatctgaaatttacatttttcatagtaaaaggaaaccaattgttgcagatttcttttcttgtgaggaaatacatggcctttgatgctctggcgtctactgcatttcccagtctgttctgctcgagaagccagaatgtgttgttaacatttttccgtgaatgttgtgttaaaatgattaaatgcatcagccaatggcaagtgaaggaattgggtgtcctgatgcagactgagcagtttctctcaattgtagcctcatactcataaggtgcttaccagctagaacattgagcacgtgaggtgagattttttttctctgatggcattaactttgtaatgcaatatgatggatgcagaccctgttcttgtttccctctggaaatcctaagtggctgatccttggtgcactgtgatggagatattatatgtgttctttgtgagctttcgttctatgattgtcaaaaagaacatgtggttcccttttttatttta

SEQ ID NO: 182491 - DNA, 910 bp, Homo Sapiens
ttggagaaataattcacacatgacaagtaggtaacatgcatgagttttgaatttttttaaaaacccaactgtttgacaaaatatagaacccaaattggtactttcttagaccagtgtaacctcacacctcagttttgcttttccaaccctgacttgaaaggcatatttgtatctttttattagtgatagtgaagctgtgacactaaccttttatacaaaagagtaaagaaagaaaaactacagcgattaagatgagaacagttctgcagttgttgaactagatcacagcattgtaggcagaataaaaaatgttcatatctgagaatattcctttcgccatcttttcccaaggccagacctcctggtggagcacagttaaaagtaacattctgggcctttgtaatcggagggctgtgtctccagctggcagcctttgttttaatatataatgcaggactgtggaaaacagttggcatagaatattttcacctaaaaaagaaagaaaagacatacaaaactggattaattgcaaaaagagaatacagtaaaataccatataactggacaaagctagaagaacctttagaagatttgtctgaaaacagatttcaagagtgagcttttatacactgctcactaatttgcttgattactaccaactcttcttaaagttaacacgtttaaataaggtatttctggacttcctagcctttcagcaagcttagaggaactagccattagctagtgatgtaaaaatattttggggactgatgcccttaaaggttatgcccttgaaagttcttaccttttctctagtgatataaagaaacgagtgggtagtgttctcatggtgaccagctgccctaaagtgcctgggattgaagggtttccctggatgcgggactttccc

SEQ ID NO: 182492 - DNA, 607 bp, Homo Sapiens
tacgtccacgtctacagataatgcaagagtttctgaaagaataagctacaaacccgtgacatgcaatttacctattaaatgaatctaaaagtttaaaaaagccgggcgcagtggctcacgcctgatttaaagtattttaatgcgagctgttaagtatgttagcatctgcctgggttcttatcggtcagtcattacatagaccccaaatcataaaggtgttctagttttatatctatggggaaggctggaaaattaccacaaggggagagagagaaggtggtgtaaaaaggcagcctaactaactatttttaaaagcagatcaggagatacaggagctaggtgagatgctgtggacagtgcatgaggttcaattgtgaaaaccgatgtcctcattaatgacagagagaactctgtccctccatatacttggctgggccatcatcagtccagggtctcttatacttggagttttccagatgtttgtttcatgaagcacactttaccaaaatttaggaaaagaagagaaagatctcaactttaaggtaatatacttttggctataaatacttttctaaggtaaaaacaatgccaacttttttgtacaaag

SEQ ID NO: 182493 - DNA, 980 bp, Homo Sapiens
aaatgtacattcttcacctaaaattaaagtttttttatgttttaaattaatatcactaaagttacaaagctagtcaactaaaaattccctctgaacacaacatggtagtatggtacagaaaaataaaagaattcggatacatggtagaaattctagtcctagtatcactaaccagctatgtgtccctaggttaagtccctcatttctttgggtctctcctatcaaatgagttggaatctaagatccttttcaatactaaaattccattatttctttatactacaaataaacccatttgtcaaaaagaaaagttaccttcttctaataaattaaaaatttacatttaagcctcagattttaatgtttatagtgaaatctagttccttgttttcttcctaaagatgacttttgcttgtttctgctacatactttctgcagcctgcccattgttctttccaaacaccaaaaccctataagcaatattgcactactcagaactatttacacagcagagacaatattgatagggttctaggatctggtgataaacagaattttttttagttagatggcagaaattcactaagcaattatgataatctaaaactcattagtgtctgataaatcgcgcaaatttgattctgataaacatcattcacagccctttcagttacaaatcagcctcctggaagccttggaaatcagtgaggttattgtttaactttttaggggcaatggaatatttaaaataaaactagtgatttttgtaaagcccaagatattcgtatttcagaaaccagttttctctaaaatcagtaataaaaataaaggggaaaagttttatactgatctgaaaagtggtatataaaatacaaaattaggtgaaaaaagtctatggaaatcatcatgaaagcaccccaagggaaaccaggttacattctgccagttagatttctgattttttcctcctattttgccaa

SEQ ID NO: 182494 - DNA, 1210 bp, Homo Sapiens
ttggcaatcacttgacatggaagtcagtggcaaatctttaaagtatgcatttgatactggcaaatatatactactgatgtttcacaaaagaatcttagaatctgtagaaaacattaattacttccatgaattatttctaaagtataactttaaagttttgatttttctatttaaataaaaagctattgatgtgttttagcatgtcctcaaaatagattcctgtatttcttacagagataatcttactataaccgcaaatccctacaacacagtataaagtttccctgtagttcacccatgaaaattatttgacttaaaaacaaccatagtagtaagccaattgcaattcaaaatgcaacatccttgccataaaagatgtaacttaagtgactgtgatcctttgtctacctttcaggatcccatcaaatgggatttagttgctagaaagatacttgacagtctgaaggcacaggtgataagattttgttctctgtgaatatttttaaactaataggttatgtttttaaatcttcaatttggtaaaaaactgaaacgtcttggaatattggttctattagagttaaatatggtaaaacaggaaagcgtgtttattttcagataaggggaatttatacttttcattaaagtcttggagtcttaggaaaatgttgagggtttgtcttcccccagtgtcattaatactaatgaactattagatcaaattcacttatacatttaatatcatagttattcaaaatcaggactttaaatattttttttctcccagttcatatttctttgtgcgaaaattgaatttgtatgaaaagttagataattaagctaatcaagtatgaagtatacactcttcctaagtgaatttaaataatgtaatgcttttaaataaaagcagtggtcccaccacatttttttcagcatagtagctggcattttgttatcattagccagagtagcttcagcatataagttattgatgttttccaacttcaaaagtgcattttatgcctcccagtaaatttgataatgatttgtcacagctttgtcatcttttgacttttgcttatgggcctcacttcgtacaactataacatgaaaaaggattgtcctaaagtaaggaatcagttaatggtaggatgaagaaactgtaaaactcctagaaaaaaacctgtgtgcatttttctggaaagttttc

SEQ ID NO: 182495 - DNA, 2671 bp, Homo Sapiens
  misc_feature (159)..(167): n is a, c, g, or t
ttggaaatcattttgccagtaatattgcctgtgaatccctttaagaagtcgtcctgatctgagcctgtctttctgagcactttggtgctgaattgaaaatggtaagctaaagcagtgacagatccacgtagcctctttaacctctttattatcttgccnnnnnnnnngtttctcaggttaaacctttgtctttaacctccctttgttgtggagaaaatgtgtcactaatcagtggtccaagggatatctagctttggttactcagttcctgcagcataacagatatgacttatgccagggaaggtagaggctgattatggagacacccaggaacaggaataagaagggataggtctgctccacgtagaacctccccagatcggaagttaagtcttggagagtttccaaagtgctgaagtaaaaaggagacttggagggcctttgcttaatgagcaagaggcttgtgtcctcccaagaacatgagggagttcagaagggagctatagctcacagacagaaacctgcccgctcaccccatccctcgtgactgggagcatgtttgctcagaattttctaagaggactctcccttcaaaaatccaatttgcttccagaatgttgtttagcctctgagaatctcactctttcatttccatctgtgaatggacatagatgtgttgctcagggatcagaaacatcagagtccagggcccagtggcatggtgttgcattagtagttagaaaagtaattggtcagctctactgtaaaagaaataagtatgtagtacagttttgtaaatgtcaggtctgttctgttgttttgtgatctgaagactgtcaaactggttgataatcaaagaaaaggttgggttagaataagtaaaatttcagttagaaagatatagcttaccagttttccatgtgcttaaggaagtcaagaatatttcaggttgttgagaactgttgtaaaatggaattgaagctagtgtctctcaccttcttaggtgtatcagagagaggaagtggaaggccagtagtagcatcttcatacttacttttgccagcccagcctccatttcaaagactttgtcttccatcctatccaatgacatggtcagggatgggctctgaggaggcagtgaggccccaccttggtttgctccactgtggtgtgtagtctccaaacagcttaagggtttttaagttttctcacgattacctccactccactcatctactatcagcatcagaaaggttaacatccctgggaccattctacttataaaagagatgaactagtgtgctttctccccttttccaggtgtgccatccatatacaatctcctcttggccaagttcaacaaatgtttccagggaaccccgtgggttgaggcaaagtagccaagatgtattgagttaagtttttctagaggacaaaagtatttcttgtcccttttccctcatgctcatatgttttagctgaggcgtaaatggccaagttgagtaatatctgtggaactgagacagagagccagggacccatgtacccagggaccagtcccctggggaatcacacagtggctcagactagactgctctatcccaccagaactctgctgctgttcatttccatcaggaccacccaggaaagcaaataagttagccttctcatcattaggtcacctaatctcttgggttgcaggatgagagcatatatagatctcctgtttagagagtgtgttcataattgtagaaagggatagaaaatggaataaccaagaggctgtgtcattttttaagaggatggcaaggatgacctcaaatgagctcaacaaaactgggaatccaaggaatggtgcttgtagggaaagagaggtcagttgtggtccttaaacctcttggcaccttgtgcgggttataaaacaaggagctggagtaaaattgcccttacccccaatccaaatgctgtccaggatttaggagctacccaacctgtggttatatggtgttggtttccattttttgtttgtttgcttgtttccaaaatagccttgcttggtactgcatggaaagttcaagcttttcttcttgcccgctcagggctggcctcttccccgtgtcttcacagcgtccctaaggaagatttttgcagcactctctggagctgaggggagtgaaatttggtccagagaaggcggaaggaaatagttttcctgtttccttttctcgaggtggatgtcctcaggcttccttcacacctccttctcatgggtgcggctggcagtacagtcaggctgtggaggagggctgagaaaaaaggggcactggtccagccccaggtttggtctgagacaggtacacagcagataccatcccaccttcctctctaaagaacaggccagccacacatataaccctttccctactttactaatgtatcccttatgtggtaccagcaatggaggacaggcagacttaccccctgccatctagagagaatgttgttattacccgtaaaacttgaccacccccatatcccactcctttttgtaaaaacaaatgcttaaacctgtgagcctgccgttcctttctatgtgttaatcagtttccttccatttgagctgtgtgggagggaagggcattgaaatttgtagttgtaatcttgtgccacc

SEQ ID NO: 182496 - DNA, 1134 bp, Homo Sapiens
taaaaaccaacttgaggcagcaaaagtattaattacaattgtcggactttatctgtgtgatgtgcggggcctccctgtctcttgatctcagtaaagcctacaccgaccgtttcaaataggcttagttctaaagagactgtggtttggaaaacatttccaaatagctgcagtacttgcccgagttttgcttatttgttgaaaccagaacgactgtgcgggagccctccggtgacacgggccttagctgtcccagacgtctgcgtccctttgcacctgtcccgattccagcgtcgagcaggtgagcaggcgaggaaggcatggagttccgacaggttccagcacgcatgtccccttcgcaagcgggggaggccctcgcacatccacacacccgaggtagccttgcggcgggacttgggaggcagggcccgctgggagctctgctctcaggaatccccagcaaatggtttagagacgaatcaaagtgcagtgaaagtcaacgtttccttccccctgacgttgggaggggtctggaggggcaacctggcctcctaggagagtccttcagacgggacgagcagggtcacatggctgggcgcagacacactcacacgcgcacgcaggagctcgtctggagctcacgctccgcccccaggtggtgcccagcccatccctgggcagggtgtctgggagccacccctgcaaatcactgtcttctgcccaggccccccggaccagcctcctcccagctttggtgtgcggtcgctgcccaaggacagggctgccctgggcacaatgtgtccaactcgctgaggaaaagaagatacgtcattcttctaagagaaccacattgtggaaaagaaaattttttttctaaaataatcataaagaaaaatactctccaacagctgcggcaccagccaatgtgacgagatctgacagacgtcaatacctgcaggcgtctacagagaggaaatttgataaaaatattttagtcactgactacactaccattatctgaagcattcagataagacttagcagagaatgtcagattttgttttcaattataattttagaaatgcaaaatcttattttttctaagttgcttattgtctatataaatgttttatccaa

SEQ ID NO: 182497 - DNA, 670 bp, Homo Sapiens
  misc_feature (60)..(119): n is a, c, g, or t
  misc_feature (137)..(247): n is a, c, g, or t
  misc_feature (325)..(395): n is a, c, g, or t
  misc_feature (403)..(422): n is a, c, g, or t
ggcagcctctctctggccagcagggaaaggtctccacctttgaaggactcacccaatggnnnnnnnnnnnnnnnnnnnnnnnnnnnnnnnnnnnnnnnnnnnnnnnnnnnnnnnnnnnnggcatgatggctcacacnnnnnnnnnnnnnnnnnnnnnnnnnnnnnnnnnnnnnnnnnnnnnnnnnnnnnnnnnnnnnnnnnnnnnnnnnnnnnnnnnnnnnnnnnnnnnnnnnnnnnnnnnnnnnnnaaattagccgggtgtagtggcacacacctgtagtcccagctactcaggagactgaggtgggaaggatcacctgagccnnnnnnnnnnnnnnnnnnnnnnnnnnnnnnnnnnnnnnnnnnnnnnnnnnnnnnnnnnnnnnnnnnnnnnnctgtctcnnnnnnnnnnnnnnnnnnnngaatgaatattatggtatgtaaattatatctcaataagaaaattatattaagaaaactagtggatcatacactttaaaaaaggtgaatgttacggtatatgaactacattttaatttaaaataataataatacccacacctgggccccactcctgagggattctgatttaattgacttgaggacgacacaagcaagcattaaaagacattatgatgaaactgggaaaacaagccacagaatgagccaa

SEQ ID NO: 182498 - DNA, 629 bp, Homo Sapiens
ggtccatggcctgggatttggggatccctgtcctaaataacttggtaggggactgattggaaaactaaaaattaagtcagggtttgcccactaaagatgaaagcaaattttgcatttggtgggatgagtctaaatgcaatggagacattgatctttgtaacagcaaaacattaaatccaggcttttcttttaccttgttaatggacatttcgttcatcctgagacattgctttggcataactcagaggtagattcagcccaacaactggccctacaatgctcagccatgatgtgatatagttgacattcctaggaaacaagtgaaatacaggccatgctaacgtttccattgtagtttttggatgaatggtagaacatcagttggtcaccaacaataacaaaagtgaggctttcttcaaagatttgtacctaccacctggaatctcagcatttctgaatgccagccccattgcttgacaagaatttaaggtccagagagcctgtaaggatccctcattagggtagttgaagaatgaggtaaggtactggctcctgacttcccttgatgattcaaattttacccttacagtttacagcacttactaaggttgcagagtgcagtgatccaa

SEQ ID NO: 182499 - DNA, 999 bp, Homo Sapiens
gaaaattaaattttttggtaacttgattagtaacatcttaattgaaatttgataatttagaagcccatctgccgaacttactccttaaaattaacatatgttgaaatatctacactaatgttgtcagtacaagtgttggatagtgtatcgcaaacatatttttgcaaatttctgattccttttagtttctggattgcctcccagttttaaacatagggtaggtgatgaaattgttgggcatcaaatgcatttgaaagttgcaaatgcgttctattttcttttaaaattatttgacagactctcattagtgtttgttttacaataacaattgtatcttctagtgtttgcccctcaagtgaagttctccttagaagagaagatcttttgggatcagttccccccattttcttatatgttcactaatcagctggggttaacatttaattattcctcatattcacaaccacttaaacatttaatagagtttttaaaaatccaaacaatgtgtatcttgtataattttattttcatttaaaattctattaccaaaaaagccaggttagccatttgcttataataaatcatgccttcttttaggaatttttagagtcagtttaatgggactcctgagttgacagctgtgcagtctgaattgccttagactctgaaaatgcttcagatttaaaatactaccaaccaacatggagtactgatcttcccacttgttgccaaagaggctagttaggaaaactagggacaggctgttctcttgcaattcaaaactgaacataaactgaaattgagagaaagtcatattaaatcctcatgtctgccatgtttgcagaggtcagctatacaaatatgaatgttaatttgaacttcaagaaaaggacactgctaaaatataatacatcttgaaaatgaagatgactctctacttgttttaatcagaacctcactgatatgtctcagggattaattttctatatcatatccttt

SEQ ID NO: 182500 - DNA, 693 bp, Homo Sapiens
ccctataatgcccactttgtacaaaaaagttggaaagcaataatatctaagaaacaagtggaagccggtgtctgtgttaccatggagatggtgaaagatgccttggaccagcttcgaggcgcggtgatgattgtttaccccatggggttgccaccgtatgatcccatccgcatggagtttgaaaataaggaagacttgtcgggaacacaggtacgtagtttgtgagtgggtactctggaggttgagttcctggcccccaaagcccttaagatttgatgcccctcttctggatgtagtgttttgctccctacacagctttcaggtttgctatgccctgcttcagagcagagttctgaattcaggagcagcccctgagagtgggtactcatgagtgaggggtttggccccacacacaggaggcagtggacgcagtttgtgaggccgctcatcaggagtgactgcaaacatttccactgtctttggctgctaggaagccagctacctaatttcttcctatttctacccaaatgcgtcagtccctttgcatggaaatttgtgtttctagtcttacctgttgcttcatgttattttctgaccctcatgttccattttccttgggttttctcacttcttatcctattggacaatattctttgtctaagccatgttaaataaatgaaaatatgcagaagt

SEQ ID NO: 182501 - DNA, 1273 bp, Homo Sapiens
  misc_feature (208)..(222): n is a, c, g, or t
  misc_feature (1012)..(1028): n is a, c, g, or t
ttggctaatgttttgtagtcacatgggcaagaattattacatgctaagctggttagtataaagaaagataattctaaagctaaccaaagaaaatggcttcagtaagttaggatgaaaaatgaaaatataaaataaagaagaaaatctcggggagtttaaaaaaaatgcctcaatttggcaatctacctcctctccccaccccaaactnnnnnnnnnnnnnnnggttttctaatgaaaatctttaaaaatactgtcagtattttaaaattttcaacagtattataaaaacattgcatctccccacctctaatatgcatatatatttttcctgctaaaattggtttctacaattgagtaaatggcaaatacatgaagcaatgtccctaaattttataaagaaattatatttaatgcacatttcaattttcattcttatttttgaccttttataaaatattttcatgttgctataagtaaatgatgatgccaccccatgttgactatggtttttctagaaagcaactatgctgctaaccatagaggaacatagaagggttccagaatctttagtgctggttttaacaaccgatgcaacattaaaaatgtgttagtgtgctgtgcaattggttttcaattcatattaatcttaatgacagagaacaatgtgttactaattattttggttgtatgccattagtaaattgatagaaaaattaaggggattaacataacttcatttcattgccttatattaacatcttataatacaatagtttaagactaagggaaacagatggagctgtttattgagacaactggtgaggaattatcatgtgttcattcccattttagagcgtgaaactcctacattagaatatataaagtcactttaaatatctatatttgtaacagaagtagtgtacagatattttattacagcatttttgtgtaaatgcagaattaaagtgaataaataagaattttcagtggtgcacaaataagcagcaagcannnnnnnnnnnnnnnnnactgtggaaaagctttgttatatactgttcaagatttgcaacttaaaattggtttttatcatgtctaactgcacatatggtgtccatagttacagctaaaggaactttggacaacatcattatggaaagcttaatattttttacctccacaattttttctagcactaaagattcatagactcctcatagatgagaggaagatgacattgtagaaagagaagttatcctggcctgtatatgttttt

SEQ ID NO: 182502 - DNA, 892 bp, Homo Sapiens
  misc_feature (307)..(331): n is a, c, g, or t
ttggctgattcaccaagtggatgttgcattgtggaatttgcctgagtactgttgtcattctgctcagccaggcacggtcagtttcttggccagggacattgctatgtgctgtgtgcaagctctttagaagagagattggattttcttggcattatcagcactcatgctatttagtctacttctattttgactgactctttaaattagtacaatttttctacttgtcatataactcctggaacaatagtacgggaagccgtgatccttttccctgactcatgattttagtctttttccaaatcgctgnnnnnnnnnnnnnnnnnnnnnnnnngctgctccaacgaccagcatgtgttggagcagatctccatggtaagccaaaagtggacttgtcagcctataactactctgcagctgccactaactctacaggcacagtaactacactttatacaggagcacatgccaaagtgcctgggaggtgccaataaaatcaagaaataagaaaactacaaaaaaagatacggtattaaccttggacataattttttttagggaggcagctttcccacttttataaagggggttgtaaatctcaagaggtcatttgttccccatagcagcatatctcatttttaaattgaagcgaattaaataggattttactactcaacattcattatactgttaatctttgctgaaatatatgctaacaaatgttaagcaagggaaactgaacacttagtcatgtggattgttagcagtgatctgcattctgtaaagaggtacttttccatgatgtaagcatgaagtggtgccagtaagcgtagagcgaaatgttgactttagtaacattgggtttagcatttccagtgcagcatatcagtgggcc

SEQ ID NO: 182503 - DNA, 1475 bp, Homo Sapiens
  misc_feature (182)..(211): n is a, c, g, or t
  misc_feature (695)..(746): n is a, c, g, or t
ggataagactacttaaaagacttctctacatacaaaattgtacaaggttaaacttttctgtactgaattacaaaacctgcacaagcatgtaataaaagagcacacttaaaaacattctgaccattatttagcctctaaaaattactgaagttcaacagtagtaaatagaggaagctcttacnnnnnnnnnnnnnnnnnnnnnnnnnnnnnngatttaatctactggcagttttacttaatgtaagtatttaaaaggtcacattgctattgaatgagtctctagatcaattttagaattgtctctcaaaacttaagtcaaccaaaatattatttcaaatagtaattccaattctgaagaattttaataccagcaaatatattatggcctcatagtagtaactgaaccaactttccaaagtgcctggtagctgtccagatgaattaggctgctttggaaaactgtactgtctctacagccattgagaagccattcagtgccctggtagggacctgagactttccagaattcacacagcagtctatgatccctcaaatgtaagaggacagggggtcagcctatcttcacctctcagtgaatgtggagggccaagcaatatgacttgcaaacctaagctagaagcttgggatctacagtaaggaggaaggagaattaaagtagagaaagaaaatgtatnnnnnnnnnnnnnnnnnnnnnnnnnnnnnnnnnnnnnnnnnnnnnnnnnnnntgcctgctaatggcaggaagtggtaaagtgcctataactacaacttacaagccacccactaattctaatgccattcatttgcctactccaataataagaaaagctggctttactggaatatagaatctagagcaacattacccgcctcatgttagtgagtaactagtattctaaagttgtttgccatacatatcaagttcttctaacctttgaagcaaaccaaaacacttcaaaactcagggctcccagggctgctgctccagattcccagcattcagcatgcttcattatgtggagaaagacatttcaagacaagctgtatctatacaccttcagaaggaacaaagctctaagaaggtgggattatgttaacacatagtacatggtttagcgtttctccacatttcaaactcaaaatagctcaataatatgctgctacatgagcattgattctgaatgttcataatataaacttcaatttgaagcaacaatgttacacagttcagctgttattaccaacctactctgtaagttaaaatacaaataaaatattaattttattgagtaactaaaaataagttcccactgacttaaaatcgtcaaatggctaactctctctcaactaagagagcaacacagatggaagcagagaggacaactgaatataaaataaaatttgtcaatctactctataatctgcacttttaaaatccaacttttttgtacaaa

SEQ ID NO: 182504 - DNA, 1382 bp, Homo Sapiens
ttggatcacatttgcctctcctcccactaccttcatgaacattcagtgctgtttcgcactgcagttagagagaagggacggacagttggtgacactcagccacattgctacttttatctgttctggtaagaagttagatagatggtagattgaagcaattgggtagaattagttgggggaatatttatgagttgctgtgtttgttgattagttccatctctttcccattttaactgagaattgattatatatagctctaagtatataggtatttaaacaaccccacaagcggctgtatcagtaacatttattaattccactatagtgagggaggatttccattctaaataccttattttgagggatttataaaacttagttgtaaaagagaaagcccacatagtgggaataaattgcttcagccatttttagtatttgagagcactagggaagatgtttagtagctgtgtggatgccttttttcacaccctgtctattgaatgctgcatccattcacgaagttaaatgttacatgcagttagtccttaatgtggactggatctgtacttttgttttggattaaaacatttaaagatttttgaagtgcagctactccccacgtgcatttgatacacataaaagtcatactgtgtgtgcacaaagagtacatggattttccagcatattgctttaaaaaattatataaactgttaaaatattaacacctcaggctacctgctgtattctgtcccattgacccctggaattggatttactgcaagtgattgataattcaattatgtggcttttcccctttaatcttgccatttaaattacagtagaaagacaaaatcaagtaaaataaagtgttagataatagaaagagtgttaagaccagcccacttttctcatgtttatgttctttcatttggaccaagaatctccgcatggaggttgatttgccactggggactttggctaagactattaggtttgctttcaactagatgttcctgagacaagcagagggacactgcaattccccttccatgcctgctgttctcccccatgtaagtcttctttgaaattaacggatgtgtctcctttggaacagccccataacaaaagagaactactgatctgagcataggaaagtagaggctctaccacttttcagttgaaaaagcaagactttctctgtgtttctgaaacaaggcataatgttgtcacagaatcagagatccagtctcacttttccacaaatctccaaatctccagtcttatcttgtgtgctctaatggtttggttcaatccctttccaactcttgttttcaagcatggggcctgagtgttctccactcctcctaagaaaggagcttggg

SEQ ID NO: 182505 - DNA, 794 bp, Homo Sapiens
  misc_feature (123)..(169): n is a, c, g, or t
  misc_feature (506)..(536): n is a, c, g, or t
ttgggtaattatgaatgatgctgctgtaaatgttcacctacaggtttttgtgtgaacatacatttttcttgagccaggattttgaatccaaacaggtctgaattgggaatcctggctttgaannnnnnnnnnnnnnnnnnnnnnnnnnnnnnnnnnnnnnnnnnnnnnnggggatttaactttcatagtgggttgttgtgaggttaaacgacccaatatatctcaatagttttcaactctttcagaccaagcgggctctttgtataacaaatattttgtaatgcccccatttctatccataaataaaattcattaaattggcaataagcttaacctacctattttaaagccatatgatgccctaattctacaataaaggagaaataaaagagaatacactgcaactcaggctgataaaatgatcgaatctcagtaaaattcagaacaaagtaccttgatttagaccatagttgtccttatagaaaatcatcatatattagcactgnnnnnnnnnnnnnnnnnnnnnnnnnnnnnnngactctgtggttgtgtgtaaaaaaagagttaggttctagtctctgataattatcaatagaatttttacccatctgaatgtcctgcaaaacattaaaaaattgtttgggattgtcctgtgctgaaggacatctgggatccctgactcctacaaattaaatgccagtagttatttcttccactcaatacaaggaccaagtcctgtctgctgagtttctctgggttatgtgaaacattcaataatataactagctcatggg

SEQ ID NO: 182506 - DNA, 897 bp, Homo Sapiens
gggatatattggtttaaatacaatatattttaaaattatatttaccttttaaaaaaacttttattaatgaggctactagatcatttaaatttacctgtgtggcttgtattgtatttctactgggcagtgctgatctagagcaatttgaaacttgtggtagatattttactaaccaactctgatgaaggacttcctcaccaaattgttcttttaaccgcattctttccttgctttctggtcatttgcaagaaaaattttaaaaggctgcccctttgtaaaggtttgagaggccctagaatttcgtttttcacttgttcccaaccacaagcaaatgatcaatgtgctttgtgaatgaagagtcaacattttaccagggcgaagtggggaggtacaaaaaaatttccagtccttgaatggtgtgaagtaaaagtgccttcaaagaatcccaccagaatggcacaggtgggcataatgggtctgtctcatcgtcaaaggacccaaggagtctaaaggaaactctaactacaacacccaaatgccacaaaaccttagttattaatacaaactatcatccctgcctatctgtcaccatctcatcttaaaaaacttgtgaaaatacgtaatcctcaggagacttcaattaggtataaataccagcagccagaggaggtgcagcacattgttctgatcatctgaagatcagctattagaagagaaagatcagttaagtcctttggacctgatcagcttgatacaagaactactgatttcaacttctttggcttaattctctcggaaacgatgaaatatacaagttatatcttggcttttcagctctgcatcgttttgggttctcttggctgttactgccaggacccatatgtaaaagaagcccaa

SEQ ID NO: 182507 - DNA, 830 bp, Homo Sapiens
ttggctctttggctgatcgaaagctagatcaactggtacttagggcacttgctgtttataaagcaaaattgagaaaatattcaaggtgcctccatcgcctgaactacaaaatgcccttggccttcctcacatggggtctgtcaccttgcatctctgataagccatccaccttcctggtcagtgcctacagggggagagcctttctgagaagcaggtcctgtggtatctgagaatggtctagagagctccccactgcccatctgcccccgaatttcctgccaagctctggggagtggggtggggggagggacgtccgatggatgacaggccgccagcccagacgtggggagagaagcctgagtcctttcctgtgtgataaaatcaggctaatttacttggatttggggtgatttgtttggtttttagcatttatgaggtgagcccatgaagttagtggtccattactttttaaagatgcattttcattttaaactgtctcctggcctgtggatttgtggaatggacagttttgtgggttttaatttatttgtgaggagtcggggctgagaaggcattttatcaggaggtctccttttgcacgtccatgacatgagcttttcggaggcaaaggaagtagaggagggtgagagatgcaggtcactgccagaggcacctctgtgacacggaacattccacacacgtcgcacccttgggcttctgcgaggaggaaatctgagcctgtgaaaccgagaaggccaggcagtaaactgggctctggaggtttgccctttaacctcctccacagaggcagcttcaccccttgtaagccc

SEQ ID NO: 182508 - DNA, 876 bp, Homo Sapiens
ttggatcattttaaatcttttatatgtattactttgctttccataacaaattggtgtttatatggtagatagaagtcattgttcatgacattcgtcatttagtattaagagcatctttatgcgtgctgtgtataattcataatagttaaaaacaattcataatagtaaaaaactggaacatttctcagaaaaagtaatatcaccctcctttttaaaacaaagctaaatcctgttaattttcccttggtgagaaatagcaccacacattacagcctttaatggcttaaataaacatgtataatgcacagtataaatttgaaaagtagtcaaaatcctctctatcctccatctttgaacaaactgtgctgcctcatttgcagagatttgcagtaaaaatcaaagatggcttacatttttacactatgtcaatatttctttctctgtttcctgttacttacatcagaatgatgggctcttttcgtaaagcagtgactgaaggccaaaagggaacttacaaaagggcattatacaaattctaaatataaaactccccaaaaagggaaaatgatgttcagatacaataaaaataaattatagaataaaaatgagaaaagttatagtcgttttttgtacaataatacagtgtataaaggctaacgtcagtaatgtcaactttgttgaatggaaaatcctgaactggcagttgactctatttctgtcaaatcctgcttttatgttatgtcactctctgattactcagacctttctctatcctactatgaaactgagtgattctcagaaaggaaccaggacattctatcacttaatgccaaacacgttaaaacgaaagctatgaacaggcttcccaacattttg

SEQ ID NO: 182509 - DNA, 898 bp, Homo Sapiens
gtataaaatatttttcatgtgctctaacaaagccctcatattcatctatttacaacattttctactgctctactaaataattttgataaacttgtttctcaaaaatgccttaacaccactacccattgtctaaactgaaagcatgtagtttttcttaatactgaaaactttatcttattactgaaagcattgtctaaactgaaagcatgacttctcaattaccatacttttgaaattgtacacaaatattccactagttaggctgaagggaaaaaatatgctagtcacacttttttccagccccccaaaattctctttgcttttatgttttacaaatgttgaatgaaataaaggaaatagacaatgaaaagaacccaaagaagtaattcatctcatatttcaggattcctaattatagtatcttggtcttgctaagcatgtaactaaagagctcaagttcattctcagaaactgtgaactcaaagctacaactaaaagatttatttctaaaagttattacactttcaacttcctgttttatttagacagctcatcatgaccatttcaggtaacaaaacccaacttcctctttataaagtgattaaaaaaacttcagcagttatgagaatagatgatattactagcttttacataaatatttacaaggaaactaagagtccattatcaccaaattttctaaaggttcactgcctttagaaaatgtaacaaagataaaaaacaatattaaaatatacttggcaacaaaaaaagtatgctagaagaggaaactggtcacagatctgctattaaaaaaaacaatactggtcaatgtgtatcaggtaggcacaataaacttaaaagtttattatttaaattatttgtgaaccaacttttttgt

SEQ ID NO: 182510 - DNA, 647 bp, Homo Sapiens
aagctggtcatgtccgtctcctggggctgtggagaggatgcagggagatgaggaagcgaaagcccctccagggcctggcacagccgctaggctctctaaatagtggctattgtcatgatgataagggagagaaagatctggtctgcaattttctctgctcctagatgactttgtgaagagcagttgggctccactccaaagtggcctcaatgggggtggggctggggctgtcctggaaactagacattcacatcacaggagcccagttctgctgttggtttgttgaatatatgtccacgacgccacaggcactgcagacatgagaatctgcccctagggaatgcccagattggtgtggtggaaacagacacagttgtggactccggaacaattgtgagactgggcagcatcggggagcatggtggaggttggggggtgctgggctcggaggcaatgcccaactcagccagcagaagcccgcctgtctacagaggggctgctgttccaatcaagcatccacaggcaaagggaagtttgccagacagtaaggatggggaagggcataccaggtagagtgacctggatcagccaaggtcccgggtaaacaagtgtgtggcctgatgtacacaactgaaggttcagaggga

SEQ ID NO: 182511 - DNA, 892 bp, Homo Sapiens
ttggaaccagcattcataaacaattgatatttttctgtcaaatgactacttttgcattgaacttgaacaagaaaaggtaatgggataagttgaacttgatcaaaaggtattccagaatctggtttggaatagatgccaaactatcttttccctcttgttaagatgcacacttgactgaaggaggacagggaatctgaagactccggatgacatcagagctacttttcaacagccttctcaattttctttctcagaaagcagaggctcagagcttggagacagacggtgagaatatttttttcctgagttcttaaggcttaatcattatgactttaatatatttcagacaattctttctcagttataaattagcttataattcaaaatatgtattatgtacttcatctgtgcaagttacttcatcaggcaatgtggtttaaaaaatgaaagagctacaatccttcctttaaggaacttatatggaaagaataaatgtagataaataatgtaatcaaacagtaaaagaggttaaatgctgtaagagaaatggagaaaaatattcttgagaattcagtgtgtagattacttctggagagaggaattggaaagcttgaaagaagaaatagtatttttgttgacaacacttaattcgatttatcaaaaaccagagaaaatggacagttaatacaaatcctacaatagcaatccctgatttcagataaaaagttaattaccgttttgaggaaaaatagaagcatgtttgattattgtgtgtttattatagtataggccagtgattacttttggaattattaaaattcctcttacaaaggaaagagcattattagtatttctgagaaatgataaagtaattggattaattaacacaagt

SEQ ID NO: 182512 - DNA, 457 bp, Homo Sapiens
ggaaataacataatttaaaatagtagagaaataaaggcaaacatgtggtttcattttaagatacattcaagaactactagtattttagatttagaacaaatcaggccaagcttgtcatattttacctcctccttacaaaggaaaaaattgggagaattgattaatttgcatttatatggataacaactggcagaactaggatttaaatccagattagtttgattccaaagctcatacttctcccctggcaaccttaaagatatatgggggaaaagagatttttcaatgggtgggaaagtaaaacccttaaaataaaaatctttaacaatttataatttgtaaatatgacaggttattgggcaatatctctctatcaacagcaggaaggggatgaaaatatttagactaaatgggtaactgtaatagttaagatcatgccctctgaaatcagatccaa

SEQ ID NO: 182513 - DNA, 569 bp, Homo Sapiens
  misc_feature (146)..(175): n is a, c, g, or t
ttagccggctgtggtggcacatgcctgtaattccagctacttgggaggctgaagcaagagaattgcttgagcccaggaggcagaggttgcagtgagtggagatcatgccactgcactccagcctggtgacagagcgagactcctcnnnnnnnnnnnnnnnnnnnnnnnnnnnnnncagtacagtacagaggtgactaatttcagaacaactctttatgaagtatggattaattacttttcagagggctcaagctactaccaacaagaaagttggagcactcctatgacaagtctgattcaccaagaccaagatgagagaccatacatacctaaatacgaagtgaaatttctccaaaaattatccttctgaaagtaaggcactaccaacagccaaagtactcataaaatctcttggcatgagacaattcgttaaattctttattttgagcaaaatgtactcaaatataacacagatttattacttattcccgaggggaatacattacagtcactagtgttggctatcataaacaaggctttaaaaagtttcccaacttttttgtacaaag

SEQ ID NO: 182514 - DNA, 348 bp, Homo Sapiens
atactattatatctctaaaaataaaaataaactttttaaaaaggagatgagcctaaggtaaccaaagaatcagacactgtataaaggttgttggatctattactggagaaagtaaaactatatacaaaatatcactacatcttagactctgtcctgtcccctgttctgattagtcaaattggctgtggcttttctgaggacatagccctcttctggcattctaatcccctaatcctacacatataatcacaagtaggaggaacgatggcaccttatattggaacagctttgagagatcagaaaacacagacatgattatacacgttttacttacaacaaagtaaccaa

SEQ ID NO: 182515 - DNA, 930 bp, Homo Sapiens
aagttttagcagtctggatagaagatcaaacctgttacaacattcctttaagccaacatctaatctagaaaaaaggcactaactctcttccactgcatgaaggctgagagaggtgaggaaagtacagaagaaaagttggaatgtagcagaggttggctcatgaggtttaaggaaagaagtcatctctgtaaggtaataggacaaagcaaagcagtgaatggtgatatagaagctgcagcaagttatccagaagatctagctaaggtcattgatgaaggtggttacactaaagaacagactttcaatgtaaaaaaacagccttttattagaagatgtcatctaggattttcatagctagagaaaagaagtgaatgcctgggttaaaagcttcaaaggataggctgactctctcatcaggggtgaatatagctggtgtcttgaaattgaaaccagtgctccttttccatattaaaaatcctagggtctttaagagttatgctaaatctactgcatctgtgctctatcagtaaacagaaatgcctggatgacagtgcatctgtttacagcatggtttattgaatattttttagcctactgttaagatctactactcggaaaaaaagattcctttcaaaatattactgctcactgacaatgcacctggtcacccaaaagctctgacaatgatgtataaggagattagtgttgttttcatgcttgctaacacagcatccagactacagcctatggatcaaagagtcacttggactttcaagtcctattatttaaaaaatacatttcataaggctatagctgccacagatgatgattcctctgataggtctgggcaaagtaaattaaaaaccttctggaaaggagtcaccattctagatgccatgaagaacattcatgattaatggaaggagccaa

SEQ ID NO: 182516 - DNA, 480 bp, Homo Sapiens
  misc_feature (234)..(267): n is a, c, g, or t
  misc_feature (269)..(337): n is a, c, g, or t
ctgtagagatgaggtctcattatgttgcccgggctcttttgtagttttaacagagcattttatgtgattccattttctctcctctcttggcatgtcagttgtacttctttttttacttgttttcctggttgccttagagtttggaatatctatttataactaatccaagtctaatttcaaataaaatgagtagggcaagtatctttttttccctctgtataaaaatagaaatannnnnnnnnnnnnnnnnnnnnnnnnnnnnnnnnngnnnnnnnnnnnnnnnnnnnnnnnnnnnnnnnnnnnnnnnnnnnnnnnnnnnnnnnnnnnnnnnnnnnnngcaagtatcttataataatggaatattcctaattcctctcttccatccctcatatcatttctgttattcattttacttatacataagcatatataataaataatatatattcatttatgtgtgccccaacttttttgtacaaa

SEQ ID NO: 182517 - DNA, 915 bp, Homo Sapiens
cagaaatggtcagggcgaggtcagaggagcccagggcaggggactgctgtgttcataccaagcttgtaaaaaactatatgactccttaaaattatgtgtccttaaaaaaatgtttaagaacagaaaataacaaagaggtaaaatatgaattatctatccttcatatctcacttgagtactgatgttgaaagaagcatatttttttaatgaacatttcaattagccagtattttaccatgtaactttgttaaaattatattacactccaataagaatgcctttacctgtgacagtagttcttccttctctccagcaagttttcgtagccttacatctaaaacaaatgaaaaagatcataaactaaatatgtgatgatatagtacataaacaattaaaaatttttcaaactcataaacagctaatattatctgataaattacattacttacagctctgaatatctaaagaaataaaggtgttaatagcattacagaaaagttcttaactatctaaaaagtatttccacacaactgatatttatcagggcaccaaatccaacatttgttccccacagcagtgatttgccacttaaagacaaacagaagtacaaaggaggtcatttccttgtttcaagctttcactagtagacagacaactcaaatgtcaagtgtgttcctaaaggctgagcccttagcgggagagatccaaatatgtgaaagaagatggggtaagagcaggactgggcaaaggaagctagagaagagaaaagagaggagcataatgctggaagaagcaaagtccccaaaagctagtagggagggaaggggacccactccaagatgtgggcagccaggccaggtgtggtggctcacgcctgtaatcccaggtcttaatctcgtctcttcaaattaccaa

SEQ ID NO: 182518 - DNA, 365 bp, Homo Sapiens
gatattttcacatgttaaagattcaaaagaaatgtagcttctttacctttctgagaaagctacgggtgtatgtgttctaccaaaacaatgcagtaaatcatgaaatgagatgatacggaatccagaaaagagcgtgtccaagaaagaagaagggtaaaggaaagcccctgaatgatggttgtgaactacgcctagagtacaacccattcagatagaagctgaaggatgggggtgctacagaaggtgaagcaccaggaaaaaggatgatgggggaactgaatggctatatatggcttagagatcagtacaaattagttgaaagaaaactgataggtcggttcaagttattagcaatggatacgtag

SEQ ID NO: 182519 - DNA, 472 bp, Homo Sapiens
ttcagaatttaaaacacagaaataagtataattatttgttaatatgtacacaatatataatgtcctaatgagtgacaaaaataatatgaaatgggaaaaaaacctgggaaaattagtttttatatgaaatggaagttaaattgatgttgattcaatgtaaattgttataactctatgaagttgtatgtcatccagacagcaactacaaagataataactgtagaatacactcaagaggaaatgagaagggaatccaaatgtcatttaaaaaattacacaatctcacaaaatagtagtaatgacggatatgaaggacaaaagctatagacatggagaaaaacattaaaaatggcaaaagtaactcttttcccgtcactaatgacagtcatgtgtcatgtaatgcctggctatcttcttgagaagggctttgttaggtaactttttcattgtgcgaacatcatagtatatagat

SEQ ID NO: 182520 - DNA, 500 bp, Homo Sapiens
  misc_feature (303)..(343): n is a, c, g, or t
  misc_feature (396)..(438): n is a, c, g, or t
acaaaaaagttggcccaaagtgctgggattacaggcatgagccaccgcccctggcctgatttttgtttttaataataattttacttcatagaatacactatatttaaaagcttagtctgtcaacaagtagtaagtttttatgtagggtacctttattttggtagaagtcaagcagaatcctgttttccttcctcaggaaatttattttatattcctattaaaacaatatattatttgtacctgaatttatattatatacacgttcacacatggagagtactaaaggatctgtgggcatctatnnnnnnnnnnnnnnnnnnnnnnnnnnnnnnnnnnnnnnnnncatggaagatgcctgggctgtctttgctatatgtaaatagagccattggatcnnnnnnnnnnnnnnnnnnnnnnnnnnnnnnnnnnnnnnnnnnnaaggaactgtaatgaacaaatgtcaggatatccaatgccaaataaagatgttgtatttattt

SEQ ID NO: 182521 - DNA, 959 bp, Homo Sapiens
ttggctaagttattgggtgccttttcttcaggaatccctgaaagtgggggtttgcaattttccctggattgaaaacagaaatgcttcctacacaaacatgattgagaccttgtactctaggtgtaaaaaaacagtaggtcatactctgtgggttatggtcagagagatctggttagaagttcccaggtaggcgacagccctagatgtgtgacacttctaggagaatctctggctatgtggatacgtccaggtgtgtaaggcagcctcagggactgccaccacttggtcacatacatgtccctccaactaatcctagctctcaaggacaggcggttctggggcctgtgttgcccatgagacttggtccacggcaagcctgtgacggagtgaaagtgaggggacacccaatttgaaaactcggcaggaagccagactccatgacatacaaatagatcaaagtgaatcggctccgttgtttggggaaatacctgaggtttgttgtttcgtgccaagaagattaacaacacggacacacgtgggtgggttaaggagcagaaagtttaacaggcagaaaaaagagaacagctcccccatgcagagggaggaggactccgaatggatctccccattcctggcgggaagcagactgatatatagaggagggggtttgaagaggtggtatttgatttacatagagcccaagggatggtttgaccaggtgtgccatttacatagccctcgaagaaactggccattccaccttgatcttttattatgcagatagggttttttacttggccagagccttgacacctgcacacatggcaacaaacagaagggaggcgaaatcttcatatggatgcacctgtcttccggtgcagctgccggcatttatctgtgcaagcttctaccttgcttatttatgcttgcagcttgacttttcaggctgctttctgtgg

SEQ ID NO: 182522 - DNA, 866 bp, Homo Sapiens
ttggcgtccgtgttcaagcagcgagcccagatccacatgcgggaggtagacccgaggctacgacccccaccccacaccctgtccactgccttccacaggccccctcgcccagggggtcccttctgctccgtcccgtcatgccatagccacgcttgcctggcacgctctctcctcctctgcttggaacatctgtgcctctgcccacctggctaattctgactcacttcccaggtctcagcttagagacctcttcctccaggaagctctccttgcgcccccaggccccttcccatatttcctgttgccttgaggcagggacttgctccagcgtgcagagctgtgagtgggcatagaccgcttgccattcctccctggcaggcctcggggtggggggctggttgaggatgaggacccctcagcggcacccaggaaggggctgtggtcaccctgggggcttcacatgtccgcggtatgccctgcagcaaatggacaatgccgtgtatacgttcgagaccctcctgcaccaggagctggggaaggggcccaccaaggaggagctgtgcaagtccatccagcgggtcctggagcgggtgctgaaggtgagcggccccacgccctgccccggaccgtcctaggcgaggccgagccccgagcctcatccccggccaccaccaggattgctgtccctgcaaggaggcgccatggtcctcttgtgcggatgaggactcggaggcttgggtcagaccactggcctcgtcctaccctcagggccaatggagcccactgacctgcagacccccgacccccttgttccctgcagaaatacgactacgacagcagctctgtgcggaagaggttcttccggg

SEQ ID NO: 182523 - DNA, 949 bp, Homo Sapiens
ttgggttatgaagaaagtggtatatttaagaatgagttaaaagggaacaaaactttatttaaaattcctccaatttcttgtagaaaggcagggccgtggatatgtctggaaatgtagaaacctgtagctgcttctgggatcacccacctgatggtggtgacttgtctgctgaggccggctggaggggacgcttagagatggggcgagggggaggccagtgtctgttgtctgcgagcctctcctgccatctcttttgcagctgagggcacttggcacaaagcaagcacagacagcagagagggccaggcagtgctggagtgcgtttgctggcagggtttattgtgggagaggaatttgagtttaggatctgaatcttgtacataagaaatgaaaaggcttccctccaccccgcccccaaaatatgcccgtcctgtatccatgagagtgcatgtcggttctcagtgagggtcagagtgggggtgggggatgtaaggcctgggtccctttcagcggcctctagggcaggagcgtgcgtcttcttcccagtgcagtggtggtttgagtgctgtgggctctggtggggagggggctctgctcctcttcatttgctggtagctgggtcagggcactggcgcccagtgaggatgcccactagcattctgccccagttggttggtggggggacacctgaccactgagcctttggtaaccttattttttatagtaagtacttcttataattttctttttcacatcttattttataagaagtttaggaatatttttgcatggatcattgtaaacagcagattctttattcctgatgtctattaacatagaatgtttactgataagtactttaaattgcttcatgagcacttaatccatcttagtgtctatgtgtgggggcagacatttaccgcaagcacacagtttgtgccctttcttc

SEQ ID NO: 182524 - DNA, 754 bp, Homo Sapiens
  misc_feature (191)..(226): n is a, c, g, or t
  misc_feature (249)..(300): n is a, c, g, or t
  misc_feature (377)..(479): n is a, c, g, or t
agttgtagtgggttgtgatcataccactttactctagcttgggcaacagcaagagcaagaccctgtctcaaaccagtttgagtttgtccagaacccaaaatgatataaagttatttatttgaaatactatgtatatttgaatatatatttaaattcaaatatgtatttgaaacaaagtttgtgtgcctacnnnnnnnnnnnnnnnnnnnnnnnnnnnnnnnnnnnngagatggagtctggccctgtcannnnnnnnnnnnnnnnnnnnnnnnnnnnnnnnnnnnnnnnnnnnnnnnnnnntgggtttaagcgattttccttcttcagccccctgagtggctgggattatgggtgcccgccaccacacctggctaaannnnnnnnnnnnnnnnnnnnnnnnnnnnnnnnnnnnnnnnnnnnnnnnnnnnnnnnnnnnnnnnnnnnnnnnnnnnnnnnnnnnnnnnnnnnnnnnnnnnnnncacaggagtgagccaccgctcctgacccatatattttattaaaataagaacgtgtttgcccatttatgccctaaacaatgagtagaggtatattaagaacaaagttgactcaagaaatcaaatttgcttttcttttctttctgttcctgttttgttgtcactttgaaatatttttgttttgttttgaggtaggatttatttgcttactttattatcagagaaaggagcagatttatgtgaaatgttaaagtatgctgatcataattttattcttg

SEQ ID NO: 182525 - DNA, 919 bp, Homo Sapiens
ttggctgtgacttcagaaaggtcatatttctgctctgggtggcacctttcaaacttttaaactgatttagaatattaaagacatgaaagaatgaaagttttggtgtctatcaaatttagcaattaacacagtttttagttctgtttcaaggatattcttgcttgataaaatttaatgcagtaaagtacatggactgggaaaattaacccacttcaatattactaataatgtccctaaacaagctttcaattttttgtatttttaaaatgtgtagttacagcatgattcaaaactacttttcttagcgtctgtgtcatgctcctacagccttccctgaatgcattagctggtcccagggagatgtgagaattgtctggtgagggtgagaacagactgtggtgtcagactggaatctaaagacttcgtctatattagaagcagctgccagggcccgatcttgcaccagtaagaaaataatgggcaatagatcactagcattatttttttcagcagcacttttggtgagtacaggatgaacaactgttcttcaagcggtaatgaatgatggaattcatatgtaagtaatctgagtgcccatggcgctttccaattcattaccttcaccagaaattttcatggagggttagttacatacactgttggaaaaagctttaataaagagataagggacctgggtagtatgaataattggttcaagttttttgtttcattttgctctcaaaaccactagaagctacttattcaataaggacattttcagctttgaacatgaatgctttgaagaacacaggattttagaaaatgttactagcaagaggaaatgtcactaatttgaaagatttaacttttcagtattattcacttccacaggaacatacaagttatgcaattcatcatc

SEQ ID NO: 182526 - DNA, 913 bp, Homo Sapiens
ttgggttgggattacataggtgagccaccacgcccagcctgtatttagtagttcttatcaaagaaccatatgtacaaaggattgtacaacttttcccttctgggcctaaatagttattgactgatgaaaaggtgaattatatctgaataatgaaacaatattttcaggtttgaaggtatttgctttattttagaatacaatcccttaaaattatcaagttgctctttgataacaaatggaaaacattttctcatatttattgttccctaacaccaatttattccattggatttcttcatagtttatagtacccagcaaccttatagctgtagagagagactattctttcctcctggattgccaaatttttgtttattgacagaaaactggccaggcacagtggctcaccctcctttttacactgtcttgcttctggtgaagtttcccatagatatgccactggcattctccaattaacccagctgacaaagactgggaccaagtctgtttaatttgtcaaatatggccttattaaggtgactataaacaagaatccacaaagcaggaggaagctatttgtggcactgacctcaaatatgcctgtcagagtctcagaatcaactccttgaacaaattcaagaagccaccaaggcttcatttaagaagagtcagggagtgggatctttccttaagtttctgtactgaccttttccctcagtccaagacattaatgtaggcatgacagaatgtattaataattgtacagacccctccgccttgacccacaaggaagaagtttaaagcaattgtattacgtataacacacctggctactcagttgaggcaaatgcgaatacttcaagggcaaagctggtatcactgatcacttcagctaaagtcagggcaaatttgt

SEQ ID NO: 182527 - DNA, 504 bp, Homo Sapiens
aacaactgcaggaggtggcagcgtgctgcacccaggtgatgttttgaggaagatgatgtcattaattgaaacagtaagttttggaaatgttcttgtctggttgaaagttttgacaaacaggatgtcagataacaatttaagatcttcttaatatctctgtaagaattccaccataaggaattctgaaaatggacaaggccttcaaaagcccaattaaaacattccaacggaaatacctatctttaattagtctttggttttaaaattacacattccagtccagtcacaagaccataggtcaatcatggttcatgtgcacattaatcaagtaaggaacatacaacttcggattattaatgcttcagaaacctgccaggcctagtgatgctactccattaccttccaactagtttcagaatgatctgaggcaaaaacttgtataactgacctgatcgggggggtcagaagagaaagataagaaaaattaataacttaacaagccaa

SEQ ID NO: 182528 - DNA, 900 bp, Homo Sapiens
ttttcccacattcaactctgaggaaactggttcagaacagatgtgtaggaattcttatcttcctctatgattgacacgatgagtgtgatgagcttgggccagaaatccaggttccgaatgctgggcccttgttcctctggaggtagctcctgcttcagctggtactggcggctgtataagtcgtggcagttgttgaagatatattcatatgtggagttcaaacaggccttcacacaatcctttaccacctggctggctcttggagggctttgcagttcttgtacctgccaattaaaagaagaaatatgggcccaaggacctgctcacctgggtgggatattctcctagcactaccccaaacctactctagattctttcatccctgtctgggtccctagacttttccctgtgatgaaattgccaggatagttgacagggaaaacttccaccccatcctcatggatccatagtctatgtgctctctcagaagtaacccagggaacaggtacacagaaatgtaagcttagaggtgatgaatcctgtagcctcagactctgcccaatgattctcattcttcacgttcctgtagccaggtctccagcccagcaccacccaagccccagtccatttcttaccttcattctgaagaaagtaatgctggtcagcaaatccactgtggattttaagtcctgaagccgttcaggactcccagcagggaaattattctgttgcaaatcaagcaaatgtaagaaaggaacagaggactatgaaaaccttccctgccaaaagtgatgatatcaaaagcttccctaattgttacctactgggtttttctctagttgagctggccaaaaacactgtaaagttacaggtctccttctcttttttctattgatccaa

SEQ ID NO: 182529 - DNA, 670 bp, Homo Sapiens
aattgtgaccaattttattttagaactgcatttttgggtgttttatggtaatgtagattttattcaatacttatttttgcatattttttaaaaaattcccaaagcgatgcttttatacacatcttcccaatagtagtcaagtttggagatgatttatactgtagcctcaaggatgcaagaacaatgaagtaaaatcacaattctgggtaggtttttacagatatctgctaccaagacgagcaaaaagctcagggttttcagtccttttaaatagtttttcatctaacgcaagagaaataaactttggaaaagttcaattttgaacccctcctgtggcttttacataaaaaagctttatgcatttatgttgtaggactcaggcagttcatattagttgctgttttaggcactgctgtaagtactaaactacaacagactcaagaaatccactttttcaaatatgattattaaatggctctcaaaataacgttatggaagttacactgtcagaaggatggtgacttgacatgtgatgcactaaacatgcaggttttaaattctgccttgtcctaaacatcatataatcaaccaaagtgtagatttgataatggacctcaacaaggctcacatttgagaaatgaaataacagagccaacttttttgtacaaag

SEQ ID NO: 182530 - DNA, 918 bp, Homo Sapiens
ttgggtgagctccgctcgttgctccctggtagttgctcttctcttgaccttgaggactcctgccctgcacctgtgcactgcctggtgctcagccagagactcgagattcccttgggttcctagagctcgttctgtcggagtagccccctcctctctagtttctggccctcagattgcagccacctcagcctcctgagctccagccactgccttctccagtcagtgaggccactggccccagcaggtgtctggccattagtgggtgggtgtttgtaaagttttcatgaatttcttgaacaattgtgtgcaatgcagaaagttctcagagctgacttaaggtgagaggagcgtcctggcctcctctgtcaggcagatctgccctctgggtgcttgaggattttaagttctggcagtgccggccagcacaggcagcctgcaactcccagaaactgcattctgagtcctgctgtaggaacaagctgttctgctgagtgtcttctctgtgctggaatgctttgggggacaagggacatcatgataagacagacctactctcacagaatttctgtttaataggaaaagatacgaaatgttatcagatgagcaggcctgcagatcctagcacaacaaagggactaagggaagatggtgtcctggagctggcatgtttggggaggaatttgcatcgggtggttctttggcaaagatggtcaggaggtgacacgggactgagatctgaaccaggagactgaggcagccggtaggaaagtgcaagggggagcactccaggcagaggcaacggcaggagtgcagaggtcctggggcaggaaggcgtgggacgtgctctgggagcagcatgggggccggagggtgggagtgcagccgctgcggtcgggattctgcgtagaacgtgcgaca

SEQ ID NO: 182531 - DNA, 909 bp, Homo Sapiens
ttgggaaataaacatatgtgtttctggaggtttacaaattagaacagctttgtccaatttaaagatatttgtataagggagggattaattctgcaaataaacccttttaaatgcccaaagatagaatatatctttaccttttagccaaatacaaatggaagtttatactatctctccctctcccacctcctgggaagatttttcaaggttcctctacaattcataaagaaaacaagtttgacatatatttatcgactcagtctaaagcctgggaccagccagattcacaaggcccaggcccagggcattgtttctacactttagtgatcccagcagttcttcaaaatccagatccaaaaacaatactcactttggtgtatctccacccctgtgtcaatcagcttgccagtctttcagccaaactgaggttcccagaaccccccaaagctctgtccctttaattaatgcacttgtacacagagtctgttttcttttattccccaaggtaaaagattgccctattaacttattacaagtgataatacagttggtgtaattgtttcataacctattccggtccacttgttttgtttggaatgggactcctctccacactgatcttaaaagacaattcaccataattggggcaagtgaagaataagaatttttgcttattcttacatgcaaaaaatgaacacaacatttccccaacaaaaacacacctacacaagcacaggcacacacatgaacagacgcttcaaggctggtctgactcatcaacacctttttggttgtgagcatttggaatttagagtcaaaatccttcagattctccctatccatcctgggaaacctgacagaaccctttctgcagcaattaaaattactcttcaatggggaaattccaaa

SEQ ID NO: 182532 - DNA, 949 bp, Homo Sapiens
ttggcaaaggcagccacgtaccccaggcctgtcctctgtggcttggcccagcccttgggggccacctaaccacactaagtatgataggaccaccgagttgggaggaagcttagaaaccctctagttagtccagtcccttcacaacagagaagaccctggcccagagtggagacatgactgccctgacctgtatttgccctgagactaggctgagagaggagcctgggacgtgccacccagggtgtgagggcctgggcttcgttggcaccaggggcggccggtgctgcatggagctcccctctccaatgcctcatgggcattcactcagcagctcagttctccagaagagaaccttggggcccagtcccttccaagacaggtggctaggcccaaccttctgcactgcagagcagggggccactgccgtgtcagctcctaggatgactgagcaagtcagggcagctgcccaaggccatctggagctaaagctcatgaaggcaggtggagagaagcatctacctgccacgtggttcattgctatgcgaataagctaagagaggtgaggatttcctttggatacctgcctaagatctcaacagagatggcaacttaaaaatgaagtcgtgggtagccggcagatggatgggcagcctccccacactgacagcctccagtccctgctgggcacaggtctcagcatggcaaggcttgacactaaggtgctgctactgccctccagatgccagcactactcctggggcatgggagcgagggctctggggggcacacagagaggcttgtctccaagctgaaatagcacttggaggacatgggcttttagaactttccttgaattcttttaactatacttgattctcagcgctcactaccgtgcctccagcttcgggaagcacggtggccaggttagctcaaagacactgcgatgggg

SEQ ID NO: 182533 - DNA, 831 bp, Homo Sapiens
aagagggcctaagctaatgcagaagcaggaggaatctacctgcctttcaggctgtccgtgcccaactaatttcccttcttaccttgctttcctcttttctatgtcttgttatttttaatctctcaacttgaatacacaaactctaactccctggcatcttcctctggtgagacaggcccctatgtctacttctggagcctgatgatagtctgcatgatgccaggtttgcctgagctagggccaggggacgagtaaggcaggttgaagatctggttaatgtctgggacagggtgagaaattatagaaggctggcttctggtaagggctttctgttccaaaaagagcttatggagtcaaaatgacttttagaccctctagctaagaggggatatgtgtacttgcatgagtgtgcctgactgtgtgtgttttgatgttaatttttaggtgttggtacctctcatctcttacctggttgtggtgcttatgagggacttctcactctcctgatactgtatgcctgtgtcatgtgtcattcaagtttgagcctttggtatttgggaattattcctttaggaagcagagggaccaacttcacagtgcacatgactagctttcccagctgtgtaggctttgggctctggaaggccctcttagttcagttccacaaatttttattgagtgccttctctgggccaggcactgtgctagacagtacagtacccaagagcctctaaaggattctgatctcaaaggggagatgggaagataaaccaaaaatgccatttgtccatgagtatggaaaggactaaaagatggtcagcctacctgggg

SEQ ID NO: 182534 - DNA, 224 bp, Homo Sapiens
gtgcttcaccaaacctagagaatgaacaaagcgaaggacctggagttcaagaatggagggatccaactccaaggcaggaagcaggtccagaaagcaggcagggcagcagcaacagggaagaacagcttatctgatgactggctgggtgggaagcacaactgagaggacttgaaggactttggaagactaagttagctacaaagaaaactaagtattataccaaa

SEQ ID NO: 182535 - DNA, 868 bp, Homo Sapiens
ttgggagttgataaactatggcctttaggccaaattcagcctcccacctatttttgtaaataacagttttattgaaaaatatccacacccggctgggattacaggcgcctggcctgtttttatttgttttttaattaatagtctttatttcttaaagcagttttaggtttgcagaaacattgattgggaagtatggagagttcctatgtgctccctccgcccagcatatacagtgtcccccacaactgatgaaccaacgggacacagtattattaactaaataccatagtttacactagtgttcagtcttcatgttgtgaagttctatgggttttgacaaatgcataatgtcatgtatccactattacagtattatacagaatagtttcactgccctaagtatcacctgtggttcacctatttatccttcccaactcctaacccctggcaagcactgatctttttattatctccatagttttgccttttctagaatgtaatatagctgaaatcatatggtatgtagccctttcaaactggcttctttctcttagcaatatacctgtaaggttcctccatgtctttttgtggcttgcttgcttattttttattgctgaataatatcccattgcatagacatacacagtttatgtgtgcattcatctatggaaaaacatcttggttgcttctagttttggacagtaatgaacaaagctgctataaacattcatgtatagatttttgtgtggacataaatttccaactcatgaattaaatacctggagcataattgctggattgtatgggtaaagactacatttagctttgtaaagcctgggttttttgtttatttgttatgggtgggggg

SEQ ID NO: 182536 - DNA, 446 bp, Homo Sapiens
atgagccactgcgcccggccggagaggagtcctttacttagagtcaagctgaaggagcatcacaaccccaaagactgttatgttgtgaaatttaggctgtgttttaataatactgatgatgataagatgaaatagtaatttattgattactatatctactatatgtccgtaagatagcagggtctttatactcggaatctcatttgatcctcatagtttttattggttattattatcctcattttacagatacagaaactgaggcttcagagaggctgtgtaatcaagagtttgtatgcctttcatctgaggaggttgaggacaatcccaagttagaaaaataaatgtctttagcattatttttccttaatgtttagaatattaataagttactcagataatctattggaatttcttcatggcagggggaagaggctagagttgag

SEQ ID NO: 182537 - DNA, 926 bp, Homo Sapiens
taatttaagttgctgctaaatctcaaaagtcattaataaaatgtagtgatttctcaaatggtttatggtcagccactctaagaggtacttaatagaaaagaattagctcaaagctggtatccagatgatttatcaaaacaactatcaggtttaaagaaaatccccagggcagtaaaaacccagcattcaaaaaacaccaatgaagaaaaagactgttgctattcacaaaggtacagactgttagtgagtgaataaatggaagaataaatgaatgaagatcaaatgggttatttgctgctgaccacaaacttatgcttccctttcaaaaaaagtatttttaatcagatcctctgcttatatttgtgtcattgttaaactgtcttgtcatacttacataaccaggtaataataatctatgaaaatactcgactaaccaacccaaacgctttccctaaatcttaacatatgcactgactgcatttcgtgtggtcagagatgggccctgtcctgaattcacgctcgagttggggaacaaaactaaccaacaaggattaagtggtaacctctgagtatctactaaacagcatcagagttcctggagggttatgcccagggtaggctgcaagggtgctcaaagtgaacaagaacaggacaaaggcaaagcagaggaggcaccaaacgaaaagcactgcagctgttccagccatgaggcctgatggagaaaacaacatggcacatgttctgctcagcaaatccctacccgcctccaatacatacagcagcaccacctcctctaaaacattccctcattacctgatctttagacttatacaccacttctcgtttatgtgtgtatttatttatatgtttttcctccattggactgagagctctcaaagcacaagaatcaccttaatccatcccaa

SEQ ID NO: 182538 - DNA, 893 bp, Homo Sapiens
ttggctatcttggtcaggtactaaatcatattcaaaacatggcagttgctcaatacatttttactattttaaattgagttctaaatgatctatttgaactgtcaccccagccagaaacagatgttcagcgggacttcctgcctgtttgtccagcatgttttgtctctgagctgagcaggggagaaacctgactcagagccctttaaattaaacatgtatttaagtggcaaaagaattttcaattagagcctgggcaaaggagacgttaacatttgttgagtgcatactctgccagaacactgcagtgtgtttgcccttggaacagctgtgtagcaggaggctgcttctgacctattctgtattcttccctcccattgtttgcttaaggtaacatttatgtctgatatttgcttaatgtgcctttcaagtcgtttctgagcattgtaaagaggaaacggttcactgggtggcaatgccaggcactcaatcctgagtaactgacgtgttagtggtgctctttgaaaagtatgatgtacggttaagtgtcagactgtctggataatttgctgttaccatcagccaggtggctgtttaaatggttttagattgagcatgagtttcccataattttaggccttcctcaaatccatactcctaggagaagtggggatttttggcccatggcatgatgtccctgtgaacagcagcagaaatgtagatctgttttgtgagataagggactaaagtggttctttgagcccatgcttcatgttgaatggtagttaggactataacacgggtggctatataacttattgttaaaacagtggatgctcagcacaacagaatcctttgggactatttccaggcaaactgggaactcagctattaaa

SEQ ID NO: 182539 - DNA, 938 bp, Homo Sapiens
ttggaggaccttcatcacatggtggcaggagagagaagtgcaagcagaggaaatgccagatgcttatgaaaccatcagatctcatgagactcactccctgtcacaagaacagcactggggaaactgtccctatgatctgatcacctcccaccaggtctcttcctcaacacctgggggttacaattcaagataagatttgggtggagacacaaagcctaaccatatcaattgggtaattgattcatggccaagttggacttaatagcacaaccatctttccaaaatcaaaataaattgcataagaattatgtggtgtaaatctaaatatataactttttttatttgaaattcagcttaaaagtcatgtttatcatgctgtaaacataagattttaaataagaacccttaaatattataggtcttatacctgtatttatctcttatgtttcttattgcatggatttctctgttctactagatcagtgatcagcacactatggcttgtgctccacctaccacttgtttttatagataagttttattgaaacatagccatgcacattcatttatatattgggtattattgtctttgtactacaatggcagagttgaatagttgcaacagaaacttcatggccttcaaagcctataatagtcctcgtctggcccttcacagaaaaagtttgccaatccttgtaccaaattgtaagctccatgagagttttctgtattaatcacttgagtgcccctgcatctgcagaaatttctggcacgtggtgttgactctgtaggaagtttttgaagggaaaagtgaattgattacctttatatttctgtatcaaggaatacaatagtatatattcagttgccattaatggagatgagtttttcaaaaattaatatggattctgaatttctttatttttaaactattttga

SEQ ID NO: 182540 - DNA, 282 bp, Homo Sapiens
gataatagcagggagtattatgacattaatctgtttaatttttcagagctcctttgacagtacaatactttcttaggtaattaagattgatatttctacaatacttcgttgggtaattaagactgatattcctgacatcttcaggaccttttgcacttcttgttttctgtgtttagttcacttgtccttcattgttcatcccttaccttcttgggtctttacccacatgtcacttgagtgaggccttccctgaccttaccttaccttaaaagtagaactcaa

SEQ ID NO: 182541 - DNA, 928 bp, Homo Sapiens
ttggctgttctgctaactagaacattgtttctgccatgtataatattaaattttttaactttatgtccctatatgatgttggccaaagatttttattattttagaagtaattttaatgttagcattcttatttcattattcttagttcacattggcatcagtagtataaaacattagtcaatgctggaaatgaaaatattagttaacaccacatacagatgtgaacacctttccataactgaattggatttatttctttccaaactcatttatcatagattattgggacaattctaaataaaaatgattaaaactataatctctatgcaaaactagattttttcccctgtaatttgatagttctctatcttgatacccatctcctgagagccttaaagtgtgtctcctttgagacataatcagccattctcaaaaagtggaagaaactattctttttttagaagggatctgacaatgagaatcatgttctaggagagaaaagaatttgttaccagatgttatctcaaaagatgcactagttttaaattaaattgcatctatcttttaagtgttcaggaaaaacagtatgatatgctacagaggaccctgcattgggcaggggtgataaatttttttaacacatggccactggcttgccaattggttgagggtacatggctaaacctcttaatctatatccttgtataaaaagaggataagatttcatttgtattcaacagttatgtgcggtagtttcttgatttaaaaaatgcagcagcatcattctctgggacccttaaaatacactttaatttcagttgaacattgtgttgtatttgtgacacactatcttgtaattatgataaactcaatcatttataatgaactatataattcattaatactcattactcagtaaaatatgttg

SEQ ID NO: 182542 - DNA, 524 bp, Homo Sapiens
ttggaaactttttgctagtgcctaaggacactaaaaatcctttttcttctgtgaaagctctaatttcatagtagagtaagatacataaacagctgtttacattacagtgagctcctctattatacatcatttttcctacctgaggcattcctgtgctggtgattttatctatcgactatattggtggttcttaaccccattgtctaaatgaatagctggcttttttcccaagtatggaaatgtatctgggatttaagaaaaaaaagcctcataattaaatataactttggcccttgtgagattggctgtgttaatgtttatttctacaataaataggacctttgtgtgatgccaattaaacttcaaggttgaagatgggatattcatggtaattatgtttgtagtgaaaccagaagggatagggatacctgtattggacatagaaattttaaggtgtatgttcatcttgaggaaacacaatcaccaaaaatgctttataattaccgttcttgggagagagagtg

SEQ ID NO: 182543 - DNA, 353 bp, Homo Sapiens
  misc_feature (187)..(259): n is a, c, g, or t
ttggctcatcagctgagaaatagcctccattctttatttaaaaatatatacaagtgagaaaaaaatgacaaaaggatacaaaatgagactcagctcccttctttagtttcagaaatccctagagcaggtcacttggcagcttgctagggatgcaggttctggggccctgttggagggagagtggcannnnnnnnnnnnnnnnnnnnnnnnnnnnnnnnnnnnnnnnnnnnnnnnnnnnnnnnnnnnnnnnnnnnnnnnnactgttgagaagcatggagagaaggcagtggctttccaactcgagtgtgcatcagggtcacctggagggcttgttagaccgacagacgtgaacc

SEQ ID NO: 182544 - DNA, 886 bp, Homo Sapiens
ttggttttagtagagatgaggtctcactatgttgctcgggctgtagctttaatatttaaaattagctaatcttcagtggttttcctagtttcccctgccccacctgatccattctaagcatgttcttaggcctcacaggtcattcctaagtctggtatttttctgatatcacaatatttagttggggcttcttagcctgttagagttagttgtaacttggagatggctgggcttgagccccttgccttagagataaggaaattcagatagttgtgattttcttgtctgaggcaacatagctaattagaagcggagctgggaccaggactagggcttttcctatgccttctgtgtggtgcctgccctccctgccagctgacagatccaagaagggaacaagtaatggagtaattttctttcccatgtagcagttgaggcaacatttgccaactcgttagataacagtacctgatttgaatgccatctttatactcttatcaggaatccacaaatggatcagaaagaccccagacttcctgggagctctgaatgcaggaggagataacagttacacgtggcaaagtcttgccattaactatggatgttgtaactaattgtagttttgagtttgtgctgcttcctgtagtttgaggctgtcatcaccccgactccccaactcccatgtaaaatcatcaccttccctttagctgcctgtgtggtgctcatcattggcattcttaggtgagctgttgaatagttaatttggtttgctttgactcggaatgctaccggctctaaacattaaataaccctactggacaaatgttaatgaaaaaatgattttccttctgtacgtttatacctataagaatgagtagggttctcc

SEQ ID NO: 182545 - DNA, 883 bp, Homo Sapiens
ttggcactgtggcagcaagcagttcggccagactcccgctgagcccgctcctggaggggccctccccgactccggtcttgctttcctttaggctgtgggtcagagtctacacttcactaaacctgggatggaggcgtggaggacttgcttcgcggcgtttgcgtcctcgcaggcgcctcgcagggcttcctgccctcacggcgggggagtagctttggcgaaaatcagcacgagttctgcagtttttccaagcgcttttagggtgtaatcgtcccaggtttctaagccaaggcccggagagttgaccccctcgcaacagcttgtgtgtccttgcagcgccgcgggtgccacctggtctccgcctcagcgctgcctcggctccttcggttcccaccagcgggaacgaccgtccccactttcagcttaaactcatctgtccttctggatccagctcagaggtctctttgtgatgccctcctggaacttcccccctagtaatccttcctttgtattcccgtggctctttgataataatggttggagtcctgaacccgaccctttgtatcggaccgtgtttgtcatctccagtgctttatgaaggccttgaaagcaaggttcagccgtctgtattggtcatcttcccattgccagtgcctacgaagggcttgacccattcattgttagacgctcagtaagtgtgtattgaggcagccctctgtgccactccagggctctttccactaaatcatgagtatgttggtttaccagatggaatgagtagcctcttctttggatacataaacacccgatggatattgtgggtcactgtggagggagaatgaacgtatgggatccctgacctgtggttactggaaacagttga

SEQ ID NO: 182546 - DNA, 404 bp, Homo Sapiens
ctttgtacaaaaaagttggcagcttggctccatagtccatgttcctgtccattatattacactgggtgagactacctagggggagtgagtgtggactctgaaagaaactgacgtggggcactccagcagctagaagctgaagttgagatgaggaggagggtctaacaatggagactatgagggagtagccagagaggtagtgtgacagtcaggagaggcgggtgtcctgtaagatacgtgaagaaggtatttggagaaggaaggcatgtttggatttgacaagcattgctaagtggtcaagaaagacacaggccaacttgaccattggatttgactgtttgatgatggtcagtaaccttgatgagagtggtttcagtggatttgtgtgcattaaagccagactg

SEQ ID NO: 182547 - DNA, 591 bp, Homo Sapiens
atagatagatacatagatagaagaaaagaaatgctaaagtttgtggttgatgtcacaagatcagcagtgagctctggaagagatggcacttctgtggaagaccttagagtacagcgtttctccaaatgccatccatgggtcacttgtctcaactacctgtgagatttatccaaaatcaagttaccgggcctcatcctagaattagcacctctaaatacgagaggtggagctctggaatctgcgtttgaactagacattttccccttccccccacacagttccaacagtaattctgacatattacaattatgagtatgccttctcaaaacatggatctgcttggataaaaaatgatgacagctttcccaacaggacaataacaaaggcaaagatctgggagaagcatggtttgatgggaggtgcattaaggagatgggatctaattagaatgcagaggctattttggagagcagtggggaggaaggctcaaataaggatattaaagccaaaataggactgtacaaatcagaggagtttaaatttagtgaagaatagagccacgtattataagtcagaaagcctgatgaaaac

SEQ ID NO: 182548 - DNA, 479 bp, Homo Sapiens
tatcttcatttgtaatatgtccttcacatcttttgcccttttttattattttatttgttgatcttcttttatggagttgtcagagctctttattattctgtttaccagtcctttctcagatgtatgtattatagttatttttttcccagtctggcctgccttttaattttctcaatggtgtctttcaaagaacagaagtttttaatttttccgaagttcagtttatccatttttcttcatgtttatccactgtgtggtattaaagaagaaagcaatgtgtataagaatagctggttcttccgtaattaatgtttaataaccccattattctccgaatgcatctgtctttgcacacctgacctgctgttccaccaagaaagttccacaaacacttagcagcagccagcctaacctgtttttctccttgctttccacagggtgccatgactcccggaatccctatctttagtccaatgatg

SEQ ID NO: 182549 - DNA, 164 bp, Homo Sapiens
cccatggcacttttaaacaaggctggtgggaaaatcttactggaagacattttgggaatatgtattaggagctttaaaataaacattttctttgattcagtggtttcatttgtagggatttcctttaaggatatgacctgtaagatttagctataagaattatg

SEQ ID NO: 182550 - DNA, 953 bp, Homo Sapiens
ttggggattatgatcttctgtactgttattggttttgatgctcaaattgtcctagatttggcctgtaagagcctcttcaggcattctatgtctattttgagtagtttcagtagtttcttgctttctggcacaaaaaagatattctaagctcaccttgtactttctgcatcccagccctagataatcagtcatttctccaaggagccttggttctttttaagggaaagaagtatttagaagccaggatctgggtaaccagtgtgctcattaccattggggtgttgctacttccagatcctctcagtggatacttttacatttacctatattttctatgtttatttctatgtttaaatatattgaaaattgtgaattaatactgataactccagttccaactcaatacctcaggattcattctagttttctcactttcttttatagtgttctcttacagcaagaaacttggtttccattatccttgatacacatgctaaatgattggtcttctcttgtatgttgccaacctcccatctttgacactattttctccccttcatggatgtcctgtttttcctttttaagtgttgactccacattccagacacttccccttttttgatgtagtcacccttttctctccatgtgggctctcaagtaaatttacttgatgattttattttactaacataatcctcttgttttggtgtttttgctgccatacgtaaattgtaacattaaaggttccctaaaacaattgccctgctggtaggagagcaccaactagaatatctaaatgggagtaattgaacattagaactgaaaaataacatttcctgggatcatcctgggtcaataatttgtattctgcaagtgatcacaggactagaattggttttttgacaagaaattgggatttaatgggctatctctagaaagtctcattagagatt

SEQ ID NO: 182551 - DNA, 1399 bp, Homo Sapiens
ttggtgcagatcctgccttactaaactgtttgaagcaaaaaaacaccgtggtcaggtaccctagaaaaagaaatagtttgatagagcttcctgatgactatagctgcctcctgaatcaagcttctcatttcaggtgcccacggtctgcagatgatgagcgaaagcatcctgtcctctgccttttctgtggggctatactatgttctcagaacatttgctgccaggaaattgtgaacggggaagaggttggagcttgcatttttcacgcacttcactgtggagccggagtctgcattttcctaaaaatcagagaatgccgagtggtcctggttgaaggtaaagccagaggctgtgcctatccagctccttacttggatgaatatggagaaacagaccctggcctgaagaggggcaacccccttcatttatctcgtgagcggtatcggaagctccatttggtctggcaacaacactgcattatagaagagattgctaggagccaagagactaatcagatgttatttggattcaactggcagttactgtgagctccaactctgcctcaagacaatcacaaatgacgacagtagtaaaggctgattcaaaattatggaaaactttctgagggctgggaaagtattggagggtcttttgctccatgtccaggttcacttacatcaataaaatatttcttaatggagtattgctttcaattagcaaacatatgcttcacaggaaaaaaggacatagatcaatctgttttatgtgctagtatttccaggaatttattccccttcataatttgtctcatttcattttatttcatccacttggtagatgaagtcacgtcaaacagttgtagacattttatgtgttggttaactcttctgcaattttgtatttggtgttttccccccaagtttagttcaactgacattggatcactgacaaaattctaataatctgtgatagtcttccttgcagttaaagaagaattgcagaaaccatgcaatatacttgggaaagattccaaaaataaattttttattatttctcttttaaggaaatacccctaatgtgccacctgctgctatcaccacaaattaaactcaatctctatgtggacagaggatgatttctgccaatatggaaaagcttttttctcactgtaggcctcaagaaaagttagggtaatgtatttgttattcattcctgacggtacaaagagcttgcagttctcacctctgactaccagtagctttgttgagttttgaaataatacttgacattttccaaaggcaaatctcattctgcaaggagattgtggcaccatcctgtttgactctcagaaacctcttgtaattctgatgtaaaaactgtagaatgaagatgagaaaat

SEQ ID NO: 182552 - DNA, 1011 bp, Homo Sapiens
actttgtacaaaaaagttgggttttgaaataatacttgacattttccaaaggcaaatctcattctgcaaggagattgtggcaccatcctgtttgactctcagaaacctcttgtaattctgatgtaaaaactgtagaatgaagatgagaaaattctcgcaatgagtggatcatgacaactgtaaattagaacaatcagatttaaaccaattccgcagtcttctatatctttgtaaaagacaaatccttgatgttgtctgtgtgcaaccttttcataaactctggttttatgactagtacaaaccaccaaaaaagccatgtgatcaatagtctgtgtcctgttataacatgctgtggttgagccatcttgtttataaataatagagctctcctgaatttgtgcatagacttcttggttcctggcttttgtttttttgtatcaagagattgtgatataaaacagcagaagataaatggaaaccttccattttaacttacgttgtttctggggtaatgttagaaccttgaaagatgcattcaaagactgtatcttattttgcccttggctattagtgtctcacatatgtgtgtaaatgttttcctaccttctttttgctcagcaaaggcaagcaagtaaaatatatttgctaagtgattagtgatgcacatttggggctagatttttttggtacttttatgtaaagaaaagtggattttgcagtaagggattggcatgagcaggcgtcagatcacaatcatgattttctacttgaataattacaattcagaagtatctggataaatagatacatgtctagtgaacaatttgtaacaataacaggtaaggatcagaaattcagtattcagtttgtcagatttgccagaatgatgaaagtatttgaacatgtgtgtttgtttcttatatattgtattgagtggaattgtttgactgggaaatctgggctagaataggaaacaaagatactgaacttctaccctaataaatgggcccc

SEQ ID NO: 182553 - DNA, 875 bp, Homo Sapiens
gacaccacactcctgccattagcatcttttatgactaaaaagcatgatttgccaggaaatttaattttacagaaactcaccaggaatatctggtggattaaggttttatttttaattgatttttgtaataatcacccatactttgacctttctgcactatgttacttgtctctggacaagtagaattctggacttacttggaatataactagtagatagaacctacaaatagcctgatttctgatttttttctttagagtataggtcaaaaaatgattacaaattggcaattttgtatagataaacccaatattcatttatatatcttaagctatcaggtatattgtgatcatatgaacaattgcaaatataactccaggacccttctcattgatctttccaagatattgtggccctatgtggttaaagcactattaagcagcagacatacagtgtatacttgatgtgtttcacacatttgctcatttaatcttttcagctacccctttatgggtcattatttttattttatagatgaggaaataggtacagagataaatttgcacgggtcacctagttgtaaatgaaaaattatagctaaaatgtgtaaaattattaagaaccactttatttctaatgcataaaaatttgttttcttatagattgtattaacaaaaattgacaaatcttccaagggacatcttttaaaacaagtgcttcagatccagaaatttgttaacatgaaactcaaggatgttttcctcagttgtttcctgtaagtgctgtgaccttttctggaatccacctgttgagatgctttatagccagtgtaacagaagtcttgactaatggtttcctgctttagctgaagattc

SEQ ID NO: 182554 - DNA, 106 bp, Homo Sapiens
aggaacagtctggtcccttttaagggactgcttaatgaggtaaggtccacccaggtcaatctccatttctaaacgacagctgtgccataacctacctgtgggagtg

SEQ ID NO: 182555 - DNA, 1150 bp, Homo Sapiens
ttggctttgttcctgagtctcatgaatattttccagctcctttgtcctaaatttctacctgacaatcatccatttcaaggaataaaaggatataataagtgataaatctgtgctggaaatttttaatctaaaaagttcacatactatttctaataaactgaaaactattagagaaagatggaggtattaaaacctattaataaggaaatcaatggcgacatattttaaatggttttgaattttataaagattttcttttatagcactatgtcctttttcttttcttctccttgtttgatttccaacagctgagctatttacttgttgagttatttcatatctattattccatttagaccttgaaccctgtgagggcagggactaactttattcctagtgcctgtcacatgatttgaactaaataagtatatttttccagcctgcactactacttacaataaggagtttcttatatttacttgaaaatgttttcaaccttctagggatgacctctactattattattccattattgacctttctatgcttattattgacctttcatcttattattctgatttagtaagcagattttatgtatccttgtccataccattcaaggctatctagatttcaattgtatcttcagatttttaccttccaccttgatgagtcccaatgtgaaccctccaaagcaggttcctactgcactcatcagtttctttggttgagggatagtggccactatgtccttctcaggatgttggagacatgatgaaataaagacggtgatattagccccctaacggtaatcactcatgctgctcccacccatgtctacccactggaacagggagtggtggcattggggtggtacagggcttgccgaggatgttggcttatagctgtatctccaaacatccagagcatgtcttctttttcacctctcctttagaatctgcttcctcgaaccatccctttaagtgcaggaagaaagctatttttaatatgaaaattactgttccagttatctcatggtggaaattcttaatgggctcttactttgggcatctgtctggctctcagtgccagtaactttcttttcttcttatctttgttttgttttgttttaaagatggggtctccgtca

SEQ ID NO: 182556 - DNA, 986 bp, Homo Sapiens
aaaaatgctcaaaggcacaagtcactaaggaagaagtgtggatgggattcaggcatggtgatatttgtgtgaaagggaggaatctccaacctgctctgccctcctctgccttcagagggaaaatggaagagagaagatggaagaaaagcttttgacttcctggagggtgctttgctctacctcagcctccccatctgactgcagctccccacgggttgccacccttgcagggaagaggtgtggcccagggtgcgtgaataggatagaaaatctctgcctgcctggagagggagggacggagggacggggacagcctaggggctgcagggacccgctgcagaacaaacgcccacagcagctcatgtgggaccacagtgacccctgctggagatgctggtagctgcgggtctgcggggcctcggatggacaggaggggcctgggctggtggggcaggtaagggtggaagaggctgagaaaggcagtgccaacccccaccaggcactgaggggcagggagatgaccccataccagtgctgcccgtgcgtccatctgtgtaagcctgctctcaagtctagtgcagctctgggtggtgtgttcaagattctgggaccagactgcctggattcaagtccgggccccaccacatcccagctatgtgaccctggactaatcacttaccttctctgagcctcaggttcctccactgtaaaataggcataatatctgcagctacctcggagtgaattaagtgagctggtatttgtaaatccctgagaaaaatgctggacacatacaaagtgctatttaggtcttggttctgtaaacaaaatgttcttaaaagctcatgcataccagcccttgactttgaatataagtagctgtgttctaagagggtgaaaatacttgcaattactgaccaatttaatgactgacttttccccaccccctaaatttaagaaagctgggccaacttttttgtacaaag

SEQ ID NO: 182557 - DNA, 879 bp, Homo Sapiens
aaaggagaagtgagactaaattcctttcccatactagaaggtgactgccccccgcctttaggaaaggggccacatttggtccagctttgcaggctcgggcccatcacacagcaggcaaaagtaggtgttgatccttgtttgactttccaaccctgttgagtagccaggcattcctctgaaaggatatggctccataactctgcatcctgcagtgtctgggcataaggctttctgtgccatgggtctgtaaacagaaagggcagagagctaaaaatcaagagtcctgagggccggctccaattctgtcatggccagactgagcaaccgaatactgactgctcaatctcatagttgaaaaccaggctgaggccctgatctccctcttccatgctatacccctaaacaatgcttatgatgaaagcaagatccacagaaaagaaatggaagccatcagctgggctacaactcccttcaacagccaagaacatacaataaaatggctttcacagggttccaagagccctgtggtagggttcgtcaattgccatggccaggtctgaacctatgagggccagtttaatgtccaggtcatggccatagcactcagtaggctgaacctgggaaagctttattgtgcctaaagccctgtaaaggccacgtaacagtcaccatccatccccaacagccaggaccaggggtaggtgcctgaaccaaaggcatataatccaaagggtgaccaactctttttggcgtgaaatactaccagaccaaactgattctctcattgcaatctggtctctgatctgagaaacacttgagagaagaaaggagttaaagaggagctgacaggtcatgatatggaggagcccagagagccaa

SEQ ID NO: 182558 - DNA, 756 bp, Homo Sapiens
actttgtacaaaaaagttgggtgtttatagatggtcttcagtctgtattttgttatttgtatgatgcttttacaacttgcttttgaaggttgggggtggcgtatgtccctgatcaccactcaagtggtaagcccttcaagagcaaagacccagtcattttttcctgttcttttttccccacagaagtcagaatagaggtctcttgaggtgctcagtaattatttgtagactgagtaattctgtctatgtcaggaactttgggagtttggtgtagagaactggaagcacaggtagacactttgctcacatcaacctaacttatcctcattgcttatccaccatgcgtagagcagggtttgtgggaatcatcactgtgtgtagatgtttataggttccctcccaaattcaggtgctatgctgtacggtgaggttacaaagaggcattagatggaccctgcactcaggatgtcctaaaatgatttgtttaagcaatataagatgatttatgttaatggatgtccaagctgcctttacaatgttgccatcttgttaggaagtcacaaccaactcagataaaacattgagcaaacaatggaagattgatagtaattaagtgagagtgagtaagggtaaatagatcttgtgtgttgggaatagttagggaagtgattagtggagattagagggaggtttattggaggagcatgaagacctacgtctgtcttgaaagattaggtagaggctgcagtgagcgga

SEQ ID NO: 182559 - DNA, 442 bp, Homo Sapiens
ttggctgtcttgccagtagctggcaaagcagtttttataagacatatttaatgtttacaaccacttggaggctggggaaggagtaatactttgaaaatatgtttaatgttgtgaaccactctgtggccgagaagcaactccggctaaaatatatttaatgcttagagtcatttggcggtttcgaaaaaaagaaacttcttgttaatttttaacatttattgctgatcagtggctgctaaagtaactatcagtacagcatgatttatatttagggacacgctgtgctgctactaaaacaattcatactcttctctcaaggctacacaaaaagtgtcaatagcattacctttgcaattgcaccactaataaaaacataggaatcaaacagacgaataaaatgctccctgcccccagagcaataaagtcagctggctttctcacc

SEQ ID NO: 182560 - DNA, 468 bp, Homo Sapiens
attttatgcacacttaattaagtaaccccattagatccatcagaacattatatgaacatatacaatgtctacacccaatacgtccctatttcaacccagacttgttttctgttctctactcttgaaatgctaatgaccttcatgaccagagtccgctattgcagtttgtggttgacaggcatctctcactcactgtgctgcaactcaactctttatcttcaaccaaacagggcctccccgcagctttcccactgccactcagtggcactccatccagggtttccaaagtgtaagaccccggaatttatctttgacacttccatctccctccacccctcatccaattcatcactagctataacctgcgatttctatttcatatacatcaacttctctccacctccactgttcctattctagtgtccaagcctccgcatctatcaccctggctacctggcagacttcttc

SEQ ID NO: 182561 - DNA, 939 bp, Homo Sapiens
ttggcagcctgaaaaagaggaaggtgcctcttccaagttgaggcagcagggtgaagctggcaaagggtatggtggggttggaaggggaatgggcagaaccttcagagcctgagggctcctatccaggccccagggagaagcactaggatgtctgactgaggaggctgggctggagaaccagtgggactggccagctcctttggtttgggctgggctggcccctgacctctatcctcagaaactgacctggtcatctgtggtaagaagttccctcttttgcagcagaaagaacctttcaagaaaaggtggttcgccctggattgccatgagcggaggctgctctattacaagaacccactggatgccttcgagcagggccaggtttttcttgggaacaaggagcagggatatgaagcctacgaagacctgcccaagggcatccgaggaaatcgctggaaagccggactcaccattgtcaccccagagcggagatttgtcctcacttgccccagtgagaaggaacagcaggaatggctggaaagtttgcggggtgtcctgtccagccccttgacgcccctcaaccggcttagtaagaagcaggaactgaggggtgttcttttggacaagggcagaggacagaaaattgcttcttcacttaggttcagctttgataccacaaaagattcctgattcctgactatgctcttttcattgtcttctcttcctgcaaaagaaaagcacagacatgccattattgccaaaaggtctcctctgtccactctgggttcccctaaccgagcccttccccaggagcttttagaggagtttggccctggcagaaccctgggtgctgtctgtacccctttgcggtgtgggggctaagcagcttctctttccctccaaccgtgctctatgctgatcatttttctcgtgagaaaa

SEQ ID NO: 182562 - DNA, 674 bp, Homo Sapiens
  misc_feature (610)..(622): n is a, c, g, or t
tttgtacaaaaaagttggaaagttagatgattttacaaaattcaacaaaaaagctttaaaagctgtaaattagagatataaattataggttacctgttaaaaaagacttccttttcaaggaagtattaatagaagacacaactcaaaataatactgccttgatcttgtaaggccttgaggtaattgtgaatccccttgatagaaaaggtaagaagcaaagcaaattgggtggattttatatttaagcaatctagagatttataatatctattacgtgcatatacatgtgtgaagacaacatagtaaggtgtgttgttttatagttttctgtgtcctacttaaattggcttgcagtagaattatagttaaattgatgcagggcaggtaagccccaaaattgggcttagaccgggaaggttcttggctttgctcaggaaagaattcaagagtgagtgctgggattacaggcatgaggtgcgcccagccttagaatttcttttttagtatgattatcccctagcttatttgaattactattttaataaacacgttctggaaatcttaattattaataactttgattgtattaggcatgaaaagttaggcagannnnnnnnnnnnnaaaaaaaactttgtaattgtggttttacttatattgcctctattcagtagga

SEQ ID NO: 182563 - DNA, 255 bp, Homo Sapiens
tacaaaaaagttggtgcttaatgatttcctagtatggactaccatgatctacttaatccttaccaacataggttgtttccagtttttagtttttaacaatgcaataaatctatcaaattcctggggaagacaaaagcagattaataaactgagatagaaaaaataagctagtagtttacatgtttaagaatttttggttgtatattaaaagatcaagtgaatagtcactggcctctaaaatatttagaaatctcc

SEQ ID NO: 182564 - DNA, 895 bp, Homo Sapiens
ctttgtacaaaaaagttggggacgatggttttcgatggtacaacacaggacagtctagtaacagtacagttcaaagggaacgttacttatagacgtgttgtttgaacaacgtgactagcaataaacgaatcataaaacatttcgcagcagttcaccctcagtgaggaaactcatcagactatacaaactgtatgtataattatattgtaaaatatcactaccagagaatcccaaaatataaactcaccttataaacctatgtaattaacggtatggtaatgctttgatttacatagtttccattgctccaaataatccataagtatcctgaacgatatattaatataattaagtcttcgaacatctttgccttgttacctttgcagagcagccccaggcttcaagaaatgagcgatgttgtttcttggagagtatttggaatcctcgggctccatactgcctatcctgtactttagggtcttgccattagttactatttgttcctagggatgaagaaacacaccaggcatttgaatgttgaattcttttcccaaattagtttttacttctgtaagccacagcttattcatctttcttcacatggttagtgcctggcactggcactcacgctgtctctccccatcttcctgtctatatttgtagatatatttttaaactgaaagtcgtgagagatttttgggtgtataacttgctgagtctgaggtagtctgattttcgtagccagcttgttattcgcagtattggtgggcagtgcagatataaaggtataaagaccaaggactgcgtagaagagatggtcccacaagattatagtacatatttttattgtatcctttctatgtttaggtatgcttagatacacaaatacttacca

SEQ ID NO: 182565 - DNA, 673 bp, Homo Sapiens
ctttgtacaaaaaagttggctcaggcacagcagggcctcttgactgcttctcaggtgtgtgttcaagaagaaatatgcacttagcttctgctccattgaggaaagcagagcaggacagggctccctcttcccaaccccagaagaagtagccattcttttgttttgttggcctacttgtattcagttatgggcatagcaggagtagtgttcagaatttaaaaatcatgtttggtctaagctctaggtcatattttctaatctagctttcacccgagagccctatcctctggtggttattggagaattgcttagccattagttgagtacagacctgaactttacttgggtaactgtcccaaggagcactgtcctctgagtgttctttattgaccagaacttttgaaggggaggggtgtgttcacccttgggtcccaacaccactatccaaatgatgccaatacaaaagattactgtttatatgatcctcttcaaagacacttttcacaatttcctcttgttcttgggcagtcatgtatgaagccctgggtttggagtataaagccctgagcactgagagagcaatctaatgtgagtcagggaacacggggttaggttccagcattaggaagaaaagcaagtctgcagcctcaggtcagtaataatctttgggcct

SEQ ID NO: 182566 - DNA, 893 bp, Homo Sapiens
ttggctcaaacatagtaggattacactattactcagaaacattttctatgagacgtctttctcttgattatgctctttgaatcctaaacttgcagcgttctgcagcttttgttttctaaagcctaggtgtactctgccagtcacaaaatggcgtttctccagcactgccgccaggtaccaccagctgggagttgttcctcttgcggagcaggaggtggacttggcccaagagaaactggatagtggttcgcaaggaacataatttagcattgccaagagctaatgcaatcattttgaaaatctcaaaacactgaaaagtggattgtgacctttttaaattcacaagagacaggccacattctatcttttgattggtttaggctattttcttgaacagccatttagaaagcagatctatcatccttcatttgcatggagcgttcccattttatttgaaaccagtttaacccaatagaaaaaagggaggcagaacccattatttaaagtggaaactcctgaatcagataattaggagtatttccttttcaaaagttgcgttttttcagatacctcgcttattacactaagaaaggtttatatctttcacaaagggtttacttacaaaaatcttccaattttgtatacctgtgtttcataactgactagccgtcaaaccaagatgtagagtttccaaccgttattttccaaatttttagaaattacgtgaaatatttgaatgcatgccttctcaataaaatgggacgtagaagcactggtgcagaagatgggtacaatacttatctgggaccactccattatttggttggcacgttgtttgaagaaaaggggaaaagctcagttacttagcatggttcggacttatttgaaaacta

SEQ ID NO: 182567 - DNA, 579 bp, Homo Sapiens
aaaaaagttggctcaaccccaagcagttcatgaccatgtttcgtgagtgccccacagggcaggggtggggtcggaggtcctcctcatggttctcagaggtgacacgagaggcggccagggtctcgctcctccctctctttccttctccagccagtggggttggtgggacccagcaagcatcgccttctcctgctccataagtgtgtgaaccaggaaggaagcctctggtgctatttggggagcaggaagcatggagggggtgtccagggcggggtgacctccccgactccagcagatgtagccttcaccctccaggagggaggttgggcacacagttccagaacacgggggactccgcggccttccagaaagagaggctttccagagtaagctggagaacttccctgggtagaaaggagcaggcaggcagtgggaacagatgcagtaaagagggatgtgggaagaactggaaggttctggaaatgcaggagtgggcttggcttccagggctccaggcaaggaacgtgagtggagctgggcttcagctatttgtttgtttgttttttgagacaggatctc

SEQ ID NO: 182568 - DNA, 797 bp, Homo Sapiens
ttggctggcttgcttttccttggaattaacatctacttgtcagttttcttcagagtctgctgaagaaagaaggagagggaaatagaggaagatgacagggttaatgtgaataaaagcagtgattaggccttatgtttggatcaaagaactgaaggagagaggaattacatcccaggtgttttaagcttaaaaaactctttaatgaaatgggtgcaagtaagatacataggagaagaatttaaaaagtacatctgtagttacttcttcattagtgaatcttttgagtaaagtggttcttgagtgttctggaacttgacatgtgtcagtatagattttctcaaggtgttttctctccttactctgccagggtacagtgccatctcctactctgaacctgtccatttctgtactgcagaggtcccttgctttatttttgcttctgtatttgatactattttagttggtgtgctctaataatttctatccagaattctccctatctctgtctgtaggtctaatgtatcatggtgcttgttgtattacaattctgaagtttatggtcacaaagtatctgaaacacaccccttccatttaattcaagtattacaataaattaaactaaaatttctgggatttttgtagttactagtaaaaattttggtttcttttgacttaattttattcttccaaacatgtattctattgtttgtagtttattagaagtataaaagtataaaaaatagtctttagttgtcagattttatagctgtaatttgttttctttatgcatctcaaag

SEQ ID NO: 182569 - DNA, 899 bp, Homo Sapiens
caaaaggtaaattaaaagaatattttaaataaacccaacaaaagataacacaaataaactactctaacattaatacttaaagttttcctatattaataagtgagtaaattagccttcagttcaagtcagtgaaactgaatatgccagatgtgttctgaatcatgacaaaagaagcatgtctaatgaataagaaaattttaaataacttcatcataattatattatgaaatattatacaatctttaaaatggatgttttcaaagatccatttatttaataatgtggtaaaattatcacaatacaatgctaagaaagcaagatactattcatctgagttgaacaaattgctaaacaaattagaaggctagacactatgctaggtgttggaattacaacatgaataagacgaacacagttcccatgggaaagagacaggaaagaagcaaacagaaaataaaataattgaagatttcaaacaaagcaagaggtagagaggaagctattttacataaagtgataaggaaaagcaaaagcttctctgagaaaatgacatttaagctgagaaggccctagtcatacaaagaataaagtgaagagaatttccaataaaagaaatagtgtatgcaaaggacgtgcctgcttaaggaactgagagatgaccaaagtaggtagtaatgagcaaggaaaaaaatggtaacaaattaggtcagagatgtgagcataaaggatgatctcaaatttgttttttaatgtgttaccccacacacatatacacacaccatactgaagggacggagaacacaatgataacagtgatattctagatggtaggaaaaggagttggggttattttcccttaatatttccacatgctccaaaataggctgcataaacaccaa

SEQ ID NO: 182570 - DNA, 920 bp, Homo Sapiens
ttggggttcgctttgggaggaaaggatggtaggcatgttcttgttcatagctgtatccacccagccttgagcagggggcccaacatacacaagccctcaggaaggacttatggagtgatggactctgcagtatgtgcttggggtaggggaactgagaggctggtaaggccacccagaaccgggtcggaaaggccttgtcacctggggctgggaaacagacttctccccagggtctggggtgaacttccggcctagcagctcctgggcagatgagggtttcagggagtttcctcctgcagcagccacgtggctctggctggcagggctcttctctgctcaccccaggatctgtgaggatggcgcacctgctgggcagccaggcctgcatggagagcctgcgcgcagacctcaccgacctgcagggtgccatcgtagacgtcttctcccgcgccgggcctgtgcgcttcccctcctggaagttccctgaccgcatggcctgtgacctcgacatggtggccctgctggagcactatgaccatgttccgggtgaccccgagttcacgcagctgtcccatgccgtgctgctggagctggtcatcgacaggtgagggccttgaccaagcctggtcatctcaggatgccagcacctgcccctgaaaccagtggcagctacggaagcccctccagaggcaggggtgatgttggaacaacagtcaccattgagtacctgtcggggccacatcagctcaagactttcaaagtggtcttaccttttatcatgtgtcttgtgttgtgtgctgtgctatcctgtgttaggctctcctagcctgtccacctcaggcagttgatttccattccatcggtctctgtggcaccacagctgtgaccacggtctctcagcctcttccagctgcctcctc

SEQ ID NO: 182571 - DNA, 887 bp, Homo Sapiens
gttatagacaagaaagggacaagtaggcaggcaagaattttgtcacttaaagtgaacaaaacaggtagtgtccggttagcagcagtagtgtaaaatgctttgtataagataaaccttaagaaaatttcttagtcctttgatactatataaacaatgatgtaattctgtcctgggaagaggctggcactgtgtgatgaccttactctgcaaactagattgaggtacttaatatgtaaaagtaaagtcttatattaaagcttgattacctagctatccactcacctctggtagcatatgtgattgtgcgttcctttggcatatgtaccaatatcagctgtgtgataagcaaaccccaaaggcacagatattctagctatcactataactgtgtttcttgtggagaatcaaccaaaacccaattttgctttcagcctgtgattcagagtggtgatgtcattttctttataattgtgcttagcaagaagagtccctgtggaacgcagaatagccctagtgaaatgacttttgcctggcatctgcccaggggccctttctcagatggaaggggcatcggtagctggaaatcagcctctacagccacactagactggaggtggtcatcaccctctcacctttcttactttctattttgctaagtgatggcacatctttttgcgtagggattagtcatcaaagacattcctagtctcagagtaaaagctacctgtatgagggaagtgagggcacctttgggtgttctatgagcagggcctgagacaagaatgggtcagaagaggttgagaggggaaatgaatgtagaactgtgttgggatgtggttttcatgtcttcattgaatacaaaaaggtagctaataccaaaggccatc

SEQ ID NO: 182572 - DNA, 602 bp, Homo Sapiens
cacacccagcccattaaatgataaatgtgttgtcataagcaatatagaggcatagagaggagccctgttccccatctgggacccccctgtctccttaactagccagtgctcatattttttaagtcctagttttcccgctagtcagcagtagagtgtgggcatctttctgtgtcccaccgactgcgagctggagacagcagtggtacctctctcgggggggttctgaggatcgaatgaggtcatgtctgtgaagcacctggcccatgagtgctacgtaatgtttgttaaataaacatacgaccttctgaggtctttctggggtaggcaaccgtttaccaccctacagggtgtgcctcggtcagcttttcacggtgagataggtcttcgcccttttttcatctgaaatgtaaccggttttctatcttctgtttctcttctatttgaggagcagaagggggcctgagcattcattgtttgttttcccagaccagtgaagttttcgtttgaatactgttgttcagtgtcgcacagtaaaatgaatcttactggtattttttgtcatgacttgccagcctctgtccacccaacgttggatttttgcc

SEQ ID NO: 182573 - DNA, 195 bp, Homo Sapiens
ccccataatgccaactttgtacaaaaaagttggattgatcactaattgtacatttgtttctaaaagtatatgaacaatgcctcaggaatgtaacaaagttatagcttaagagctccactgacaaaaatttacaggatatgttactactttaccttggctcctccgctgcattgtatatgctggcaaagtgcttat

SEQ ID NO: 182574 - DNA, 2518 bp, Homo Sapiens
  misc_feature (2130)..(2179): n is a, c, g, or t
ctaataaacaactttgtacaaaaaagttggatcagtttatatgttgtaaagcactttcacacatattatttaattttctcaaacaccctgtgattcattttcattcatttttatagatgagtaaactgaaattcatagaacttaagaaatttgcctgaggtcaacacaataagtgatgaatctaatattctacttttggatttctattatgcttcactgcttattcacctataccacagactgtgaatcatatgtgttgagaatgttactagatgaaaatatgggacagtcaatgaaatctaagtgtaggttaggtcgggtataccgattccttcttattttttaaagtctctgtatgatagtatcttacagttcttaggaagatgggtggatgagttttggagaatctcctcagccaattctgttattaaaagttgtgccatggaaaactggagcccagtcttaatagagtaattgtaagctctgttccagagaattaggcttggattgttagaaaaaggtcttaaagctgttttttttggagaatgagacaatgtaacaataatattggtcatttttgataaagcttaagtgtgggtaaccatttagcttttcatttcttttttttaataattgacagcaatcgtgtgaaataagccaaataccattcattatccttagttttgagaggtctaatccaaggcctcttggatatagaaataataacagttaactttaggtttatcctgtagactagtttttaattttactaaattgtgaattttgttctccttgaggcttgctttactaaatagaggcaggattaaaactgaagcccagtgtgagtgtcccagacctcagtcagttgtccctgctacttccttcataaagacctgattgggaataatccgaactccagctagctttttgacttttagaataaaggaatctcacaaagtgttgtactttcttaggaggatctttagaaaaccctgcctcccaacctcctattggatggtgaggtttaagacatctatcctgtttgactactgtcctcactggtgtttattaaataaaataaatataagtaaaactagtaatacaagtggtaaaagtcttaagtaactagcagatattcggaacaattgagtagacaaaattgaattggggaagaattttctaaagttctgggtcttaagggctatacccttattcatggtgctttaataatggttttatttttgcatttattgagtaagattttatgttttctattcccagtttttgaaattgacaagcataacatttatgagtttatgcttgtttaacaaatcctgttgttttattctcagtttaaaaaataagggtgtaaatacatctcaaaagtgtacagatttctcactgagtttgttttaacctttgggaaaccacaatagaccctgaagatatccataatttttacccagtaaattttttctttatttagatgatttgcagttttagtatttactgttgtaattagatggtaatcttaaaaatgcattgctaacttcaaaccatatttaaattatcagtagctatgtatatataatcacatggaggttgtagccttgccttgtatgattaaacagagaagaaaggtggtatttgttaacatttctgttttttacatgtatcattcttttatcacatctcataggtgatagcatcctatttttttctttattttcttgggattcagcccaagtctgtctccaaagtccatcttctttcctactgctctactacactgcagagaaataggacggtgaaactgaatatatatgtatgtactgtcataaaactggttataatgcgttctttttctccccccaatctaccttttctttttccccagaatccagattatcttcagtattctatcagtacagctctctgcagcttaaactcggtggtacataaagaagatgatgaacccaaaatgatggacactgtataatttggttaagactgctgaggccaagtgctattttgttacaagaaaggaagaacttggctattttcttgacacttttatgggtgctgcactttatttttgttcggtttttgatgggagggaaagagtactgnnnnnnnnnnnnnnnnnnnnnnnnnnnnnnnnnnnnnnnnnnnnnnnnnnttgttctgaagagaagagtggtaccatatgttgcaggaagtcaaactggactttttgtggctactaaatttgcttttaatcttattgttctcaattttggaatcaagtatgaaaatctgcacaaatgcaatgtttacaagaactggttgattctgggaggcatctgctacagtctctttttatatggatatgtacatgtcctattctacaaaaatgattaaagataaaaacatacttgtatcccactgctactttagctgtcaaatttggtgtttcatcacattaaaagcaataaattcagtagttggtaatgtactttaactaaataagtttgggggg

SEQ ID NO: 182575 - DNA, 1024 bp, Homo Sapiens
ctttgtacaaaaaagttggcggacacacctgcccatgagtagacacagcagcgagcaaataggtctgataaataccccccttcccttccctccccaggagggaatgactacagggaagaaggatggattgatgtggactcattcagggcctggagcagaccctggtggccaagacagaagagatggtttcctgccaaagatattgccacctccaggaaattgccagtgagctggaagttcccactattacaagccataaggccatgttgtcatggacaccagaatatctgtagtcagagcacctatcagttgcaaaagccatgcttgcaaccgatggaaaatgtaagagggagttcttaaggttcttggtggcatcacccaaggcattctgggaaaacctagggcctggccccaaaacttccctactctgtggctagtcctgctgccaacaaaatcgtagcgacctggcttttcacagctttgcttttatttccaagtcaaggacaagccgcttcattcactcctgggcatttactcttcttgtgggtctgtgatattccttgctttccagggagaatgtgcttggcaaggtctggagaactaattcagaatcttaggggaaggggagagatggaaatacaaacctgcttactggaaaggtgcaaatatatgggttgagctggaggtaggaatacaggtaattaaggtttctagtttaagggaaaacagatctattgccatttaaataaggtaactgggatttggttaagttcacaaagatagcagaagatttatttacaggcttcacctgtactgtcagggcaagagaaagcctggtaaaccagctacagcagtttaccagtgtgatggctgtgacacagctccactccacgggtggacacagcagagggcaactgggctggcctggttcattgtgaatcaaaccgcttaacccacacatggtacatgtgattttcttttgtgagccttacaccaagcccaaactattgtcaaagcatcaatt

SEQ ID NO: 182576 - DNA, 958 bp, Homo Sapiens
aactttgtacaaaaaagttggcttatgatagaatgtttaaatgaatgttgatatatacaaacaaatatgcttatgatggcatatgtaggcatatgtggacattcattaggaacctagggaattccttacttgtccctggaaatacctgaaaatggtgtatgttagttttcctcagatagtggacttattgtggatttttacatatacatgaaatgtacatatacattcatacttatacatatttctaaattgtctatatgataaaaagtttatcatatttgacttggtactaatagtattttattaacaaatttcataaaatactactaatattaacgagaaaataagctacttttaaagtggtagttgaattccactgaatttcaggcttcagaagattaaagattacacctgcctctctgactgccctcggaactgtcaggggaagcagcagtacaaagagatcctgatctgacaaacagtatgaggcaatggcagagtcaggtatgttgtcagtgggttttaatctggaatattttcaggccagttcatgacactgttgactggccatgaatcttgaaagcttgagagctggagtgagaacacaggaaatgcaaaaacctttttccccaccatcctgtagctcagaaaatccccaacatctggctcacgtgtaaagccaggaaagatatgatttaccctggcagccggccttactgagagccttagctggttggctccatgtcacacaagaaaaacaccctataaggatttgctgaggattttattcacaagtggaaaatcttcatacacctcaaacgaaactaaagaaaatgttgtatgatacctcctgagggataaaagtgtttgaccttatcagaattggtcatggtagagattattagatgtcacactgtctgatctttgttttccaccagcccaaattaaaactggaaaa

SEQ ID NO: 182577 - DNA, 897 bp, Homo Sapiens
tttgtacaaaaaagttggtacttggggaagtctaggagggatcagaatttggaaccagatcatccactgcagggaatggtctacttgagcagtttagaaaacaggcaacaagatcagattagaagcagttttctgtcagtacagagacctgaggcaagggtaggttcactactaacatgcagcatgaggaagctgccaagcaggttggcaaggcagtggagtatcagggaagcctcgggaggcagaatctgagtcatgaagctgggattcagggacaggatcccagcaatggggatcaggggatgacaggtgaaaagcggggctccagtgctggtgcatctgggatgccagaggagagcagctttacttaagaccattgggtcaggcatttgcgaattggacataatccttacagcatccctgtgaagtagacactatcatttccactttattgataagaaaacaagacttggagagattaggcaactttcccatgacactatagtcatctcacttgcccacaactcttgaccacctgtctttaaacatgctgttcctttggaccagaatgctttgctctgacatacttggctctgcatccttcaggtcttggctaaaatgaaatgtcttcagccactcctgccttcccctatccctaactggttcagttctgaattttcctcctagcatcctatatttcctctttgtaatacggaccacaatcacttatacaactacctaatgactggggtttcccactggactacaaactgagttcatgggcatcttgtacacttatgcagaggacatgaaacaaataccacgagtgggtctcaggaactagacagaaagctggtctcagagctggagcagaactcagagccagactggcagcca

SEQ ID NO: 182578 - DNA, 1051 bp, Homo Sapiens
ttggcaaactttgaacagcctgagaagctcaggggtctcaggcttgagacccagaccctggcagggatcctagagaaaaccaagcttgcagctgaaaggaggggatggttggtggacttcccctgactccagggttagcaggaggcggtacccaatgccttctgtatccagacgggttctcccgtgaacccatgaccttgagactactaagctcagacaattatcctcattaaagagcagaggatttacaagcaagcgaaggaagttagttcatcctgagaagttgttatgattgttgctaatactaaagtgagctttaacctttatcacttttataggacacgggaagaatcaaagtcgagcatgaaaggtaaaaaatttccttcattgtttgaatctctgtttttaaggaattagcatggttatccattttgtagtagtcataatccttaatgtactcccaaatgtcctgggttcaaaatgtcctgggtcaggaatcttcaatgaacaaattagctaatacaaaatgatgtaagctctcattattgtcctcaatataggtaaaagcaagcagtaaagaaaattaaaatgataattaatagtattatgtctctattaagtaatggagtcagtttactaaacccctagaaaactaagaggcaatgatttcatgatttcatttctcagatgattctgttgaacactcgtgttccatgagatttgaatagtgtattacgaacactgtgttctatggccagataaggttagaaatactgtgtgccatgatcctcttcttggacagtcctgttgcagttcagtgtattaaagatggaacaggtactgctttgaaggagaaaaggaacaagaaagaggtagaaacaacaaagtttaactttgtttagcccagtattcccaaacatctttgacctggaaacatgctttctcagattacctttaatatctcacagaaaagttgcaagagactgtagtctgggacaagtggcacttttctgattattttgtgataaacctattcctaaggcattggaga

SEQ ID NO: 182579 - DNA, 284 bp, Homo Sapiens
ttggccatattatacctaacaaatttagcagttttgttactatcatccaatacccaatctgtattcagatgttcttgatcatctcagaagtgtctttttacagttggtttgtttgaataaggattcaaatgaagtccatgcattgcctttggctgttaggtatctcttgtaataatctcctatttattactttcattctgttgatttgttgaagaaacaggcatttgagctgtaagctattctttagaagaaattgaactcctttctaactgctttcttccctt

SEQ ID NO: 182580 - DNA, 1616 bp, Homo Sapiens
  misc_feature (766)..(1229): n is a, c, g, or t
ttgggagacattttactctcctgactggtaaacagcagctggggcaccaaggggctcccaggagtttgtcgagcttttattggagtgaactgaaaggaaaatggaaggaatgctataagactgaaaagaagttaaagccctaggaaggaagctgataacacaagttacagacgtatatgtgacattgatttgggagaatgaacctacaacaaatgacccaaaagcacctaaataagagtgacgagagtttaacagacattcattatggacttcagagaaaatgatgctaaactggtcttagaatcttctttaattttgttaactaggtaaataatctggacattttagtcaaagcattagacagacagagaagttggtaactgaccactaactaacaaactataaattcacccattgtgggttgacctggtaagttcccccagggctgtgtccttggcccctcctttgatattagtgacagatgactttttttatgccttacccattccacaaaagaatttgaagccatttacacaagagatagtactagtaaattaggagtgctgatcaaatttttagataataagaaacccttaggaaggatgacaatttagaatccaaatttaggatccaaacaaataccattacaaactataaaaatgagcagaatctaaatgtaacatttcaataaatgcagattgataataacatctgtgcagagttgaggactatagagtactgtgctgtcactaacagtattgtgtgnnnnnnnnnnnnnnnnnnnnnnnnnnnnnnnnnnnnnnnnnnnnnnnnnnnnnnnnnnnnnnnnnnnnnnnnnnnnnnnnnnnnnnnnnnnnnnnnnnnnnnnnnnnnnnnnnnnnnnnnnnnnnnnnnnnnnnnnnnnnnnnnnnnnnnnnnnnnnnnnnnnnnnnnnnnnnnnnnnnnnnnnnnnnnnnnnnnnnnnnnnnnnnnnnnnnnnnnnnnnnnnnnnnnnnnnnnnnnnnnnnnnnnnnnnnnnnnnnnnnnnnnnnnnnnnnnnnnnnnnnnnnnnnnnnnnnnnnnnnnnnnnnnnnnnnnnnnnnnnnnnnnnnnnnnnnnnnnnnnnnnnnnnnnnnnnnnnnnnnnnnnnnnnnnnnnnnnnnnnnnnnnnnnnnnnnnnnnnnnnnnnnnnnnnnnnnnnnnnnnnnnnnnnnnnnnnnnnnnnnnnnnnnnnnnnnnnnnnnnnnnnngtttattatgccaggaactgttaatgtgtccaaaaaaaactccagtgtggttctaggatgagataataaaaaacaggttgtctagggtagtgtggaaggtcctttcagtcttcctgtgcctatcagtgatcctcattgccatgttcccttctggtgctcaaccggaggctccctgacagatgagtcctctgccagaggaaggctaagatgtagaggacaaatcgtgtcaaggaaaagaagcttgaaggagctaagaatgcttagcttagagaagacaagaggaacaggacatggctttgggaagttcaaggatggtccagtgaaatacatactatacttttgcacccagcttagctgacccatgatcagtaagtatgaaataaaaag

SEQ ID NO: 182581 - DNA, 481 bp, Homo Sapiens
ttggcttcctggtactttaagatgctccaagctcattgtcttgtattgtttctgccccagccctagaaacagccatttttcaaggaactgttggagaattcttattggaaaatgatatttagaaactgagatctgggtgctaagtataatttaatatatttttaagtagtaaggaagaagtgtttttaatacacgttcattgtataagggattttcccaatctaatacttgcctttatgaatttatgttctatatatactgaagtctgaagtctgcctcagaaaggtagagttatagatgaaacgtgattggctacatgttgataattatgtaaactatttgaattcaggtgacaggtacataagtgtttattataccattcatcctacttctttcgtaagtactttatattttgcatagtaaacgtcaaaatatataaataatgtatctttttaaatgacagtatacttttatatatatc

SEQ ID NO: 182582 - DNA, 517 bp, Homo Sapiens
tccacttgacatgaaagggaagggaaagaagttgggagggtatgaataaaatggacagcatgggaaaagcaaggcaatgagaaagacatctttactgcaccagcttcttcttgcttcatgaatagctgcattctccattattccctcagtaacaacattttggtcagtgccaagtaatcatgacgaatgaagtcacactagcaaaaaatgtcaatgaaaaatgattccccagacttcaaaaatcataatagttcatacttaaaaatccagtatcatcacttcttacatctttccttcacttctgtgccctagaactagttatgaccatgaaagtcccacctatttcaagtgaagtccaatgattaggtctttaacatgacaaacaaaactcgccttcctctctgaaatatacatataagcaaaagaaaaacatgggttcatgcaaatacatatttttacattcacatgtgacaccacaggttcactaccatgatagcagtgatgtttttaaagccaa

SEQ ID NO: 182583 - DNA, 813 bp, Homo Sapiens
  misc_feature (140)..(179): n is a, c, g, or t
  misc_feature (482)..(492): n is a, c, g, or t
ttggatttaatgtagattaaaataaaagaccagtattaggaggaaaaaacaagtgcctaaatgtcttaatgctctctatgtgagacagaaatagacgtgaccattagtaatgcaactatttttgtcaaatttagtgggannnnnnnnnnnnnnnnnnnnnnnnnnnnnnnnnnnnnnnnaaatgacaaactctaaaaatgtaccaatgtgaaaaaacactttcctgaatgccattactcatgccctcaaagctttcatatctgtagcctactcctgtaaagggtttctcctgtttctagtttctagtttgcaaaggtatgccaacgaatctggcaacctggtatttgttactaaaacagcatgtgttttcaggtttcttttctattgtacctaaagcagtctaaattaaaacttagtagaacaccaggagtatgattctgtttctgaaaggtgagtggtgtattgctgtcattgggccctannnnnnnnnnnaaatatatttttctttcttacttaatggtggctgtgaattgcagggtactttgaaggccatcatctgaaccaagagtagtaactagattaattatatgacagaaagagtgaatttagccttggggtatttattaacttctattatttagatatgcaattttgtttaccactatctcttcacagcattcatatgttaactaagctcttttgtgttaacaagtttatgacaagactgtgaaagtaaaataatttatctgcttgaagacataaaagggaagagaacaaagatataacattgtgaattaatttgtacaatagaaa

SEQ ID NO: 182584 - DNA, 513 bp, Homo Sapiens
cattaaaagcagaccaaaaaatcctagaatacaggagtcagctgtctattcaattcagaataagaaatattgtagacaaggcaacattttatgtgtattagaaatgtggtggttggtttgagaagtgaaaccagccatgtatatgctgctccaagcattttggttgtggcaggaaactttgaagactattttgctgtacaaattcacaaagccccctgcaaacactcccgtgcttggggtgaatgcccaagtgtgtcacagctgccttgcagctctgaggatcagaaaggttaatggacataaaagaaacttcaaagctcaacctcctaatgggaagctgcccttggttttaggctgtctttgcttactgaccgacttaattcatgctttgggttatgactgtaggagagattttcctgtgtctttggagtatgctgaacttgtgtttctttttgttgttgcatattagacagtcagtgttgaaactaaagtgacctaaagtgacagagctca

SEQ ID NO: 182585 - DNA, 925 bp, Homo Sapiens
ttggattcaattcaaaacccgtttatggagcatcagatgtgggatattgaggtgaataagatataatctttgttctcaaggaagtcataaatctgaatggcaccggccccttaggcatgagtcattcagctgcttctccagctccaaaccttcccaaggagcctcagcctggatgcataagaggaagctttgagacattggcgttttgggaatggagaatgaaccaagccgaagtctctcccccagatccttggagactgcctctccatctctccccatgctgggtgcgatatgttcctggcttacagctcttataacccatgtaatttcctaagggactagagcaataatagtatgttttgttaaaatatttgaccttttgtccttggtttctgaaacagctccagaacagctccagagtgataaaggtgaaagacagtcttttgttatttataacaagcccgtttcttttagtttaatctttcattttattttaattagttaattttactaaccactgtactaaggaggaacaagtgcctttcaaccaaacctgagcttatgttaaagaggcgatttttggaaagtcccagatagccactggatggggggctggttgccaggggaacaaacctggtgctctgagggttggaatttacaggcccacccctcacctctggggaagggagaggggatgaagattgagtagagcaccaattgccaatgatttaatcggtcatgcctgtgtaatgaagcctccataaaaatccaaaaggactgagtttgggggcttccaggaaggtgaacaagaacacatccacaggccaggagggtgcaaacccaacgccacagggcagcaactcctatgcgccggacccttctagagcttcccctcggtatctcttcatctggctgtttatttgta

SEQ ID NO: 182586 - DNA, 393 bp, Homo Sapiens
ctctacttcttatcttagagtaggctaatcctcttctgcaatataaggaataatagcaagaacaataaaattgaatctcaattccagcctttcagggtgcctataaatcagcaaccaaagcaaaatacaattcgttttatctgcaacatatccaagtaataccatgggtaataagctttgtttactgactacaaccttgacaaacactaggttttactgaaaacggctgcatatcaaatgaatatctctaaaggtcaaattgtgctgttttgtgtacactgttattctactaaccagtaataaggaatgactaacacaccaaacttgaagcagcaggtaatcaatgagattgtgcactgaggcaatccaaagttcaagtaaggaaagcgccaa

SEQ ID NO: 182587 - DNA, 598 bp, Homo Sapiens
ttgggtgggtttaacattcaggtaatagttttactgccttgacttcctctatttatttattaagtgattcactcagtgagcatttgtggcactccaggtgccaggcactgttaggcatggctgctgagatggagaagatgcaggtgtgaggtacagagaggtcaaggggtcaccagccatgtggtattgtagtgggggcatggcacaggaggctagaggaggggtcctcagtggtggctgcacttgagaagcccttattgggcacctgctatgtgacaggcacggacagcagtgagcagtcgcctggcggtatattgtcgggatgtgcaaggctgctgttgagcgctcacatgaggcctctgactgtcgtgggggagtggcagggaagggtttcatccagaggtgatggggacctggagagccaagctggggagaggtagggctgtggaccaaggcctgaagttggagggcgcatggggactctggtttggtttggcaagaactcatctgtttatatttgcataatgacaaagcctcttctgggatgattggatgattgctggctttatttgtgaattataaacagacctaccctcaa

SEQ ID NO: 182588 - DNA, 933 bp, Homo Sapiens
  misc_feature (855)..(867): n is a, c, g, or t
aaatccataccaagctgctatccatagttcaacttctggggaaaatgctggagttgcatgagaaacaagtgcaggcagttcaataaccctgtgaccacgctggggagggcagcaaaaactcttgcccctgagccccattcaacaactcaaagtgcttaggagaagtcagagactgtgtggttggtttgtgtgcttctgccctgtggcagcactaaatgggatgggggaaaggagaatggaaggaagacagtgttgatgcccttccctaccgcgggtaagagcctagaagataatccactcccacccttcagggagttacctggcagtggtgagttgcccccacccctcaagccaccaaacctgcaaagctaacccataaagtagcaagggcttagggagggagaactgctggcccatactgactcaccagctgatgagcaaaaataggcagctagagtgggagccacaaagggagaggggctaggcaataggagctcccctactgccctatggctttcttctgactctgaagcagccataatgatgggcccagaaaacccacacaccctgctccatacaacagactgcttggactctaggaggattactgccatggaaagcaacaagggagagagaaagcaacaaaagaaactgttaagaaaactgggagcaggcctgaagaaaacaaggaaagcttctgagtctctaccacctttccaaaaaggaaaaaatacatgcagttaggaaaggcagggtttttccctgctcagtgttcttggttaaacctaagagtaagaaaaatcccctgaacttgcagcatcagtatgtatccaagtgcctcaccagcacaagcgnnnnnnnnnnnnnaggttagccttctggcatgggtaaatgtcctctttataaagattgccttccagccaacttttttgt

SEQ ID NO: 182589 - DNA, 679 bp, Homo Sapiens
  misc_feature (428)..(479): n is a, c, g, or t
ctttgtacaaaaaagttggcaaaagaaaagagagaaagataagagacacaaattactaatatcaggaatgatctggaagataccattacagacactgcagtcatgataagggttataaggcactattacaactaattctatacacacaagtttgacaacttagataaattggacctaatcttcaaaagcacatactaccaccacttatttaaaataggtaagttgaatagccctaaaatattaagaaaattgaatttgcaatgtaaactctcataaaaaagaaatctctaagtctggattgtttcattggagacttcatcaagtatttaaaaagttaatgtcagcactacacaatctcttctgggaaacagaagagaaggaaagacttcccaaatcattttatgatttatcattaatttattgtactnnnnnnnnnnnnnnnnnnnnnnnnnnnnnnnnnnnnnnnnnnnnnnnnnnnngtctttctcataaatacaaaaattcttaagaaaatgttaagaaatatgttttagcaatatatatgaaagaattatacaccatgaccaagtgagacttaataaatgtctccgaatagtaggaacagacaggagctttctcaactcaataaagaacatgtactgatgaactatagctaatattctaaggattagactgaacc

SEQ ID NO: 182590 - DNA, 908 bp, Homo Sapiens
ttggattcagggaaaaaatagattgaagaaatagattgagcttttctgtcttttggattcctcaaaacatcaaaaagaaaataaatagactggaggagggtaagagttcacagataataactgatgataactgtaatgtgttttatagaattttatttattattaacctgaaaatcaggtcataaatatcagacagctgggccttgctccagagtgagggcttgtcagtagccacctctctgaaatgaggttgagtaaagacatgaaaagtggaatacattcccttgcattaatcattttctcatctgttaaaggggagagggagagagtgctgactgaatattaacactgcttaaattaaaaatgcttccttgctgtctcagccatttccaagcaaaattgagcaattcttgcaaacaaggtcacccatcagcagttgaaagtgcttttggttcatttcactaaggtgcttataaaaatagctaaggtgagacaaaaagaaaccttcaaccaacctcttaagggcacctactacagttcaaagaggccagaatcttgcagactgttgaccgctaattatactcagttaattccacacttggcactggccagcactagctaccttgtcatttaagagctgcacctcatttggtggctgtgtccagtaaggtcaggaggcatagaactcatggttaaagttttggagatttcttttttgcaagttttggaagaaaactatgcaaattatgtttcctacctgcttcccttgtatttatgaagagaagtcaccttaaaggcagagactgcagcatttctttttgtcctaccattattctagttatttcctgattcccagctcttttaagagttgcagtgtacaacatgcatgttgtatgtatgtgactggc

SEQ ID NO: 182591 - DNA, 527 bp, Homo Sapiens
acgctgtctccaacttgtgccataaccagtctttagcaggtcatgccacctaaaaagccagctgcttctgggtgatggaccgtatggtaaaatttgtcaagtctgcacgcatgggcccattgcccacatgcccatttaccaaaaaaatgcatctccttgttaaaatgaagttggatggtattccatggtgatggagaagtccatccataaaatctacagtgtgccatcagaagccctgagttcagggaaggcaaatccatatccataatatatcccgtgaggacaaagcattgtaccctccatgacaagagactgaatatagtcaacctgttaccaggtaggtggtagaagaatgtgtctaccagaggctcctcacccttacctgctctgtgattccaagagataagggactccttcaaagctaccatggaggccttctggttctccgtgcctgtcttaattgtatgctcttaacttttatttctcctattcccaaaatatgctcaagagggctataagaaacccaa

SEQ ID NO: 182592 - DNA, 452 bp, Homo Sapiens
gtattacttgatgaaagtctgtttcatttttagagccaaattttgctattctttaaacttcaaaactaataataataatgatggacaaaaatgactaagtttagaaccattatcggagataataatcaggctcctgagaataaggactcaggctttttggcagccaaaatatcaaaaagaaaaaggctgagactgaagcagagcaacaaaaatcatgagtagattaagaaatatttgaaagccgttgaaatttagatttttgaaagaaaaattattttgattattcctatttctttaaactttgctccaaatcacacatctggctttcataacatgatatcagattgtgaaagcaatgtcatacacatttagataaagcactatcttcttataatttgttatttctcctctctgtcctatacctgaggaagcctagccattgggtccatcca

SEQ ID NO: 182593 - DNA, 413 bp, Homo Sapiens
  misc_feature (113)..(122): n is a, c, g, or t
ttggctgatttaaaagtagcctctgctcacaggagatgaagatcctcatttgaaatatggttattgctgttgattgtgattacttttaggaaccttcgaataccatctggaannnnnnnnnncttcttcttctttgacagagctcagacttcaatacagctagggataacagaagggaatcgtagcctggggttacactcttttattgtgacaggaagaagctggaacttctttcatattgtgctccactccttccatctgcacttaatgttctcattatcccccatcactctccacttccttctgggccccttttccctcctgtagcatcctttgagtcttttgttctttccctaatggtcttccttacttcttcttttaggtatctttagaatatgataaagtaaaaattc

SEQ ID NO: 182594 - DNA, 858 bp, Homo Sapiens
ttggggcaccttttccttttcttgaggactcatgaggatgggcgtgtgggctctgtctttggcttttgggggctattggagggttagaaacttgcctttgccccctgtggcaacatctgcccttcatcacatcactgccatcctgaagggagaaatgcccttgaggggaaggaggaaggcatggttgggtagagcctgttgccaccctgagcagtgacttaattccttagcaggatcagttagttccatggctataggggtcacctgtggctcttgattgctcctttctagaaggggtggattgtaaatatgcagttcattgtcttggtttccatgggatggtgacattgtctcccattaccacttgtaaggttctccctcagctctagtcccctgattcctttagagctagacagtgcttgagagcctctgcttccgttactcctttctgtccgataaggtgggcctggttctcctactcccagttttgcttatgaggaagaaattgatccttgaggatacagttgactttcctcataaagcaaattggaattagaactggtttgcagagccagatctcttgattttgttggttgtctagggagggactggccaccagttcatttaacagcatgcaggtcccctctgggcctgaaggcctctgttgtgacactgtctccttgtactagaagcatctgcctccacttgtccctttatcccaaggaaagaatagtcagaaagatttgacaggtgaacaaacacaagtccagaaggggacatgactggcccaagatcacgccaccagctaatgccagacaggcgatgagaacagttgtctcatacctttgccttgtaaaa

SEQ ID NO: 182595 - DNA, 301 bp, Homo Sapiens
gtgacccacaggttggctacatatctgtgtaataatatgtcactttgggggctaggtcaacaacggcataaaaaaccatggtggcttctgcttctctcttggattacttgttttagaggaagccaggaagctctatgaagaggtacatgtggtgaggaagtgcggtattctgctaaacagctagtgaagaactaaagtgtcctgccaatagcatgtgaaagtgtatcctctggtactagttaaaacatcagatgattacagtctcagctgatggtttgactgataacttcacaagagccaa

SEQ ID NO: 182596 - DNA, 146 bp, Homo Sapiens
atggttcaaagatgaaaatactgcttcctcaaggaaggcttttctgattcccatctgggtcagtatctctgggtaatagcactctaccctcctctgtagtgcttgtaggcttttaaataaatccatgtgtttatctgaaaaaataa

SEQ ID NO: 182597 - DNA, 799 bp, Homo Sapiens
ttggctttaaataagctctggcatacaagtagtgagaaccagactaagaaggctaaaggtagctggcatataatgactcaaattgagagctgaatgcgtgccaagctgtgttctaagtagttaaccagggttaagttgattcccctccgtattcacctgtgtagttctttggactctagccatcagcctccaaaaaagacccttttgaacttagtgggccctcggcacttttgtcttcacagacccctctctccatttaaaaatatcaaaaagtatattttataactgggttgatataaagatgaatacgttaatatcatatattaaaatagtttatttgacctaaaagttttttaatactgattttaaaagacatgaaacatttttgtgggcctttaaaaatactgtgggccatagccgatgtacctcccccgctgatcaaaatggggcccttcctggcaagagtattgtagtcttaagcataccagttcagagactacagtactcttatcaacggccactgcagatgctttgagaaaataaaagaaacggaggacaaagcaggtggcattccaatttatttttttattgtaaggacagacttatacatcattgttgaaagaattttaacctgttttaaacttctgtaaaattgtttctactgccagatgaaattagcttattttgcctgcagatggtgctagatcctcagttcccaggtaacacattttgataagagaaaatattaaatatttaaggcaaacatgacatttttcaaaaataaaattcttccataatt

SEQ ID NO: 182598 - DNA, 916 bp, Homo Sapiens
  misc_feature (191)..(286): n is a, c, g, or t
  misc_feature (316)..(325): n is a, c, g, or t
  misc_feature (730)..(770): n is a, c, g, or t
ttgggaatatgaaccacgaagaagagatcatatttctcattttattttgcggcttgcttattgccagtctgaagaacttagacgctggttcattcaacaagaaatggatctccttcgatttagatttagtattttacccaaggataaaattcaggatttcttaaaggatagccaattgcagtttgaggctnnnnnnnnnnnnnnnnnnnnnnnnnnnnnnnnnnnnnnnnnnnnnnnnnnnnnnnnnnnnnnnnnnnnnnnnnnnnnnnnnnnnnnnnnnnnnnnntgagccaccgtgcccagccttttgcttttnnnnnnnnnntcactttttatagtttccacttcatacagattgtgcttgtcttttatttctgtacacatggtagcatagttattatctgtaaactttgtgaattcttccctgttgtttttgttcgtgaagtatagtttttttctataccttgttataaaatacaacgtgcttgacattgtatttggaaatttatttgtaggaatactttgaggtgtaatgtgaaggttcctccagagaggatttgagtttgcttttgcgaggtgcctgggcatttgaatcaggtaccgccttaaaacaagttcaaggcttgggattccctgatatcctacatcatttgagcaggaaggtctctcgtcagatatcccactttgtgtgggcctgactttgtatattaactttctgtgctgtaaagannnnnnnnnnnnnnnnnnnnnnnnnnnnnnnnnnnnnnnnnctctaggaggttgacccaaataatatagcctgttttactgaaacagcaagttctactgcagtttgtttaactagatacatgttggacatttagtttttttctttattattataaataacactgtaataaagaaacgtttttatttg

SEQ ID NO: 182599 - DNA, 343 bp, Homo Sapiens
gttggagttgaagtcacatcctgtggcctgccatgattggatgttcctaatgccagtattgagcgacggtaggaagggcttcccacctgggacttgccggggtcaggttgtgaaagagcctcgatctggagccagctcttaccacgggtgcggtgagtttgcgtctcaggaggatgtggcaggataatgtcagcacgatggctatggtggacacgatgggggccagggcagagtttccactttggacaaatccagctttttccagtaattttctttccctccttcttatatctgcaaaatagaacacagtccaaggtggtctcattttgcatgtcgaacccaa

SEQ ID NO: 182600 - DNA, 932 bp, Homo Sapiens
taaaaaaggtgtattcacagtctgtctgaattaagtacaaagcagtgtccacagaagcagaaggcagacaacatgtgagagtaaatgatcccactgaaaccctcaccccagcactccaaggacaccaaaaacaagacagtcctgtacttgctactatatgcagctgactttgaaactgcctagtctcaacaattacgtatttcaaaaggaaaattgctttctgggaaatcgtcccttgctacacagacacacagaccaactggcaatgctgccaccacatgtcagggctcagggtggacccagcacatccactaagaggcaccctgctgcccaaggctgtgggagacagctttgatgttcaagaaaggggttcatttcagcaccagggtgcttttttatatgcaaatctgaggtgtttcccgttagaggagaggactatgcagatgatcacatgcagatgtctctgagctgtgagcccgatgacagctttgttggtacactctggccagccatttcacaacgcactatgaagagctgaaacctctgtttttaatctcttgtgttgtgggaatttaaagaggtgagaaaatcacaaggatcacttctaggctcaaacttatgattatatgatagtttccagcccaagggcaaaaccaaatgtccaattttcacgtctccttccaaattcaatgttggaaggcaggtgaggaggtgaggagaagggcaggtcaaactgttccttatagacataacagcaaatttagagaaggagtactttactgaatggattgatttctgaatcaagtcacttttataacaccaatgtataagccctcagtaatggtaactgttaaaagtggttatttgacaaatacccaatattttagagaagttaaagaaagatggcatataccagaaaacaagagatccaa

SEQ ID NO: 182601 - DNA, 947 bp, Homo Sapiens
ttggcttctttgttgctataccattccttacttttatatagattgggttattcattcaacaagtattcattaagcacctatgctatgctgggcactgtgtagagcatgaaaggtatgtacactgatggtatgttcctgtcctcagggaacttatagtctagtggacagatgaagggcagatgcaggacggcaggtggtatgttttctgctctgaagcacagtgtggtggagcgggaagagtggctctgggaacagactgcatgggatccagtccccattgtgggcatttccactaaggaattactaagcagtggccacttcttatctgtcatacttaattcagtaattccttagttttctttaaaatggagatcaagatttaccgccaccatcccacgcccggaagggctcctcatgctctctgcagcatggtgcttctgtcgcttacagaacaacttgcctttgatgattttcaagagagttgtgctgtgaggtggcaaaagtatccaggcagcaggatgccagtgcctcaaggaaaaaatggtccttttcggcaatgtgttcggtactgggggcttggcccttgtgtattaccgcatacaaaagactttttccagggctttgtattaccagttggcattggagcaggtgcatagccatcccaaggcacagggagctctgggccctcttctcaacattcactgtctcaaactcaccaagcacaactttgtggacattgctgatgccaagttgaagattcctagctctggatccaagtcagagagccatctccatgtcagctcatccagaagtgcccctttcagagtggcaccttgatgaggtcttcctagagcccaagatggccagcagattcccttgttcagctcagtggggagaatggttgaagaagtgaaaagagtaaaacgatccaaaagaccgtgtgaatg

SEQ ID NO: 182602 - DNA, 439 bp, Homo Sapiens
tgatgactttcccaagaccttgtctctcttctcccaacaaggatataccctctgtgggtgcctgatgcctgctagcccgtgggcagcctctcttcctctgctctcaaccacacctgctcccagggccatctggcttgctagctatctgacgtctgcagtcaaagcccagccaacgtgccctgtgagtggacagcccaggaaggagttaggaagtaattcttggcccacctccctggaagaaccagataagaagctatttctgtcgcaggagatgcctctgaggctcagataggattcaaagcaaatggaggcaaataagagggagttacaaaccctattggggttgggatagaagcaatgttgaaagaaaccagggtcaggtttttttgggagaagccagcctgggtctgacttttgggactaggactcaaatgactta

SEQ ID NO: 182603 - DNA, 861 bp, Homo Sapiens
gcccacagatgctgcggcccagcctgcctgagagaggccacctctgtgctgagctcccaggcacccacttcccgtggcaactcctgggtccggtccgctcccagcccttctgtggctttggaggccgaatctgcctgcatctgccattgatttccaattccaaggatgttgtgtttacagtgtagtgagatgggtttgtgtttctgcaggagattctagaagccagacctcggagtgggggaggtgctaggcctccctcccacctggataacctgacccggagcctggggaagctggctcggcacccccagccctgacctctcctcgtgggcctggcacggcaggctctgggcacagccaggacccccagggcctcagtctagcccctcattttccaaggaggcaaccgaggcccagccaggctttcaaggctgggcagagccagcctggaactcaagtccccaacaactcccagtcatggaatgttgtacaagaggattctggcagccaaccctgacatctttaaaaatgttctttctggcccttaactactggggcaccacagttcctcggctgtctgtctttgtgctgggctgtgcctggctttgtctgtagctgtcagtcctattttgtccgctaggaacaaggccagggcagcctctgtgatcccctcgagctggccagtcttccctgacccttccctctcggcccctggccttgctgtagtcatgtccatggacacctcctgcccaccctggcgggcaccactgtgtggacacagtcctgggaggggtggggggcaccactttgggaacggagggtctgaactctgccctgtctttgagcctttgttttccccaa

SEQ ID NO: 182604 - DNA, 919 bp, Homo Sapiens
ttggattacacagctgggtccaccttaccacgtcctgtttgattccagcgttaccaacttttctattggagccaaataagacatactgcaatcagtgatgaactgtctatatgccaagtgtatcccttgtgtaactgtgtaatggctgaaactgagaaattggggcgaagtatcaagtggcttaaaggattgccaaggatccaaaatttgaacgattaccaaattaccacgcacaggaaggaatctatgcagatgactgcttagcacagagagttactcagcataagtgttgtagccacgaacctgggaccttaaaagaagaatcctaagattcttggagttcctatcatgtacatttctaaccatagatacaacatgggaactgatgtcagatgattatggagccccttggttctaattcttgcccaagttcctctgcctttcttccaccaactttctcttgttgccagttcattaaacatggaatagaatgttattctgttcaattcatttgccctgttatcagctgaatatggttaaacacactcaatttttcatgctgttttgaaattgatattttgttgcatttaaaaaatttaaatgatggtcaaagggtacaaaatctccgacaggaagaatccattttataatttttttgaggtctgttgcacagtgtggtgaaatatagttagtagagtattatacatttccaaattgctaagagtaaatttcaaatgtttctcactacaaaatgctaagtatttggaagtgatggatatgttaaactagctcgatttaattattctacattgtatccacagattatgacatcattttggtaacctataaatttatacaaatcaaaaattggcattttaccataagaaattatttgttgcatctttttagaaaaattaaa

SEQ ID NO: 182605 - DNA, 881 bp, Homo Sapiens
aaaatacatgctagatctagatgtaaaacttaaacctttagaagaaaacacaggaaaaaatcattgtaatctttgttaggcaaggatttcttagatacagcactcaaagcacaacccagaaatgaacaaatggaaagaacggacttcatcaaaataagcagttctgttcttcaaaagacactcttaagagaatgaaaagacaatccagagactgggagaaaacctttgcaaggataatggactgatagtgaagttacacccagaatatatttttaaaaactatcagtgctcaacaataaaaaaacccaaataacccaactgataatgggcaaaagatttaaacagacacttcatcaaagattctcaataaaagatgatcaatattattaatcattagggcagtgtaaattaatatcacaatataacttcacatgtactaggatagctataataaaaaagactaataataataagagttggtaaggatgtggagaaaccggaaacctcatacattgatagaatgtaaaatggtgcagtcatgtgaggaacaggcctaggtctcaggtctcagccatcactcatctatcctggggagatactacaatggtttggaggacaagaaaataaaaccgaaaactaaaactgacatatcactatatgcccaccactaatggctatagtaaaaaagatggaaaatgccaaatgttggcaagtatgtggagcactagaactcgcatactgggttggtgggagtgtacattggtacaaccacttgaaaactggttttataacatatagctgaacatatggatacacttaggtacatacctaacaggaatacatacatatgttcaccaatacacagcaacacaattccccaa

SEQ ID NO: 182606 - DNA, 327 bp, Homo Sapiens
gaaatttaataagtcactgctacactggcaaagaagggttgagtagttttaagaagcttagttgctgtccaacagtcttattgcatctgattcttttggtgcttgcttactcaagtagggatcacatagcatgggaaggaaagagcagatctgtgattctgttgtttacatctcagaattgtggtttgtgaatagttttgaaatttttcttatagttttgggagaaatttgttaacggaatttttaaggattataggacagcacaaaataatttctcttgtttagatgcttttaataataaaaaaaatctgttaggatactttttcc

SEQ ID NO: 182607 - DNA, 895 bp, Homo Sapiens
tctatacattttaccttttctgcaaactgcaaaaaactggccactagggagcagtatagattaacagttaaaagtgctggctgtagaggttaaagggcacaggttttaatcccactacaccaccgatcgtgaacaattcgtttcatttctcactagaccttagttccctcatctgtatctactctgctgttgtaggaagtcaataacgtaatacagagtaagctcttggaatattatttggcatttaataaatgttcaataaataacatctattattgctgtaattgttctagggggttgcatgaggatctggccagctagggaaacgtcaatattttgaggatctcccaccgcccatgtggggataaaaaccttatcctgttcgtctctaatgccccagcatccagcagggcagagagacgtacagagttacctgacaccttcctatccatcatcttactctcaatctgatacaaagaccaggctgaagacaaatcaacaaaatcaggccgaagctcctccgccgggtctttatttgactttggcactagcgggctcttctagcttaatctcccgccgcagcccaaatccaccgccgagccatcaagctcagagggggagcctgggaagacttccggaccatggaggagaacagtcctcgtcccctagctccaggcctgtacctcggagcccaggcaagggtttctatggtaacatggtcctcggctccaagaagacgtaaacgcccccgtacgcccggggggcacagcggaccccggaagcccttgactcgctccagagttcagccccgagccgcgcgagtcgactcacctacctcttttcaagccggcctagccccttcccggaacctcggctcccccccaacgaaacccaa

SEQ ID NO: 182608 - DNA, 925 bp, Homo Sapiens
gagcaatgcttttctataatagccaactttgtacaaaaaagttggctcccttaggtgtcattgcagtctgacaggcagctgtgtgttttaaatacgagccttgctcagggccatgaggtgaaaaggcccagctgtaatcctaggcaggcccacaagcatggctgcatggttagttagtggctgtagcaggtttttgtttctggtgtctgctcagcccatggcccctttctctaagaactgtcactttatcttcaaggatgggccctggtgatcaggtttttaacttggctcccaggctgtggctcagtagatcaaagatccacagctgactcaagctggaccagccaggttgtctttctcagaagtgtggtcttggactaagacatatttgtagatagactaggtagatgtgtaaacttgggagcagtgggaagccatgtcttagattaattcaataatccttgtaatactcctatgaggtgggacctcttcttattcccattttgtagaagaggaaactgagtcacagagcggttaagtaatttatccaaggtcatatagttggttaatggcagagccaggcatgaacacaggtagtatgagctcatacttgtagccactgtataactgtctttcggagcaagagagagggagaaagaaagagagaggaatacaacaggcctctggagatatgcagattaaaagactgtgtgaggctgcagggagagaggtgggtatggggagagagtaagactgattgactaagagagtagctgccttgattctgtaggctttctagctccaggatccagacctcagtgtctgcactttctaaccttgggctctgagaaagtatctctatgtccttataaataaatttcccttttgtgctcaaagcagtttcaatggatgtctgttacttgca

SEQ ID NO: 182609 - DNA, 919 bp, Homo Sapiens
ttggctttcagttaacatgccttgataacacatagatgtgcagaaagttttaacattgatcttttaacttacgtttctcaatgactgccttgatcaagatacttgatgagagtttcatgacttaaatagctttagttcaggagtcaattttagcaccaaggctgaaatatcccaagggtatccgaaaggcaagtaatgttctaagatgaataatttagaaaatatgccttaatatttcaagagagatcattcatcttatatttttgactttcattttattatgagccatcgtagatgttttaacttctttagcccacaaagaaatttctccaaagagagccagccaaccggagacagacagagacaaagaaggtataatgagtagagagtgcctcagtgtctcttaaacttcctgagtctgtggactgctttgatatgggggtaaatggagcagttaggccacactccagaatttgtaggataactcctctgcttttgatgagacagcagtacaggactacatggtttccttaagcatcatatgcaaattgtcagtttatgccagaagcaaaattgtaggaatttgccttgttagtaactttttgctgaaataaacatttgtcacgtttattagaaaattggtttgatctgggagcagctttgcagtcattttctgtacatacccaaaggaagtgtgaccatgctggcccattgctatctggatgcttcagacatcaaatgaggacttggatcttgaagagcagcctaaaattaaacaactggcccgttgttgccagacttcgtgagaaatggcccttatttatcagactgacaagctgttaaatgtttttcctcttttaactgcagatgtgtccgtctgagtgggaacagtaaacctacgggtacatatgtttgagtt

SEQ ID NO: 182610 - DNA, 864 bp, Homo Sapiens
acgcccttggcgtgggcacaggtcaagctgaaagtccccgcccaggtatccaagtgtccgctgtgtccgctcccccaggtgcagggcgccgcgcacttcgggccggtgtggctagccagctttgggacagtgcgcaccgtgtacgtggctgcccctgcactcgtcgaggagctgctgcgacaggagggaccccggcccgagcgctgcagcttctcgccctggacggagcaccgccgctgccgccagcgggcttgcggactgctcactgcgtgagtcttctctgcccccagaagcccagacgccctgcagcggccctctcctgctgcgggtcccgaaactatcaatctgggggcatggtgggaggtcggctgtcccactctaccattgggcatcttggggttcccatcccagtctgcttcacccacactcaggttgagccccaacctcactccccgcctacctccttatcctttgaggcccgaatcctgggaactgggggaaccggaggaattgggctagggtacaaggatctggatggaatgaatgtaaggttctgtgactcaagttacccgggaaccccggcccctgagggcaggaaatgagtaaagaggaagggggctggaagacaggcgcaggccggtgcaggtttccgtaccccaagggggcagacgcaatccctctcctggccaccgcagccgaacgcgctccttcactgcagccagtcccgtcgagccgtccccaccttcccgatgcgcactctctcctcaaccctgcagggaaggcgaagaatggcaaaggctccgcagtctcctggccccgctcctcctccggcctcaagcggccgcccgctacgccggaacccaa

SEQ ID NO: 182611 - DNA, 670 bp, Homo Sapiens
gtcccctaaatggtaggatttatttcaatgctcacatacaattgaatgagacaaactatttacataaaacataagtacaaaaaatataatacaatttatactgtacacaatcaggattcccttgttttgttccccccacaaatggcagctagagatggtaagaagggggttggtaggaaagtgtgactgcacactcagcagtgctgaggatagatcttcagaatgctttttcataaagatgaatagggttgagatacagaaactgtcaatgcaccaagagcagtaagagagcacaacatattcacttctgtaataatagctatatattttctcttataaacgtgtttgtttctcaaagctgaggcttggagcaggtgtgagttgccttccattgattggttaggtgacctccgcccacccctgctccaacttccatagttgatccaatgcagcaggtaatgagtttccagttgccacaattggtgtcttaagctgatttcagaaaacaatgcatctgtcagatgtcattaagcaacaatctgggatacagacctagacagctctcaggaagcatttacaaccagtgaattgatggacaggaaagataaaagtcatgaacattagaaatttctattgcgcacatgtaacaagaaggttttgaagaatccaa

SEQ ID NO: 182612 - DNA, 475 bp, Homo Sapiens
ttggctatgtttcccaagaataattgataacctgagaaagtgcttgctacatcatgttaaattaaaataaaaagtaggggggaaaattaaatatggattacggttcaaaggttgctaataaaaatatatgcctgagagagaaaaagactagaaggaggtgcaaaaagtattagcaatgttagccatgggtgacttattttttattatttgaagcacttcaaattgtatgtatgattacaaaggcagtaagtgttggattagaaattccaatcatgcatgagtataaaaagtaaaaattaaagtttctcctctcacttccatggccattccccagttgtaacctctgttaacactgtgaaataaataacatctcaccaggtatgaagctgaatttcctaaaaacctcctttgtttcaggcagtctgcaaagagaagctagagacgtagttaattcttcttagtagtagtagtagta

SEQ ID NO: 182613 - DNA, 910 bp, Homo Sapiens
ttggtgtatttttaaattctactttctttggcatctcttcatggctcagcgacaacaaagtaataggtcattggctggcttacgtcgataggaattttactcttaagaagggccagtgtatagctgactctacatataatgtgtaatcagataatccaatagagaggaattgtccaaatagttttagtacctttctgatcatctgactcagtaggctaggagacaatctgtcatctgagccatagttcttgagatttaaaaagtctgtccagtgactgcaatctgattatgaataaactattttaactattcattcttgctgaaactgaagtgtacacaatagcacactgttggcatgctgaggcaaaacattgggttcttttgtgttctaccttcaaaacaatctgtttgcatttgaaatataagtgtttaagctttttaggagttagtgtaataagagaatgtgaatatgttgggaaattttcagatgccattaataattgtaattttgttgttaaattaacaaggactttaggataagcctctcgatgtttttgctttaaattgaaagcatgtctgtcaaattgcaagtctcccttcagtttctatatatcacccaggagagggtctctgagttggtgttgtacctgtaccactcacatgtagctcaagtgtaatttgtagtgtttacattcaagctgggatcttgattggttaaattaatccacataccactgccactgctgaaggaccaggtgttggaatacacagcattacagactataagcaaagcaaacaaaagttgatccttacatatgccatccttctgtgtcattttgtggctgttctgtgtttttcttcctagttatttaataatggtaaataacttactttttctaacattctgttg

SEQ ID NO: 182614 - DNA, 857 bp, Homo Sapiens
ccctcacttgaaacacaagaaatgctgaacaaaagtgaaccccaagtccccccaaaaccttccccccctcatatatttaagtgagtgcaaaagaaaagatcccagaggcaagaatgacagagaacacacagagtcaatcacgagttacagtggaaggcaagtgacctagagagttgttggagtaggatacaggccttaggggctgggctttcatgtccatgtgaggttgggagtgtggccgagccgcctgcctgaagccaggagtcataggctctggcctgtctgtgagatggggactaggaaaactctgtctgcctgcgggagccaccaggaagcagcctacttgtccagggctatgtgtgggaaagaaacccataaaaacttggaatcccatgtccacacagaattcacactacccacacgggcagacaccataaactgagaaattcacagaaaaattggctgagagccatggcaactcaggaggccccagcatgggcaaatgcagatctgcctcagaggggcacccacacaatgcagtccacagggggctcctaagggaaaactaaaaccagaagaaaaactaaaacttacaaaacagaagaggtgccaaatggccatgagagtcatggcagagttcactcccaagaactaatgaaaaaaaggagaggctgaatgatacagtaacctaagtatgtctaagatcatcaaagagataaagaacagaatctttaaggcaagaacagcaaattattttgaaaaaggtagatttgaaaaagaactcaacattctagaaacgacagaggcagctgtggaaatgaaaaactcaaatggatggctctggctcaacaacccaa

SEQ ID NO: 182615 - DNA, 708 bp, Homo Sapiens
  misc_feature (376)..(391): n is a, c, g, or t
ttgggttaaatggatatctgctcaaacgaactatctgttcatgtagcagtttacaaataaacaacatataaagccatttaagaagatttcaaatgaacccaaagtctggaagaggtcatctatttctcctttctgcgaataataactacatctcaatcttgtaagtttgtaagacatgagatctcgtaatctcaccaacaggatgttttggggggatgtgaccatgtcattcctgccattcccaccttttcaaacctttattactaatgtcaaggaaatttaacattttttcacatttttaatctctctatcatgtttgggctttgagaggttgaatttagacacctttacttcaccttagagttgctcaactggnnnnnnnnnnnnnnnngcccaggatgacatcccctcctcagaggcagaagatggaacagggcaatgaaaagtccttctagagtttgtctagtgagataagtgtttagaaggagaaatgagaagggaatgagatcactttcccaaagctgttatatgctccttgatataatgctctccataaaggcttgtatagtgaagtaattttggctttggcattatgtttagtgaaagccatggatttgaaggaactttctgaatagctctgtggtaatacatgcaataaatcaaatctatcatcaagagtagcatttttactagcagcattggagagag

SEQ ID NO: 182616 - DNA, 139 bp, Homo Sapiens
cttatgcaccaattttaattcctagtggaatagtaatggaaggcattaggctttgaataggtgtttggtgacagagcagaaattctaactttattaggtgactttggcaacccttaaagcctcaccaacttttttgtac

SEQ ID NO: 182617 - DNA, 378 bp, Homo Sapiens
actttgtacaaaaaagttggcagaaacttcaaaaactaaagaaaagaaacactgaaaagaacagaagatgatattcaagactgtgggacaactacaaaaggtgaaacagtaatgagaataccaagaggagaagaaatagaagaaagttctgcaacaaccatgtctgagaacttccagtattaatgtcagacaccaaaccaaagatccaggaagctctgagaacaccaggcagaataaataccaacaacctacacttggacatataattttcaaactatatgaaataaaagataaaggaaaactctgaaagaaaccagaggtggggcagaaaacaccttacctacagagacacaaagataagaactgcattcaacattt

SEQ ID NO: 182618 - DNA, 666 bp, Homo Sapiens
ctgaggtcagggagggtgagatgacggtgagagctcggacttgaacgcaggtcccacccagaacagcagccctaactctgagcaaggtctgtgctgttcagtagctctattgagatgtgatttccacactgtgtaattcattcacttacggtgtacagtccagtgggtcttagcatgctcggtgttgacagtcacatcgtcttcacccccaaaaggaaaccccgtgcccatgagcagtcgctttgtctgcccctcgtccccagccccaggcaaccacaaatccatgctctgtctctgtagatttgcctgttccagacgtttcacagcaatgggccttttctgcctggcttctttaacgttgcatcacatcttcaaggtccatcccagctgcagcgtgtcagtgcctcctggcttttcactgctgagtagtgcccgttgcatggacagaccacgttgtgctcacctgtttgccctaatgggcccctgcttggtgctttccacctttgggaggctgtgaatcgtgctccagccacactctgacccccgcccggctccagagatgaccaggattggcagcttcctcaccaaccagggactctgtggcctgcgcatccgcccatcctgttggctgtggtaccctgtgctcacccgtggcctttgtgctgc

SEQ ID NO: 182619 - DNA, 910 bp, Homo Sapiens
agaattactatctacactgggcccagaaagatatataggattaaaacatcataaagagaaggggtattagtgaaaaggccattctggtcacgaagacaaaggaaaaatgtacctccaacagaatgagaataatgagaggttcaaattaaatgggacataagaagcatgaaaattaagttgtagaaaagatttagcaaggacactaaactttcataaagaaggttttggtgtatcaaaaaccttgggagtttcattggtagtaaatggacaagataactatatatctgtgttcgctcaggactttacaagtttacatatattgatcagagttaagtccagtatggcaactgtgcaaatcaaaagactgcagtttggatgataattatataatcacttggtaatttttcaaagttcttatctttcagacgtagataataaatatgtacaaattaaattctataatgtctgcaatatgcttcaaaataattggggaaggggtataaatgaaaaagactgtccattatttgatagttgttgaaactagataataaatgcgtgggtgttcatcatactactactctaattatatatatgtatatatttcccaaaataaaaagttattgtttatggcctttacaggaaaagaaatggcatgtctgtggcactagaaatttaattaagatacaatatttttgccacagcactatattattacatgtttacataataggccaaattattgaaaattgaagacatttgtatatttaagatacatttaaccattttaagatgactaaaaacacattttttctgcaagaactttcaatttcaaatagcaataaaaactaagaatacatacactattctctcttctaagtaaaaggttttttcactcttttctctgtcccaa

SEQ ID NO: 182620 - DNA, 886 bp, Homo Sapiens
aaagctacagaaggatcctgagttaggatgatgacagttacaatagaaaggagaccagtacaagagacgtggaaaacagaatggatacaatttagttgaagaattggctgtgggtgaaaagaagaaatcaaagatgccctgaagttgtgagtttcaggtagcccctgagtttataatcctagttctgactcgtactatctttggatatactagctgctgactactaactgaacaaggtagtaaccttgtcatcttgtaacttacctaagtctgtttcctcctctataaaacaaactatcaaaataaagccgatgaaaagattgaagtaaaacataaaacccttagcacagtgcctagtatccattaagcagtagataaatgatggcggtcattattagggagtagggtaaagaacagaaggttaaaaacatgagtagcagtaaggacttttgggtggggattcggtctttctactacacattacacatacctctaagcagagaaaggggttggaggggagtttgataatgtgactaataatcctcctccccctgggggggatcttgataaaggatagccacccacatggaggcctaatataaactggattgcagaatgcacttgagctgggagcccaagcgggccaggcttcttgattcctattttatcccctttaacctaggatagctaggtctatagtgcagactcagacctaacttacactttcatttgcagctgaagtttcggaacaaagacaaagatagccagatcatattaattacacggataggcaagaaagcatgagccctgaggaggaaggaagggactgtccaggtgtacttacctcaaagatgagaaatatcaaagacaggaaaccctaggccaa

SEQ ID NO: 182621 - DNA, 883 bp, Homo Sapiens
ttttttcacttatggtaatttgaaattccccaaatggactggtatttaacttgttttaagccagactgctttcatgttttcaaacaaatggctacactttgaaggagaccaataattgctgtgtgaaaatacaatacgggaacattttcttatgttgagaagacctcagtagaattcatggaggatgtcgaatgcaggaatggggataatatagcaacaagctagtccatgcaggaacatttaaagagttaaaaagacatttgtaaagtaggcagcagctcagaagtaacctcttacagatatcaagaggtgataggagaaagattagctatttaagcaaataattaggacacaattaaggccaatttggcctcttgctgagggtaaattaaactctaacagaaacaggctaattaccctcaggaaagagggctaaaggatcctttactatcttttttacatttagtctgattgagtttgcgcctacagaaatgctatgacgaagccccctttgcaaggccccagttactgatcaaaatcttccagtaatagaggaggggtactcacgacactcttacccaactttaatcctgcaacaactcacatattactaaaacatgaaaacaacaagcttccatgaagataatttacttttggtctctctcactcctaacacccttaagagaagatgtcgcttcatagacacgtttaggaaatatcaatgttccagagcttgatgttggcaggtgttttctattagacatgcacatgggcacctgatcattctcaagctgagcatttgccaacccatgaagatacaactttcagccatttcttttaaaaagcccaacttttttgtacaaagttggcaattataaaaaag

SEQ ID NO: 182622 - DNA, 800 bp, Homo Sapiens
cccagggatgggttctctagcaggagaaccagtctagcagccctggtctccccatttctgcccttgcccagtgaccactgctgccctctgttcagctgggggcctgggcgtgggtgcagagtgcgtcgggccaggtaacagtgggtaagaccagactcatatgccctgtgcctctttgggcaggccatggtggtggctgctcactgtgggtggtgccctggtgcatttggtgggcaattcagcagaggtaagtctcacccccactcctgatccaggtacctagcgggttccttgcatgaaggttgcaatacccttgaaggttgccttctgccaggtcttggggtggtgttgcatagaaaggggtgatgtctgactcaacctccctgcactggccggtcacttggcaggagaggaaagcagcacctgtcaagcccaaatgcatatcgcctccgcgttcaatgtagatgctcatgtgcaccaggggagcacgtgactgtctacactggcccatctagcatccctatgcccaaggtgtgcgctcagccagctctgtgcctgatggacccccaccccttccttccaaccttcctgggtctggcctatgcctatctcctctggccagccccaggcacactccgtggacaagccatgaactacgaatcatgtactttcttggatttttcatctcagttaaatgatctgatatttgcattcaaaatcgacattgccggtctgggcatgatggcttaagcctgtaatcccagctggtctggatctcttaacctcttgatccgcgccaa

SEQ ID NO: 182623 - DNA, 919 bp, Homo Sapiens
ttggatttctctgcttttcaaaaaagtaactgtatacatgtagtaggccttgcttctaaatcatacatgttaaaacaggtcagcagtttcaacttttaattgtagtgcgggcattgaattatattacacttcaactaagcaggtttgtcatttacgccccaaaatgacatagaagggacaaatgacaagaaaagatctcatgttagggattaaacacagacagtttacatgatttattcaaatagtcattaaagctagtctcctaaattatttttattgtaacacacatatacatttcataatattaaatcataaaagcagcagtaagggttatgatgaaagaaagtattaaaatgagcctggaagaaagcttagatttaacttgctgtgccctttgccatttatttcactctctgtactcaggctcttcaccaaagaagtgaaagaggcaggcaaattgttgtgtcagctctttcctgcatataacacttttgtaatccatatcttgggttcagatgataaattcagtatgttacttacaggcaaaaaagaatagactgtatgctataatattaattctctcaaaaagtgcaaaaacattatattcaagtcatcttctctctgtaaattcagagattttgatcaatcaaggttttattggtattagttacatttataggaataagtaggcaaagatgataccatttaaatgtggaatgtagttattagtgctgtgactggctgatgtgaagtttgtctagtcctctgaatgtgattgacacagactattttctgtggatccaatcacactgaggctttctatctacaatgtagttgaccgtattgatcaaattaatggaatgatgactgcatttgtacttatttagtgcagtgtaagcttagctactgaaaggaatta

SEQ ID NO: 182624 - DNA, 554 bp, Homo Sapiens
gtgtgagacaccgcacccggccactaaacagaatttgttatctgatcatgattcaaacaaagaatctaaagttaggggctcagaaacttttttcttccaacaaataaatgaacaaagtcattgatatgtcttccctagcctttgttcttattctcatctctagtctgatgtcctttgagtagactgccttacactgacaaatgccatgccaaacttctatattcagtaatgtagtttgttaatgttttccttctcattcaggtattgtcagcagatctcatggatagaggtttaaatggcctctggtaatagtgacaatgcaagggcgagaaaggttccgctttcttttttgtgtctctcttttagatgtcagcatcataattctgccaactcagttagctaagtatttggctagttattttcattctcagctaaccagaatgtgttttaccttttaggtttaccgacaagactgtgaaactttcgggatggtggtgagaatgctgattgaaaaagatccttcattagaaaagtctatacagtttgcattgaag

SEQ ID NO: 182625 - DNA, 84 bp, Homo Sapiens
tccccccaaaattagccaagcctggtggcaggcacttgtagttctagctactttggaaggctgaggtgggaagattgcttgagc

SEQ ID NO: 182626 - DNA, 298 bp, Homo Sapiens
taactttttgaggaaataccaaactatgttacaaatagtctgtactgtttatattccatatacagtatttaagggttgtgatttccctctgaccttgccatcacttgttattttacatttgttggattatagcctttctagtgtgtatgaaggagtatgtggatgtgggtttcagttttgatgggccataatgataatgatactgatcaccttctcatgtgcttgttttccatttgcatgttttttggcaaagtgtgtgttgttcaactctttctccttttttactttgggtttttgt

SEQ ID NO: 182627 - DNA, 1540 bp, Homo Sapiens
ttggcaggacattatccgcatatatacatacctaagtgtcttggcagatggtgatagtggcaggaacaaaaccaaatgatctatagctatgtttacagtgagaattattcatatttcattcggtagctgggactatgatgggcaagcatgccactcaagcaagtgcatgccctcttaatacagccctcctcagtcttggattcacaatcttttacatggatttctaagttttcataaaggttcttttgtcagggcataactgctgtattttcataactagaagttgtgggtagagaacctcctattctgccatcttgctatgtcactccccttgtatgtttcactttctgatatgttctatgccaaattatctgatttcaaattcaaaatttctgaaataaaatgcccaagtttacacattgtgtaataagtacatgtattgacatggctcattttcattagagcattttattaattattgagatgcattttcttttactgctttacatttcatgccaaagattcaaaatcctggctcttcaataagaacatagtcacagttaaaaactgtagttatttaaaggattgtttttatggtacatctgtatatatttaatattttgtgggttagaatttttattgtattcaactccattttactgggcaatcttttttcatgtagatactccttgattatttaatttttttcacttctaatcttcatatttggtaattttcaaatctatacctttaatgatcaagtggtgtttaattcaaataaaaataattgggtttcacttgaggcaatttaaaatacatttataaatcagacatttttattgcctataaaagttaggtggtatttgcctgtataaatagtgcccctcctttgattataaattatttattttctttggtggtcatcagtgttttcttgtgtaggtgagtagtcaaaaaacagtgtaaagttaccatctgtttattgtcttattacatattattctgtgagacaaacacttttgcaatttgcaggtaatttctgaggaatgtaacctttttaagtaggtgtaaataatagttataaaaaaataaaattgccttcttaaacattttcaattgtacggtctagtgatgttaagtatatttacattatattgcaatgggtgtctagatttattttatcttgtaaaatacaatacccaataaaaaataaactgcccccctttttttcttcagctcctgaagaacaccatttgacttactgtttttataattttgactaatttttatattcttattagtgtcattaatgtctgtttctgtttgactatcttatttaatgtaatgttctcaggctttgtttttgtaagatatgtcagaatatctgttttaaaatgaaataatattctatatatatgtcacattttaaaaatccgatactgatctgtaaagggacatttgtgttgtttccaggaattgtcttttgtaaataataataaatgaacatgcatgtgtaaatatctatttaaagtcctgcttt

SEQ ID NO: 182628 - DNA, 893 bp, Homo Sapiens
ttgtacaaaaaagttggcactccaatcagatttttattcttgccattcttctaaaactactcctatgaaggttatctgtggccttcatttttgtatgtttactccaagaaaattgttgtgataaattaccccagaatgtagaggtgtaaaacaactatttattacgctcatgagttttgtgcattagaaattcagacaagacacagcaggagcagcttctctgttccacagtatctggagccttggctagaagatcaaagcctaggggcttaattgtcagaaatgatcgtgtgtatgtctgggagttgataccagcgtttgtctgggaacctcagttcctttcctcatggactttatgttgatctcttccttttgtgctactttgggctttcgcataacatggtgcctgggttgcaagggtgagtgttccaagacacagaaagccagaagttagctatattgccttttatgacttagtcttgaaagtcatgtggtgtcattttcattgtattctctttataaagacagccacaaagtcacactcagtttcagggggagaggaaaaagactctgtctcttgatggggaatgatgaaatattgctgtgagtatttttagaaaaaacagtttgctcctctatattactaaataaattgtcaattctctgtaatttacttgacctgtctccagtgtttgacagttatcattccttccttgaatacattcttggatttcagggtatcatgctcttgattttcctcttaacttactgagtgctccttctcagactattcagttggttcttacctcaatagctcctggcctgaagatcttctcatttctagctgcacactcttccttttcttatttcacctatcctcacaactgtaagta

SEQ ID NO: 182629 - DNA, 245 bp, Homo Sapiens
tgtacaaaaaagttggctaataacaacatgtaatgcttttgtatatatttagttttcacacttggaaaatcttttcctacatcctcgaaaacataaactcctctgtgagtgaaatgcttgtacgaagctctgccatatgtttgtagtgttattattttcacctcaagtaaaaagtctgttgaaaccacttggctgctggatttaaatgggtaatcaaatttaaaaatgacattatatgaatcttt

SEQ ID NO: 182630 - DNA, 116 bp, Homo Sapiens
tgtacaaaaaagttgggctgttgtaatttcctaagtaggcccatgtgactctgcaaaccctaggcctgagccagatttgtttgaaatgtcagccaaactaccagcaccttacatca

SEQ ID NO: 182631 - DNA, 399 bp, Homo Sapiens
ttggaaaagccccttaccctgccacattgggagacaaggaagaacctggaagtggttcctgctgagggtttgaaggggaaagggggattgacttaacccgcggtgcaggatatctacgggcgtaaggtggtgggatgggtttacaagcctcaggagaaggcagtaggggaggagaatgggtacaggcaatactagaattgtcctgaggagggggcggtgtaggtaaacaagctcatactgctgactggtaagatggtggctgggaacatggcggttgagaatacaacgatgaggcttgggctaaaaaacacgattgacaggaatatgtaggggttgggaggggtggactgcaatctgctggatctagcgaggaaaaaaaagtatggttgggaggagaaa

SEQ ID NO: 182632 - DNA, 219 bp, Homo Sapiens
ttgggacttaaaaaaactgctattgctgtatctttgctttttttcctttagctattcttatttactcttctattggctagggatatgttaaaaatacaaaaaacaaagaccttaaatttttacctggcagctgtttgttgtttgtttgctttaatcttgtaaaacaagactgcttttaagtaagtttatcaaataggaatttttaaaaaagttctttat

SEQ ID NO: 182633 - DNA, 903 bp, Homo Sapiens
cccagggctgattcaggtccatttcagcataatttttgtggaacaaattaaagaagcagtaataccagagctgtccccacttagggaataaaattttcaaggctgcaagaaactctctgtctacaaaccagtggccattgctaaggaggctcggggaggccaggggatcactatcagtgggataggtgctggcggaaccagggggtgtctccttcccagtttcaaacttgtcctcagaagggggactcaactggggacggccgtgagctgtggtgactgaggtgcacacagcctcccagaggcagaacctgaagagcgccacgtggtagctcatccaggaaatccgtgctatttgagttctcatcggctgggccaaccacctgcaccagctgactaaacagaaccgttgctgtcccaagcccacgagacccagtgagaggtagtgaagtggttgcaaaggtttatgtgggtgggagctggagtgtggcctctgccatgttcacacgggtctgcagaccttccccacgaggaaggtcagtgctcatgcgctctggccggcaggagccggtgggccacccaggagagctgctggctgctcctcccttgcatggtggtgatggcctcatggcgcctcagccctgctctgcctgctgtgctctccagcccccaaggtggtcctcaccattggctttggtcacttgtgcccgcttcacactaggactagtgaacactctgctcgttcctggtgaaagagtatggggagtgagtcccaaggcccgctcacaggcacttctctcccaggtaaaggtggcgaggacagcggacagggtgctgctcacgctctgtggccctgaggccaaggtcgcatgtttcccacgacccagagggtggcagcctttccaa

SEQ ID NO: 182634 - DNA, 912 bp, Homo Sapiens
ttggagcatatggccttagacccaactcagcatttctggtcattagcagcaatttactgacaaggaacctgggcctctttagtgagatcattcatcgtaatggattctctgtggatttgtgttcttttgttgattcagactttaaaaacttaaggccaaatcaaaataatactgggctagattgttaggtctgtgggcaccagtgtgtgacttttgctttaaagctgtgcttacttctgtgagcagttagggatattatttgttcctttggaaaacattaattgggtatttcttaagtgctgatttggggagtggtgggaatggtgagttgaaaaaggtgaaatcctgttctgctggttcttataatcaagcagactattgagtgatgcagcatttgtttaaaatcacactttactgtttattagattttcttacgtgttacttaatcctgtcaactgcagatgtgagatagtttagctgctaaaccctagaggtagacctggacccaaatctgctgattcagtgctctgggctctctccacttcatcaccctcattggcaagtagtcgactgggcgggttgttcaaagcgtgccctcctcagcttctagaccctcccattcatgccatgtccagatgacatctccctgaacacaatgctccctctcagacacatttggatggaattatgcctggcctgaatgggaaccttgtctgctttctaggtttctcccagacaggggtaatgtttctagagtccatttactagagcagcatgatgggactggggatgtccctttaaaattaaaagttaagtttctctttaagtgccaggattgagtggattgggatcctgtatttaaccttaattcccaactgagatttttgtcttactcctgtgttcctttgcttc

SEQ ID NO: 182635 - DNA, 477 bp, Homo Sapiens
actttgtacaaaaaagttggaatggttgtgttaatctggctgatagagggatgggtacttgttggccctagaaatgggaacttcaaagatctgtgtttatctagccgtgaatgacagtagacagtggaaagggacagtgaaatttgtgtggcagagatatgtcttcttaactaaagaggtgactcctattgtgaagtaggttaatatgtcactctttaccatggcctaaatgaaatatgtattcaagctagtgtttcttaagtttttgagtcataactcctttgagaatttggtgaaagctattgactttgcccccaaaaagttcatgtacttatcatgtaacttatcctcataggtagtgtttcttaatctccgcaccgttgaaatttgggctggatgattctttattatggggctctgtgagacctggggattgtaggatgtttagcaacatccctgtctcctacctgcttatcc

SEQ ID NO: 182636 - DNA, 941 bp, Homo Sapiens
aaaaggatggaagcacttttcttttaaacaaaaattagcttgggtacaaaggaatcaaactaaatactaaatactaattatttaagtctgatttgaggctttaaatttgagataagcaatccagatgaaatttaattcactgatttaagagcagaaatcatgcaatactttcatacaggaaacaatccatcaatatacctttaatattattaaaccaaatctgaagagtatacctcaaagtatacttcctaaagtcatggaataatgtataggaatggtgcaaactggctactgttcctacctttttatgagggacacccagtttttgccctaagcaatgccagattaagaatataacaaatatcgagtaatttgatatgttcaagaattgctgtgggaaagacattataccaatgattcaggtatacatattctctgtggactcaatacaataccatcgaaaacagtagcctcaaatcacaagcccactggtttagtataaagaaaaaccatacacttaaataatttattctaatttaggagttttgctacacatactccttaaatatgattaatatttcttaccaaaaatctgcttttccaatttaaggaattacttacggaatatcattcaggctatgtttaaccagacagacctgcttttgtaaggcctctccttcctcatactttaagtatttaacgagtaatgcaattaagaaataaacagaatcttcagaaaaggaaatacacactggactaaaacaattcttcaaagaaagaattagaacaccattcctcagtattcacaagtgttcctatttcttttgagactatatttcatgccactccactgtactttcttccattttgattatctgctatcattctacacttccccttccccaactcctgccattttaggaaaggaaggtcagatccaa

SEQ ID NO: 182637 - DNA, 622 bp, Homo Sapiens
ttgtacaaaaaagttggtgcaatcaatagaaaaaatgtacatttacagcacatctcaattcaggctcattacattccaagtactcagtagccagatgttgccagtagctaccgattgaacagtgcagttctatagtttgattgtatttgggtttggctttttttggcaagactgcttcacaggtgttcgtgtattcttccatcatcaggaggtggtatataatgccttgttttctctttttgtgtgatgtttaatagctgttcacgatcagtggctaggggttgcagtgtgataattgcctatctctaccattccttcttcatttattcactggggtaggtctatgaaaaaaatgttttgcacttgtctcctattttggtactcagtatacctttcataccgaacaagcaaaatacgtttcaattttaccaatttttataataacaacttgttcactagcatcctccaacgatgaccaattatttctttgtttgtttgttttatttttatttacatttctatcttctctactaagctctgagtgaaaaaggcagagattttgtcttgttcacctcccaaccctaaagtctagtaaaagtgtctggtgtagagtggatactga

SEQ ID NO: 182638 - DNA, 304 bp, Homo Sapiens
ttttaaaagcaattaacattgataaatttgctttatcacatatttgcccatctttctgtccatctgtctgtccgatttactgcattgcatttctaagtaagttgaagacagcaatacattttacccttaaatattttagccgcatgcttgattctagaattcacattcaaaaattaaactaatatcatttattagacttaaattaattgcaagtaaggtttaaaaggctgagtgtgactacaaagaagtttggaattttctaacgttaaaaaatattctcttgttcagaatattggctgggtgc

SEQ ID NO: 182639 - DNA, 943 bp, Homo Sapiens
actttgtacaaaaaagttggattttctttagatcagagatctcataggaaaaagttaaagtggaagagagagctaagattggaggtttgaagaaaagaaactcagaggaatatggaggtttgcacacggatagggatagatgactgggacagcttgattcttaccatgacaaaaagggacgtggctgtgaaacatctcaagtccaccaataactctttcatggtcacatagtggtgagcaagatagctgggtgtcaattcctgctttcttaattgctagtcccagtctattttcaggtttgtcttcataaggtgtttcttatttaatggacattttaaatttcaggatttatcataatataagaaacacatttcttttaaaaagataaatccaaatgctagagaggagttttcattttggttgtctggatagggatattggttttaaaaaaaattaattgtagtttccttttccaaaaatccagacattttctagagaaactaattatactctaaagaaactaaaaagggaagaagttcctttaaatatgatatatatcaaagtagctgacaagccttctaaaggcttttattttaaacagtataattggttttaataattgaattgtgttacaaaagtttatgagaaaatgttttatagacttccaggtaagggtgagggtaggggctaaaattcaatttataatgacaaacagtattaaaataggtgaaagccaacatatgcactaaaaactagagaaagatggtttccttaagcagacacatcaaggactatctactaagtgcatgtagatggggtcaaaaatgctggcggtgaggactaacacacaatacctcctactgtaagtaactgcttcaacaaaagttcatccaggaatcctccatttgtgaccttatctgtgtatattgcatcctcatctttt

SEQ ID NO: 182640 - DNA, 243 bp, Homo Sapiens
ctttaataaccccctttgtacaaaaaagttggggacccagggcagaaggtgtgagcagagtggctgggtctgctggagactgctggacccctcactgctctgccctccccgcaggcatctgcttctgcagcctgaaccttaagaccgtgatgggccaggctctgatgggcctgcctgcatgccggggtgcctggattttgatttggtgctaagagaggtatatgttgtacctctcaattcctg

SEQ ID NO: 182641 - DNA, 965 bp, Homo Sapiens
tttgtacaaaaaagttggggcctgcattcaaggaagctgatataagggtatgaataccaggaggtaggggtcattcagggctaccttagaggctgctaccataggctattatgagcaaagctgctgtgaatgtttatatataaatctttgtgtagacaaatgttttcattttatttcaatgaataaatacctaaaagtaggatctctgacttttacgatgtgtttaaataaataataaactgagaaattgttttccaaaatggctgtatcatttttctttcccaccagcaacatcagttctaattgcttcatattttcaacagcgcttaatattgtctgccttttaaattttagccattttagtgacttgcagtggtatttcattgtggtttaaacaggttttctctaatgactaataattttgagcatttatttatgtctttattggtcatttgtacacttcctttgtgaagtatctgttcaattttttttgcccatttaaaaaattgcattgtcttcttgttgagttgtaagttttttgtaaaatattctgaaaaccattcttttgacatatatgtcatttacaaatattttcttccagtctgcggcttgtcttttcattcttttaacactgtctttcagagagcaaatgttattaatttgatgaggtccaatgtatcaatattttcttttatggattattcttttgtgttgcattctaagaaatccttacctaacccagggttacaaagatttcttcctgtgttttcttccagtaacttgatagttttaactcttactctcttagatctatgattcatttcatgttaattgttgcataaagtgtgattgaaaggatcaaagttcttttttttccatggggatatccaattgtttctgcatcatttattgataacaatcaccattaaaattacttcggcactttgttggaaatcaattgacct

SEQ ID NO: 182642 - DNA, 863 bp, Homo Sapiens
ttggctaatagaagacatgtaatctgtttaactttttgcttaaaactttgctgatgttttgtttttcagagtcaagaaaacttttattttgagctatttacagcttttaacaattgagtaaggtatactcctgtgaacaaaatttggagtgtatttgttcctctgctggtttctctagaattcagaaactatttgtgagtattcttatggcaatgtagttatttgcataagtgcaacaagaatccattttcttttgcaacaggacacaattggagaaactggtggttttaccagtttctgatagaagggtgtgcttccctttaaggaatcaagcttgacttgcagagccaaaaaaaaggagaaactggcctcataccttgtctacacagtccttgtacagggctcctaacctgtgatgagtaaagaatgtcactttctaacaggtccaggagccccaagttatcttgggacctcaagaagagaggaatttacccaactcataggtattggagggtacaaacccattgctgggcttgactttaaaaagtcttttctgatattccttatggaacagaattccatcagagccaattttaaaagcatatgtgaaaaataattattcttgctgtactttatgcaaataatcaggccaagtataagactaaagtttattttgcaaacaatcctattatgatttgtttttaacaaaaatgaagactggagagtttcaaaacttatcacacttgtcattaaattctagttttattagttgtttttaagtttttgtctgtattttagactaacccctacttattctgtgaaccaaccagtgatctctggctgaagctcagaagaaacaaggg

SEQ ID NO: 182643 - DNA, 488 bp, Homo Sapiens
ctttgtacaaaaaagttggcttgtagccaagatccgagaggttcgtgttgagagcgggctgtgccacagttccttcactcacaccttccttaggagctgtttagggccaggaactcgtcaaggtgctcagtaaggccaggcaagggttccagcttcctccctcttcagacctgttgtctgcgtcacctctctgccaactctcagtgttttctctcaaaagacctgttcaaagtatgttgatttactcaatattttagtctttctcagtgggagaggcgcttcctggctgtgtctagtcagccgtcttgtgctgaatcactctatatcttattttgattaccatttcctgaattatataattaatattattaaatagcttttcatatactaactggccatttacaattatttttcttggaattgcttatttactacatactttgcccatttttctgttagagggttttctttttttggagacagggtct

SEQ ID NO: 182644 - DNA, 1135 bp, Homo Sapiens
gagcaatgcttttctctataatagccaactttgtacaaaaaagttggctttcaaattatatttcagtatatactctgagtctacgtgtatgctacaaaaggtgaaatgaagttagcttatttttcagtgagtttaggctatattaagagttaggtaagttaggtaagggtgaaactgctttggggcccagactgcgctggaatgtactgtttaaattcaaaggtaattgatggccagtgttcagttgctctatttgtaacgtttgcatgttggtctggctgaagtatcaggaaaacacaaaattcatgaaaatagcaccttttataattttatacttttataaagcacttgttaaagaagtatagcaaatttctatgtattttaacatacaagtcgctgcattttaatgttcatttttggtatagctatggtaacttataatagtcatttttatattcataacttgttttctgaaagatatagtcattattaaaataaacattcatgtaaatggagtaaatcataggggaatcaatcgtaataaataccttataaattataaacttgtttagatactagatttctataaccataaattttatactgtaaagtctgtttaaaatagggtttaatgaagttattttaatttttagagactcccctctaaataatttactcctacattgtaaatacattgatgccaacaaaattccaactgctactaacaaaggtttggttggtgataagctaataacagctactttgtgtaggaggtaaatatgtgtactggagggggtaaaaatccatttaggttatggcaaagatgggaatcaaactgtaaaactcatagccccataaaattaatattctttgttaagtgccagagggtttaagagaacttcttgcttagagtttattgataataataatgcttcagaatatcccatttaaatgtacagtgtaaatatgtaaaatattttacttcccaggcaagtttgtggctgtattgccacttagtggctctttgtgactggcagttctgtatatctgaaacaaaataagctgtaagcacttttgttaaaactttgtcaaataatccttttatgtacttgttctcagacctgttctctggtta

SEQ ID NO: 182645 - DNA, 1111 bp, Homo Sapiens
catagaaataattgttgaatcaacatgtgcataaataaatgactgatgcaatgggcaaaccctttgcagtgctcttccctgcttaccctgtataccataacctccactgtggcagggactgtggtgacctcacttgccatggcctcccagcttattcttagtgtctgatacacagttggatgattaataaatatttgccatctcagtgagtgtatggacatggtgagtcctctgccaatcctcccaaatccatgcctgccacacctccacattgcaaacctgtcctcccacactgcagcaagagccaggcagggttctaccatgcaaaatggaccttcatgtctcctccacggctaccctaaggcttcagaatcttctttagatggtgggccccagaaaaatagctttagctttagttacagactcacagattttacttataatcttagggcattcacaggtctcttgaagtccatgaatgtcccacccaaaagacttcagagtaagacccactggcctacaggataaacacagtctccttagcctcagcgcattgtaacctggccacagtctgcctctccagccctacccttccctgtgatggttaattttatgtgtcaccctgccctgaccaagttagtacacctctagccttcactcacactcctttctatgttggtcaaaaggcaaaaacctcctgagtgacaattaccccttctcaggtagcagccaaaaagagttaattgtttctcatcagaatctgcatgtggccccagagcatcatgtatagaactattctggagtccttatcatcatcatataactacgtgtccactgtgcatctccagaaaagagatcctattatagtcatctttgcttctcagtttccaccacgatactaacaatagcagccattcaacagatggttgtggaatgactaaaattctgtgttccttattgcatgccttgccttcccaactaagcttttcaagagtatggatacagtattataagtatttatataacacccacacacagagacacataaagcacctggaatcgcacttttcagacagaaaatacccaataaatacttaccgaataaatccaa

SEQ ID NO: 182646 - DNA, 359 bp, Homo Sapiens
gtgtcaaccaccgcacctggcctcaaatacatttttttaatggccttgtctttcctggttttaggcccttttccacaatttctgatggaaatacagaaaccttgccatcattcttactgctggtttgcatctcatttatggtgtatctgggatttcttctcatgaacagaaagattcagtggctgttatatgccttgtcaatttaatgtattgccctatcctctttttgatcaaagatagagactaagactgggaattatgacagaaaaagtcatattttttctttaaatgattttgaaatgttaaaataggccaatatgagtcaaagtgcaaattttttggtgagtaggttgacaaaa

SEQ ID NO: 182647 - DNA, 1440 bp, Homo Sapiens
  misc_feature (76)..(85): n is a, c, g, or t
  misc_feature (577)..(589): n is a, c, g, or t
ctgaacagtaagaaaagctcattcagaacaaagttcagaggaactgatagatagctctgctgtcattgagtggttnnnnnnnnnngggtttggagaaccggaagaaagtggtctttgaaccctcctctgacagggacctcaaggcctttattaaaagccctaagacactcaataatccatgtttacaggatgctatgaaggtttaatttcctgcttcaccatggatacaagcctcacaacatctaaaacgtaaacttcacaagaatgtgactcttcaaagataccagacctgtgcctgacttgcagcctgcctcaagcatttgtcaaatgaatgaatgaatgaatgagtaattgaatcaactcccaaacaatcaaagtgaaagtcaacagtgatcacaatcctgggtaggaagagattcaagagtatcatgaaagccagaaattcttccttcttcaccaaaggaacatcagaagcagtgtgcatgtgtttattaccaacatttctggtagaacacgtcagtattttcagatttaactataggtgttatttacttgtctctaacgtttttcatttggnnnnnnnnnnnnnttaaatgcttactgtctgggacagatccggatttctaaacagagaggccaatttagcttcacggggtagccctgagagtatgcacctgtgttggaagtaaaagctgtctccttgccctggagaatgccctctccctctgccacttcctcttttctcctctggcctccagaaaccaccaggaagagaagcaattaggatgagtgaacaaaacgctattttcaactgtcattttttattggtgaaaagaactctggcctgggaatcagattcagcgcctgcctttcccacaccaccccttccctttccagcaaactactgaatctgagtagagaattcacttccttccctgaaaaaaatggatgaaccacactctcaaagactctttctggctcaaacttcttgctgataatccttcagtggcctgttgtcactctcagttccttaccacagcaaaccagactctacatgatctgaccttactcttttctactcctctgcttctccccttcagacaggacacttctcgcataaatgcccccagttcatccctctctcagagccctagtaactccgtccgcatcccagaacgcagactccccaggtcactgcacatctgtttccttttcatcgattatgtcttagcttcattgtcacctactcagagaatccttctttgacctgcctagagaaactaggccaaacagcccattcagtcttcatcatactacctcattttatttgctttttagaacttaccaagtcctggaaaggtctaaattatttgcttgcatgtttatcgtttatctttccctattaacatagaagtttcaggagaacagggatttagccaa

SEQ ID NO: 182648 - DNA, 780 bp, Homo Sapiens
aatgtagacagagtcttatttcagaggtgggtactatgaaatcacagactgttggcagatgtttgagtacaatgactttaatttcactcttgactaatgctaatgtcattttcattcccaggaagcctgtcttggctacagtttggtggagggtcaagaaagatgattcagaagtatgtcttttaagagtcttggtgacacgcacagagcccagtgactttagtctgggtgtggtgagctgacctcagagtctattgtgtgagtgtttttcacttttgagtttgttttacttttgtggtctccccagccttatttgtgagtgcaatctaaggaaagtatatttgttttgcaagcacactatggtttgctcagatttttaaatgacatatgtaggattacaccctctttattctgtcagtgtttccattaaaaattcaaactttctgggatttattacacagccataacaaattgctccaggcagaaacttggcaaaccctctttagtgtgggagaaaaattcttttcagcattttagaaaagataaaaataaataaatgtttaccaactcaacttactcatgtgattttgtgatagggaagacattcaaataaaatacacattatatcttcacatttgtttgtcgtacaaatttgaaatattaatattagcttataagtcaacttttgctcaagagttgtacaactgtcccccccgcctctcaaatttttaatgattctaatgttctctgcatctctttctaagtatttggaagtctcca

SEQ ID NO: 182649 - DNA, 1019 bp, Homo Sapiens
ttggattccctatttttatgtttatttaatccataacagaaatgagtaagggtagcacaaagttctcattcagtaactcaacagtgtgatcatcagcccagtgataaaaatatacatactgaatggaagtacctacttaacatcaggaaaatattcctggagaacttaataaatcaggaggtgaggggtgagatttttttctgcacacagagggaacaaaagcacaaagaagcaaaggcactctgtagcatcagagaaccacagtcacttcagtagatcagaaatatgaagcacaagacaaggcccgtattgtggaggatctcacaaatcatgtgaagggattaagactgacataccaggtattacagagttttaagcacaggaatgacatcatcagtttgtaatacaggtaagtgacagctgtgtggcagatggccatgagaggaaaaagctacaggcaagacaaccagttaggaggatgtcttagttgttgaggaagatgaaggcctgaactaacattgtggtattagtagaggagagaggacagatttttaaagttttaggaaagaaaattgggcaagacttacaagactgattatatctaagaggtaaagatggttctctgggttcctgataaaagtgtctagatagatggtagagggcaattccaagagggcaactccaagatagaaaatttggaaaaagaacaaatttaggggaaacagaagataagcgagttcaggttccagtcatgcggtgttggagatgcctgtgtcatctgatgaagactagtacgcagctggatagcagagtccgaaactcaggtggaggtgaagttatgagggaattatcacaatctagtttggattcatatttcttaaatatgtatgacaacttaccaactggaatgttctagctaatatctcaacttagaatccatctcactaccaatgggcaaacacttgtgttctaaagttacttgcaagtagtttatactgccaacttgatatatatacatg

SEQ ID NO: 182650 - DNA, 1354 bp, Homo Sapiens
  misc_feature (206)..(243): n is a, c, g, or t
ttggattgttacagcagcagagctgagtagtttcggtagagatggtttggcctgtgaaggctgccctttacagaaaacagttgcctgcccctgctcttgcgcattgtattttgtcttcactgttcctgccttcttgtctggttctaaggaatgaaaggaggacaccagctcagatttcctaaaaatgtctttatatataatttttnnnnnnnnnnnnnnnnnnnnnnnnnnnnnnnnnnnnnnggatgaaaatgaatgtagcaggaacaactgtgaggtgtcccagctacagtagtcattgagtttttttgcataaaaatacgattgtaaagatagattccataaaatgtgatgttctttgtcctggtactgaccccggtagagtgttgcctatgtttttggcttaacatttatagggcattatttgaaaaactgaattctgatccaagcagagatgaggggaacaaggctgagaccttaattactggctctctcttgtcagagaaaggtgctttttgtcatattcccatgggatttgattgaccttcggacggcctgtgtctgttaggaggcatttctatttctcaggtttgagggctagtcagtaaaatttggatgaatttggactggatagagggactcaacctgaattgtgaaaatcctgagttacagaatttttaaaagttctatgttttagttatatataataatttagctattttaaagcacaaaacaaatacgtgcacttggagaatggagtccacagcattcagcaacagtggcctgaagcagagccccagataaaacactgggttgaatgtcagtgtgctgacatcagtgttttttattatatgactgtgttctttctataaaaatcaggcattgtgagaagcccagatgtgaagcttggaacaataaaaccaaaggaagaatacatcagaggtttgtaaaacttagataatatggaagtaattaaccattagactcacgatatgttctctaacagtaaccttgaaactccatgttttgtgtctaatgacttctaggacacataaagacaaaaggaaagaataatatgctttcagagcatgaagaacttgctttagagtccctgtgtcttttgactcgaatacacaggattattatatcatgcagttatgaatctgaggaaagtatgacatgatcgataggtctaattctaaaatatctgataaagaagttaataccaaaattagtgagtttcctaactttaaagtgaaataactagataaagaagaactaaatgcaaagctagcagaaggaaggaaataataaagattagaacagtgttaactgaaatagagaataggaaagc

SEQ ID NO: 182651 - DNA, 273 bp, Homo Sapiens
atgagccacaatgtccagccacggcagctttctaatatattaatacttaaagacttttctgatgagataagtggtgagaataacaaaaattttttataatgtgtggtggaaaatgtcaacatttggaagatttgcataactcaaccagtagtttccaaataatcaatgcttgatattaaaatattcataagtaaaagatccagtcagtgcacaggatagaccaatgtattttaatgtaacagaagtttctgtcatagtccatgttgtaagtag

SEQ ID NO: 182652 - DNA, 955 bp, Homo Sapiens
gaacaccatattgaaacctagtgttgaaataaaagaaattgtaaaaagaaaaaggcagactctagacaaagaaaatggtttaaattgtcacgaggagtgttctgaaagccaatgcctctctacagttaacctgagtatgtattaatcctgagtgtgacaggtaattaaaacacattatttgtctaaccacacttcctgggaggaggaaacagtagcagagccaaacagatgaagacccaggacctaggcacaatacttcaccatgcgcaacagcaaagtgcgtgcaccacatcctagaaaatgacaggatcaaaacctgaaaggtcaaatctctcgccaagtcaacgggggtaaggatgaggacaaaatggtagctttctcctcaccctctgctctgaaaagggcaggggcttctcaattttattcatcacagtcatgggaaagccacctggttgaatggcacaggagggtataaccagactcctggacttgtctgtgagcctcctaataatgcccaaagagaaaggatagcgcttctcaattttcacctctcttcctcatccacacttccactgccttagttcagtcagactggtctccatgctgctactctatattgcccagttcatcttctgtatagctaacagagttctttctcaatacacattttttaaggtctaggaaatgacaagaaaaaaaggccagagacaggtgcagtgttcagattagacagagacttgtatgtcatgaatagatttttctcctgattgtgcgtgacctactcaacaatttttcaggagatagttaaaattttattttaaaaggatatgtagataggaaggcagagaccaggagtaagcctggaagctgaaggatcacaaatatattacagtacctctgctgataaagagtacaggtctaaaccggtgccaatggcccaacttttttgtacaaa

SEQ ID NO: 182653 - DNA, 785 bp, Homo Sapiens
aaaaacgagggtaacttaaaaaatggaaactttcaaatccatttatatttttattataaacaaaacttaattaaaagtttaacaaactggctgaaaactcaccaagtgtcagactcaccagcaatttaaaaaatgataatttaccagcatctcctcatcagagttccctctccagtaagggtatacctacatctgtaagggtcagtggactctgaatcaattttatggttgttttaaaatcaccgtgtattaggatactaatgatagtccctatatccatccagaaatgctggcagaaagcactggccaccatacaggacagaccacaccacagctccatacccagcgtctgcctggaggctcccccacgctgaggtccgggagaatgcctggtttcagtcatttccggactaactgtgacaacgcgtgagcagggagcaccgtgcgagtctccgggagggaatcctcctggggcccagagactcctccacccctggggagggcagacaggctcgggagggcctggccaggccactggaggctggcagggagcaggcatgtccacccgcaagcctgggaggctaactctggcattcctggccggagccgccatgctcattggtgggccagtttgggacatccccgtactcaaagaccatatggcagcctctgggaaaacaaaaccaaaacatcaccttctattaaactctgtatattattattttttacaatagaaagttaaaaatcaagacttagatttactatacattttttctctcagccaa

SEQ ID NO: 182654 - DNA, 863 bp, Homo Sapiens
ttggctcaattggtatatatttgatattttgttaaggatttttaattctgtgtttttgaggggtattggtctggttttcatacaagcacatgcttatcttgtgaaataagcagggattcttcccctcttctattttctagaagactttgtatataattgatattgactgaaatctcttaagccatatgagcttagactactgtttataggaaaaacttaactatggattcaatgtatctatatattaggacagggctttggttgttcttttttttcctttatctcaaatttttaaattttgtacctttgaatgaatttgtacatctcatcaaagttggaaattttagtaggatatatttgttcatcatagccccttattatcttttcagtgtttgtaggatctgtagtgagagctactgctttgttcctgatactggttatttcattgtctcctattcttgaccagatctctcttaaaaccagattttgctttcacttatttttctattacctgctttccatttgatcatttttctgcccttatagtcaatatttcctttctttaaactcattttgagtttaatttgctctcatttttccaggttataaagcattttaagcaacacattttcctctaaggaaacagccttacctgtatcctacacattttaaagttgtgttcttatttttatttagttcaaattatttatgagaaattatgttttacagggatattgtttaatttccaaatatttgttgattttctacatatttctactgattcctaacataattattttgtgttcagagaccatgttttataatatatcaatatttttatttcttacacacttgaaaagttt

SEQ ID NO: 182655 - DNA, 913 bp, Homo Sapiens
  misc_feature (260)..(461): n is a, c, g, or t
cggtaattttctttaccaaaaaaagggtaggaaggttaaggaatagaaaaaaacattagttttctgagattctcatactgaataaattgtcatacataaaccagagtcattaacttaagcataaaaatcagtttatcactgtggtaccacaatctctacatacttatgttaaaaatttccattatttgtttgtcctataagttagaagagagaaattacagcaagtgtttgttaaccacagtaacaaagggcagtgatannnnnnnnnnnnnnnnnnnnnnnnnnnnnnnnnnnnnnnnnnnnnnnnnnnnnnnnnnnnnnnnnnnnnnnnnnnnnnnnnnnnnnnnnnnnnnnnnnnnnnnnnnnnnnnnnnnnnnnnnnnnnnnnnnnnnnnnnnnnnnnnnnnnnnnnnnnnnnnnnnnnnnnnnnnnnnnnnnnnnnnnnnnnnnnnnnnnnnnnnnactcatgttcttgaccattctcctgctttgtctttttattccttccaaataagttcacctctaatcaataaaacctactgaatatctaaggcattatgtgtgggggatagagggggagggaggtaacaacgaagagcaaggacattcatgggattttctatgtactgtgatctcctttgggagtaaagaactatatgcaacctagaggaaaggatgggggtaggtatcaggagaggaaagagaacttgactgagtgcctactctgggcagtactttaatcttcttagcaccctatgagataaacggtgttaacaccaattttatagatgacatatctggagctcagagaaaccacatctcttgcctaaggtcaatacaccatatatgagagtaggggctgtccgtatcaacatgctttcttgagaaactacaagtgggccaaagacatccaa

SEQ ID NO: 182656 - DNA, 825 bp, Homo Sapiens
tcaaaataaacttttaagaataagtacacttacatatatttggactgtaagaataagaatttttccactattgctacagaaaaggaaaaaaaatgtccagagatgtagctctagacaagcgtttgctatgtggatttctttcacagatctaggtatctagggaggagaaaaactccataacaactgaggtctcctacttaatatgcgacaattctgcagtagggaagtcccaaagttgttggtgacagaaggaaaacaactggggcatccaaaaaaattcaaatgattgtggcttaagttccaaatgttcatgatgcccacagatgctcagcgtggggaggtggctcctctccatctccagtagaaaacagccacttcccacatctcacccgtgtttaacatttctacaggacacctatctaggaccataacaccaccctatgtaaaactaccagtgctaagattctgtcattctggttcttttcagatagtaattatttctaaaactgttgaaaatgagggctgggcatggtggctcacgcctgtaatcccagcactcactccactccattcactagcctcctcctattttcaaacaagccaggcatgcttctgcctcaaggtctttgcatttgctatcctctctgcctacaacactcttcccccaaacacccacaggctctttccatcaacttcttcacaacttctcactgaggccttccctaaacattctctttaccagtcaactcttcagcccttactcttgcctgccttacatttctccaaagcactcattgctttctaatccaacttttttgtacaaag

SEQ ID NO: 182657 - DNA, 919 bp, Homo Sapiens
ttggatttgctttagaacttatgtggcatgacatagctcgattgtatgagatttaacacttattatgaaacaaatcttgaaatttgttttcactggtagagctgatctagatttgatgagcagattgagagacgcttctattggagcaattcttgtaattcaccagaggtatctagttgttgtataagtgcactgagttagatcttaaaagtttgatcaatcattccaaaccatttcaaatatgaatattagaaagttcaacttagaagcttcccttttgtgttttcatgcattcaggtaaagtcctatttatgactcttagaaatgaggtaggttttagagctagtcttctaactcgtgaatagtttaaggaccacatcagttgcaaaccaagtatttgttgaatcagtaaaatggcactatcagcatgaagagccgagaagcagatcctgaggtgtgtcggacagtgttttaggtaattcagtatttattatgttattagagaagacttagcgtaagaaagaaatgctttagaaattccagcaagtatttataaggcctgaaaaaactaaaatttgaacaaaaagggaaataaatcacacatttgttgaggctgctgctttaagtattagctaattttcttgttttggtttactttgatttatttgattgaaccctggaagtattatttttaccagtcccacatttaaagacctagtaatcttgatggaattggtaatggcagatagggtttaatgttgttgacttttcaaattagaattttttttctatgaaacttaggcttttatataacaaagtatgttatctcattgttaccgccgtttttcactacaacctttttcagtatgcccttaaaatgtattggaaaggttccatgttaaatgacaatatctttttc

SEQ ID NO: 182658 - DNA, 406 bp, Homo Sapiens
  misc_feature (106)..(114): n is a, c, g, or t
gattttggtaccaagaatggtactagaataagaaagttctaagaattagttttttgaattgtttctggggcttctgaaatactgcattcttttgtccttagctgannnnnnnnngtagggttttgtttaatttcctaatcttttcctttgtgtatatattttggatattttcttaatggtaatctgattggatttaaaggggctgatgattctgtatccagtagtaaagagagccctgataatagtccatgcttggatactcctaatcaactccttataggaagcaaggaggctgtgattacaggcctgagccactgtgcccacccaaaatgtgcctttgcaaagtttgcgaaatcagttttgtatcccaataaaacaaaatatttatgaggatgctaacattttc

SEQ ID NO: 182659 - DNA, 321 bp, Homo Sapiens
ctttgtacaaaaaagttggctttgacttattttattgttgtgctgttgtggttgttgagaaaggaataggttagattgaggtcatctgactgaatgtgatgccatatttgtaaattgttaccattcttttctcaaattttcctttaatcaatattttacctattttttactgcgtggagttagaaattgaacaaaatggttttcttttcacaacccattgtagacagaataaaatgatagtatatgttaatgctttccaaatctaccttgttttacaatgtttttagtactagaagacctcctccaacagagtaagacagt

SEQ ID NO: 182660 - DNA, 905 bp, Homo Sapiens
tttcattattaattattacaaaaatatttaagtgcagatgttttatataatttagtggttccaaaataaatctgtattctctttatgacatgggattactaaagaaatgtcaattgatataatgcaacatggctttccaaaacaaatgtactttaaatgtaattcataagctttatagcactctaatcataattactgaataaatactttttgccttttaatttactcctatggcagagtaaatggagacagctgtcttatgtgtagcctgaaaagagaagtaggtatgtgaaatgatatgcacattataaccataaaatctgaaagtatctatatgcataaaaaatagcagactgaaaattctagccctctaacagtgtctgtgttagggttgtgcaagtagaagggattctgtgtcttttaaaaaacaattcctacattttctctaatgtgttttcattagttttgaactttgattaatttgtattgtcttttctcatttgttaggatacacatattcaaaatacaagctatttctacaaatttctgaatacattttcattaataatagcatactgtggatcttgttaataatgactatcctataaccaagaagcaagtctgaattaaatcattgtagactaatgagaaaagcacagaggtggacttataggtcaaattcttgccaagtgaaggccaaatgataattcaattcatacatgaaagattcacagcagtcaaacagaaaaacactcatggaagaatgagtcacatagtacctactaggctaggcatgctgaacccaaagatctgtacctcagcagtcagcactacattcatgatgtaagcattcaacattgtcaacattgggtaaccacaagattattttctttaaaaagggccaa

SEQ ID NO: 182661 - DNA, 241 bp, Homo Sapiens
gatagaaatgctgataggctttttttctctcaagggagcctggagcttgcctcgcctcatctttgtcttgtcacctcctacgtgtttgtgcaccgagtattaaaggaagatggagccaagaagctacttaagtcttttgatttcccttccctttgtttaacccagtattgttttaaagtgtatcacagataagactgtttaataaccatactgctccccaagcaacaactacttgttatgg

SEQ ID NO: 182662 - DNA, 1590 bp, Homo Sapiens
aaagcccccaagggtctcccgtcctccctctgcacctgcgctggtctcttccaggatggtggccagcatggctgctcagggtgctggcgggtacctgtcactcctgcccaaagtgctctgaggcagcccactgtacccagcccccatcacacatgctctccacccccagacacctgcacgaaggtggccccacctccaggctggcactggcagctctgcctggcctcctctggccatcagatgggccctgcacaccacctccagaagccctccttgactacctgtcctcctccacatggaccctgtggctgcccagtgccctcatcccacatctgtttctgggcatccgcacctctcctcactccatgcggctccacgaggtccaggactgcacctggggccttagaggcttctgtgctgccccccccaccgccctgcctcctccgacagctgcactcagggtacccctccagagtcctgtcacccagcacaccgccagccagggtgcaggagggagctccagactgagatcggggtcctgagttctaaacccaggaagcgagtaagagagagaggggtccctgctcctcccccagggccactggccttccccttggtgtgaacccactccttgttccaaggaagctcccctgggcttttaatcacttaaataaaacctcttccctgccccagggacttgagagtacaaggtcatagctggcttttcctggcttgtcaggggcgtggtcccggaagatgagattattgcctaagagctggtgggctggaagagctccaggttttgtcctgggggagggacacgccctccagggaccaggaagcaggtgtaatagtatcagtcgcacaagagctggaatcgggtgagggctttggattcagctacccttccctccaagaagccccaggatcgtttcccctctgctgtgtctgtcctccttggagaggggaggcctgtggataggctggcaaggtcaaggcaggctcaggcttgtggctactcccccacaacgactttaattggggctacccgcccccgggccattccccacagcctttggtgaggctcagtcctacccagctggcccagccagctccagcccctgcagccttctgacctcacccacctgccaaaaggcagtggacccatcgcagatcccaggtctcccacaaaggcccagagcaagggtggggcaggtgcccaatgggatgggtcagcatacccctcctgggaatgcgggctgccttgcaagggctggggagggggtcaagaaagcagactgcagcatggccctcctctgcccagctggtcaggcatggccgggccccatcccatccaggcccaatcggtggcctcacctggcacaggggatcggcctgaggagcgtgtgggcctcactacagcacaaccccaggcccggggtgggtgagccgacccactccccatgcctcctcctctctcagggacatgggaactcctagggtctcgaggggtctcccagcccagggcctgtgataagagccgctggagcaaacttttaaagcccccagttcacaggtggtaaaggccaa

SEQ ID NO: 182663 - DNA, 924 bp, Homo Sapiens
gagtaaacctgaagaagagaaaagaatgaggaagctgcagggagaaaagtgccaaaaatccttgtggccacatgaattttctagcaggcaattaatcaatttggagtagtgactccaatccccaaatacattatgtatattacattcagtttactaatattatccacaaataggtaattccttccaaaaaaataatgtacaggcttaaaaacaacaaattcacattcaaatttaaaagcagaagtgaccctattattgtggcaaggaaagctcatacccaattcctgaccccagctcgcccctctgatctttcaccacgctggtttttaattgatggggaggtatgaaaagtggccattagaagtggtccttctaaggatatctctgtcaaagggtcctgtcatactagttccaggcttagatcacagggaaaacagagcaatggcagatggagctgtagccaaacaccaggtgcaccttctaccgcactgtgatttgatgacggctcctcatttgatttcctttttgagcccaattcaaatactgcataaattgtattgcttcatattttcatatttttagaatctagatctatgtatatatttacgcaattccagatacattctaaatacacactttaaaatgctttcctacttggaacgttacattcaataggcacttctgggtctctcctgggataagagtcagaggcacaaacgaatttgaggaccagcaagaaatccctttttttcttctttcctgtgtaactctttgtgtgtgaagggttggaggtggggggagtggggaggggaagatgtctgaaacagaccacccagtcagtccattttagaacctgaaaatcaggggaataggatctaaaacatttcctattttggctactagccaactaacctaaagccaact

SEQ ID NO: 182664 - DNA, 1036 bp, Homo Sapiens
acaaaaaagttggcaataaactatacctacagacttttttttaatagaaagaagacaaagctgctggtataggatttgttcctttgaagaaaaaatgagggaaacaaacacaaaaacctcaatgcagtgtataaataacattttgttcaactacctcttaatgtggaattatctactttaatagtttcctgacagtaatgttaaatagtaactgccaaatttgttattttcccatctctcttaaaaaagtctttatgattattttatatagttttgagaactttaaagccacttttttttaaccttacatttgcataaaaatgtttagcttttaagtagagagcaaattatgatcatatattttgatattcatgacctgtttgactataggagtttttttaaaaaaatgcactttggctataaaaccatggatgatttgatccataagatttaaatgtgccaccattatagtattcctagacatgagcttgatgaatggtattctgtaattataacgtgccacacattattgtgtcttaattgcccttagcctgaattttaatgatcaatttgttattgttgcagatgtgaatattgtgcataaacttactaaatttatgtaaaattgtataaaatagaattagaagtcactaagttctttctgtgtagaagtaataaatttattgtaacacaatgcagttgtgtatatgacattctgtaattccttgaactggatcatatattcataagttctgtagatacttatgcatgaacattttctcatttagttcttgggttcattatttgtattgtgtttactacttgtgatcatgtagttgtgccttactttgtgagaaaggttagctcagtaaatactgcaatttctaaactcagtgattggaaagttattaattataaatgtaactgataaagtacgtgacagcattaaatctgtataaagaacaatggagggatccttattgaattgttgcttttttttaatatgtttaaatattatattaaaaacatttctttc

SEQ ID NO: 182665 - DNA, 1137 bp, Homo Sapiens
  misc_feature (459)..(514): n is a, c, g, or t
acaaaaaagttgggatcattttcgctcttatgctattattggtatttctggtcaatatgaagttctcataaaagtctctaagtatgtcaaatcatgtaagttacagtaagcataacatagaaagctaatttattaaaatatttttaaaacaattagatataattgtggctgactgaaaattttcagagaatttaaacagtaagatggttgggattctgagcattcattcctcacgtagaccttatcagttggtgaagttttgaactgtgttaatataacatctatccagtgcttaaactcctgtaagaatgaaattggtttgataagagtaattgttaatttctagaagcttgcatcataatgattttttaattaattttgacatagagctgttgtaattaacagtggtaaactttcagtgagattatttcacatcttaagtacattggttcattgtannnnnnnnnnnnnnnnnnnnnnnnnnnnnnnnnnnnnnnnnnnnnnnnnnnnnnnnctgtttttctgggccagtcattataaattagtatctggtttgaaattttagttccttttacagattataggatttttttatggggagagacctcagagattaatactctataatttatagctgtggaaactgaggtatagagagaagctcatggttctgtcctagaaagtgatagagactctatgtggggtgtcttctgttatgttttactgagtttagatgtattcctatgtgcttttagtcaaaaaatgctttttggtatttatgaaatatttcaaataatatagatactagattatccttacatcatgtcttggccttgttacctgaaggttatttaattcttaatgcttctaagaactatgattaattagttctgtgaatgggaataaaatgagaaattttgttattgtatgaaagcatttggtagatactggcttatgcattctgtactacttgaatgtttaaaagcgttattttgagttgtttgcattatgtttatatgatattttgaaaaatacttttatacagcagaattgtgattaagattattttatgaatcatttcttgagataatatccccggtagtaaggaagtatctggctttggagttagatagttta

SEQ ID NO: 182666 - DNA, 2178 bp, Homo Sapiens
ttgggtagttctttcacctggcgggcgtctgctccggttcagctgcaggaggtttcttgggagttcagcccagcgcgcagccccgccgcgacgccgcgagccgagaactctcctggggcgaagggagcgctgagaagtcgctactcttactaaaaggatgcgttggatgctgggccatacccttggcgatgcacactggagacccgctcggatacggactccattaacatcaaacggagcgtgttagaggatccgagtttactgagcactttctaggaagcgtgcactgagctacgtgctttctaggccttagttcaatacttaaccatattcattataatccggtgaaatcgtaattatttagccttattttacagatgaggacactgcgtaccaacaagtaacctcactaagaatttcgtcatggaggagaagggaacctgtattcaaattaggaaggatcctgaagaaagggcacctttaggtggaattttatctttggttctgctgcagagtacttgctgctttttagtgctccctccacccccctcattcttccttgtagattagtctgttgtttgtatgctgagttccttttttaagctccttgaaagttggaacccactgctgttgcctgttcaggatgctacacattgaatcaacatggatttattaagcgctgaacgagggctagggatcgtgctgggtgctgaggattgagtggcgaacacttgggtcagacaagtaaaagggcaattagaataactgttaaatgcttagatggggttagttctatggaagcacccatggttgggggggtgggatacagatcagagagaaaagggtggtctgcaaatagtttgggatggctacactggagagtgatcaagagtgagtgtagggcaggggttggccgactttttccataaagtgctgggattgcagggatgagccactgtgcctggccgaacttctttcgtttattcaaatgtttattgatctacgacatgcgagatttgtgcaggctctttgctggtttcaccctctcaatcgctgtgtgagtttgtgtctttagggaaagtgaggcccaggaagggaagtgagttgcttagcgacacactgtcaggaaaaggggccctgagttgagcttaggtaaaaagcctcagagctgttgccctgacatctgtcttttttctctccctgcttcccaccccacctgtgcccccagtcagactcagtcacatgcccactcgaagtcgcactgctatggaaagtgggtgcaggtggtgggcaccctggcgtgatccgcctgcttgactggtttgagacacaggagggcttcatgctggtcctcgagcggcctttgcccgcccaggatctctttgactatatcacagagaagggcccactgggtgaaggcccaagccgctgcttctttggccaagtagtggcagccatccagcactgccattcccgtggagttgtccatcgtgacatcaaggatgagaacatcctgatagacctacgccgtggctgtgccaaactcattgattttggttctggtgccctgcttcatgatgaaccctacactgactttgatgggacaagggtgtacagccccccagagtggatctctcgacaccagtaccatgcactcccggccactgtctggtcactgggcatcctcctctatgacatggtgtgtggggacattccctttgagagggaccaggagattctggaagctgagctccacttcccagcccatgtctccccagactgctgtgccctaatccgccggtgcctggcccccaaaccttcttcccgaccctcactggaagagatcctgctggacccctggatgcaaacaccagccgaggatgtacccctcaacccctccaaaggaggccctgcccctttggcctggtccttgctaccctaagcctggcctggcctggcctggcccccaatggtcagaagagccatcccatggccatgtcacagggatagatggacatttgttgacttggttttacaggtcattaccagtcattaaagtccagtattactaaagtaacggattgaggatcaggggttagaagacataaaaccaagtctgcccagttcccttccaaatcctacaaaggagccttcctcccagaacctgtggtccctgat

SEQ ID NO: 182667 - DNA, 782 bp, Homo Sapiens
  misc_feature (565)..(584): n is a, c, g, or t
gatggcagctatataaatgataaaattaattacattctctttcacatgcatgaggtgcaaactctgtcacaaagtattttaattaccttttaccttgtttcatagatctttatgtgagccaccacacctggccaacatgtggctttcagttcttacttgaagacagctgctctagctagaaacttcctatcggcatttgagccagctggtagagggcattacctcccccacccccaagaacacttcttggaagttacacacaatacataaacttcaatttcaaacagttgcttggtcccactagccatgaagctggatgggacgtaatattctatctgggttgtcatgggccaaattaacattttgagattctgttaggaagacgagaattggataatgggcacctctaacagtgtctgtcagagttgacatacattgtgtatctcctgcaccaaagcatttttgagatcaagtgttcttccagctgagcagaaatttggaaggctattcagtgctgcttagtgtagcagctaataatgttccaacttctatatgatagtttgcnnnnnnnnnnnnnnnnnnnnctagagacagagtctcgttgcccaggctggtctccaattcctgggttcaagcaaatcctcctgactcagcctcctaaatgctgggattacaggcatgaacccactgtgccccagtctatatataatagattttagaagaaatttcctgccactcagtgactgcttttaattctaaaaacaaaggctgagagaaactta

SEQ ID NO: 182668 - DNA, 1526 bp, Homo Sapiens
ttggcaattttatatggaaaaatctatgtaatttataatggttttgttttatatattatattttcatatctctagggcacatctatcctcatctttttgtataccatacttagcaaaaagaaatactaatacttgactaaaatctctaggaaccaaacgtgatacatgtgatatatagcttctagaaatcgctctaaaaatctctgaatgtctcatccatcccaagcattattgtgctgtgtcattatgtccagaatgatttgtcttggatgcttatgagcatttgtttttcacaactaaggttgaaagacctgacatctcacacaatggggttctggaattcccctttcctcctttatctgtttttattgtttgtttcatttttaattgcaccagtctatgttgtcgaaactttgttttgaagggcaaatgtgagataacaagaaagcaatgtgatggaaagactggatgaatttacctatggctatgtaaattattttaatggactgataagatgtttcaagtctcatgcttggatctttatttattggtgatctaggatctgctcagctctttagcacatgaagaaaatcaggtacaaaggacatttgcatgtttggaacagcatgctctaagccccgtgcagccaacacaaattaacttgactgtagaaacaccaattccagctgctggaagaaatggtttagaaaggcaaaccagataccttttattctgccctaggaaatacagtgttgatcagtgctaaaactcttcagtggcagtcactgtggttcttttaactggggatttcctttcagtgtttcatttggtaccaaaacagaacatttaccttacatttcagatactctgttttctcagcattgttcagatactttcctttaccgctcttcacgtacccttttggcattgagtaattctataaatgtttctatccttggtttttaaaccaagttattcatactcttaaaatatctaccaaatctcattgtattttcacatattttgagcatcaagatactggtcattttaaaaaatccttcagtaaatagcacagtttattttcctaatgacatttttagggtttcttcattgatcaaccaggtttgggttacacaaatcaattgtgggggaaaaatcaaataaaacaattgcttattatattttccaaaggactgagcatttatcttttattcacgaagatatcatatgaggatgataatgatctttaacagattttttagagatagaatttataaagaggctgatactaagaatactacaatcaaaattgaagctagagaatgtaaaaatagaaagtaaatagttctaagaatattctggcataaattatttttatttagccaataaaatagcctccaaatgtatatctcagacaccatagagctgctaacaatgagaatcaagggaggatgcttgcacttagatttcgtttgttgtatttcagtaagttctggatgtccttgttaaaattggaaaatggaaaa

SEQ ID NO: 182669 - DNA, 598 bp, Homo Sapiens
actataccttgaatttcgatcttttcctaggctagtgatatgcagtacatgagataatcaatgcttccttacaaaatgggcttatgttagaagacttttgcccagctgcaggctattgtaagtgttctgagcacatatgagataacctgggccaagctatgatgttcgatacgttaggtgtattaaatgcacttttgactgccatctcagtggatgacagctttctcactgacagcagagagatcttcctcactgtgccagtgggcaggagaaagagcatgctgcgactggccagtgacatgcagaggatccagattgcacaaccggatccagaggccttgggaagcattagggagctctccagctgtctcactcaaatctgtagcagcatatggacccacaaatggaggccaaagtgggccctcaattggacactttggcaaccctgaagagacttcttcccttcagacttactgttttagtatgttccagagaagggagtggcattcttcttggggaattcaggaagagggagacacgctgttactctatccattaaataaagctttgatgttcacagccccccgccaccactcag

SEQ ID NO: 182670 - DNA, 958 bp, Homo Sapiens
ttggggatctttgtagtaattgaatgagttaaactaataatctggatgggttataatgagtagtaatatatttgtccatatttcataagtagtgttaatcttgtgtacttattagagaacgatcataagatttatacagatgtgaaactgcgaaggcaagtatgaatgtatgaaaaaaacatgtaggtactgtacttacaaaaggtctacttcagatataaaaatattaggtaattctatacaatgcatagtcataaaccttaacatttttgttcattagaaacatgaattttatagcattttttgtttctcctatataatacactgaaataaaagaatttgtgttagctattaaggctgatagctcttttaaatggcaaggccacatgttgagccctaaattaaaatttgcagatattaagtgctaatagaaattttaagttaaatcgaccaagttcacttgctttacacaaaggaaactgagccactatcttcatctacccctccaacaaaaattatgttatactgcagtgtattgtacatgttaatttttaaaagtttgaactattatataatacaggtctcttgacttctcatggaaaaattattttttctattatggtgtgaaatattgtgtgaatatctaggcaaaacataacaatttggctcaattttcttctttagaggattcgtgctgtttttgttcataaagggtagtgaaatcattgaactatattttagaatgaaaatttttgattttattaaaatgattttttcaaggcagaaagtaaaaggaaagattgatagcggagtgcatatagagctagagcatatcatccttgaactctgcaaatcctttcttccattttatatagcaagaacaattttgtctttactacatcttaaagaattagaacttgggttggtgtaagtgacttacttccagggaatcatgctc

SEQ ID NO: 182671 - DNA, 1312 bp, Homo Sapiens
  misc_feature (318)..(328): n is a, c, g, or t
  misc_feature (391)..(591): n is a, c, g, or t
ttggatctctgattgcgaaaccgtcacatacaccaagagagccacatgggcatgtggccctcaaggctgggtgagagggctcccctgtgtgttgaactatgcaggagggtgatgcggacacatttcaggtggactttgcaaggactgatggatagctacctcagggaccagaatccgtgggaagggatggacctggtgttcccgttcccatctgacaggctctcttttgtcaaggtggtatttttcgtaataaaaggggaagagtaaagactgtccaagcaacagtagctgccaaagagaaaatacgaaatagacacnnnnnnnnnnngagtcagagtctcactctgtcacccaggacagagtgcagtggtacgatctcaagctcactgcnnnnnnnnnnnnnnnnnnnnnnnnnnnnnnnnnnnnnnnnnnnnnnnnnnnnnnnnnnnnnnnnnnnnnnnnnnnnnnnnnnnnnnnnnnnnnnnnnnnnnnnnnnnnnnnnnnnnnnnnnnnnnnnnnnnnnnnnnnnnnnnnnnnnnnnnnnnnnnnnnnnnnnnnnnnnnnnnnnnnnnnnnnnnnnnnnnnnnnnnnatgagccactgcgcccagcaaaataaacacattttataatttgtatgtggaaacatgttactatagaaagcattttaaaggtacgttttaaaggtccactgttaaatagtaaagaatgaatccgctagcgaaaatgtttttagggagaacagctggatcaaaagggcttctttggaattaggttgttttagtaacttctgttccaaagaaacacaggtctgatattgctaagaactgaaatcggaggagccagaggcccttttcagtccaggccaacattgtgcacggccactgtgggactgacaaccgggatagctcaagttcgaaagaccaggtttcaaacattataagttccaggctttgcaagtctttattctctggggtaatatccagtctttctgttattgtctcttaaaattctcttccatggcccacattaagggagtttgcagagagtgagggaggcaaaacttgaaaagggcctgcaacactttaaaccttctcaggttcacccacatgaaacagctgtgctgagtgtgctgccggtgcccggggagcttctctgactgtgacccggcagaggcttctgtggcggtgcatgagcggccctacagtggtagggttctctttggaaacaaacagccctgcttggtttcagtttgaggccacttatcttcaatgtgacatttcttgccaagccctgtgaccctccccatgatga

SEQ ID NO: 182672 - DNA, 1608 bp, Homo Sapiens
ttggctggctttttttgctgggggtgctggatgcaagcccccagccagcacacctgggatgctcaccctgccgcacagttcagaaggcaagtcctcacctgctcgcaaagacccttcttctccaataaaagactctacttgcctgagtttcctcatcagggctgtcattcagtgatgtatgggggtctgaagaatactgccttctatctgtcttctgtttaccacttgctcctctgctaccctcctgccgcaaacagtcttcttccttttggcccagttctgtcccgtgaaattctcagaaggcctcgggagctgcgctgatgtattctctccttgtttgatagctcatcatcagtagataagcctacacacttcagagggtgacaggtttcttacttggagacttcactgcaccttgacttgtagatttgccttcagacagctcttggttatggttacaagtggcccccgagtcccagaatctttcccaggttgccccagaaagaccagccacctgtcacaggtgcagttgtccggcaatagggaagcaacttcatttttgttttatatttattccctcaagtgccctgaggagcatttgcaaactgggtacaataaataagctggattatacaaagatatttaataaataagctttcagtatctattggaagacatgaagcatttgagtgggtttctttatttaaaaaattattctactggagctggtgagaaataatgaagctgtacagttctccagaaattaaaacaatgtcagagtcaatgggagaatttaatttacctttaagatttcattttaatggtggcaaaattatacattcttagaagatgtaaatttggaactgttaggagattgctctgtggttttgatcttttcaaaccattttctttttgaaaaaaggcattagttgtagtcatggacattaaatgggccatatatgcttatcaatcaaaaaagtgttccttttttggaactgcccattttctggatcttccctctcaatggataggggatgaaaaccttggttgccttttatttgtttcctcttctaaaatttctcacctgaatgtagtcctgggagagtcccgatcacgtctctcctgacatgttcactgaaatcggagacaagaagttacatggatgatgggatcttatagggtcacacaaagacaatttggcagcttatcttaatttcctgcagtgagacaacacatgtggaactgggaaggacagctgttgttacgagcagtttttcctggtcatggttgtaaagctctgtaacccacattgtaaagccgtgaatgtttttagtcttgttgacgagtttttagagactgctggacctctgagggctttgagagtgcagctgtgatgatgtttcactattacttcgtgtgaatgtagaaccaagggactcatcttcattttatacctaaaatgccttgtcaagaaatttttgcatgttttaaaagataaatatttttgtacacagagttcaagggaatgcactttaaaatcccaagaatggatgttctttgtgtggtatgagacgttgtttgtatctcaaagcaaaatgtattaaggaa

SEQ ID NO: 182673 - DNA, 1749 bp, Homo Sapiens
  misc_feature (1634)..(1644): n is a, c, g, or t
ttggaagagtataacatcgctacataaatagttcagaagtcatatattaaaattatccttagaaaaatgaaaatgtatgtatatggtaatgaagaaaacccatactagatgtctggaattactaatgcattattgcctttttatatataaatatacaattaaggattgtcaaattgaaaactagaaacatgaaagagaaagttcacaatatagaaattgaataatcaatttcagaggaaaacgaaacattgaagaaatgatgacaaatttaaaaaccaagtgtttgtattttcagagacttgtgaagaaactgcatccatgagataaattgttgtagaaaaggatcagagaacaaaaagagtttttagaaattaagattatgattgttgaaattaaaaattcaattgtaggggtgtaatataaattcaaagaggtctccccccaaaaagagtaaaaagtcttagaatgagataaaatgatgaagaggaataatttcaggaaataccacttgtaactaattggagtttcaaaaattacataagatatgacacacaagtattttctcaagctaaggcaaaaagtaagtctttatagattgaaaggattcactaaataccaagcagaatggaaaaaacttcaaccttgatacataattgtgaaactaaagaagaaaagtcaggtcatctacaaaggaagggtaactacgctggcatcagacttctcattagcaactgcagtttctaccacaggatctttttgggttcttctaaacattccaactcacaagactttcacagaccacatctgatacctgtgccctgaacacagcagggtaacttcaggcagccttctcctgagagtccgcagcagtccatgtagcaattcactcaagtacaaggagataaggtcaaccttgtgagtgtgggatctaccttgggttaaaatatctcgtgttctatgagagacgtattttgaaacatgcatttccagatgcctgcaaaggacatgtctagttacaagttactacacttgagaaactcaaagctatgatttcctataagataattataactttcctagtccagagagattttattagtcaggggatcccttaatcatagcagtgttatctagcagcatacttgacatattattcttaccaggtcactaggtgaacagaactagagttaatcaaatccagaaggggaagattattttattaactgttcatccacagcaacatcagattgcattagaataagtggagccgtggtaacaaattaggggggcaattgatcataaatctgtaaattgggcctagccaaaggattggtccaattagtgacaaataggtaggcaagtactcagaacattcatttcctacccatccttatatgaattccagcaaaacaagggtgaaagaaaggaagatgataatagacataagaaagggcaagaacttacttaggcatctaagaaaaagaaatcctggtagacctctgttgtaggcatatgaaatatttcaaatattagaacaaaagtcaatgtctttcaaaagaaaagtcaaatagattacaacgaatcagaatgaataagaagtaaaaagatatttgtgatatagtgaaagaatgtgnnnnnnnnnnnctcaagggagggggtgaaatgcaatttgaaactcttggtttaaatttgtgtttaaaaacgccatgggttaaatattaaaatacatttaaaatggggaataagttt

SEQ ID NO: 182674 - DNA, 882 bp, Homo Sapiens
ttggattttgagcagaacactctgagaaactccccataacaacaaggagaccacggggccataaaggagctggtagacagaggcaacatggtctcttggtcgtataggttatagagcatgtagctgtcatctggggagcttgctctggactgagctccaaacctccctgcaaagccatgactgagagagtggactccaaatgacaactcatgaaggaggtgaaatagccctttgagagtcaagctcattagccacaaagggtggacaaagttctcatatttttgtccagtggtctttgaccttgaaaagaacagggagtctaattacctcgctacctagagagtcaaacctgagaaaaatcataccagagtctgaaaaatttgaggcttacttggattttgcccaggcagtcactagaactgaaaattattcagtgtttacatgagtaaacctagattcttctatggtaaaaacctttgggactgggcctcattgatttagaaaaggcaaacttgtccagcaaattgagatctgagtaagaatgagagataaatcatagtctcagctcccacattgcttttctcatgtgtgaaatggggatttaacatcaacttctttcttagatctttgttgtgtgtgcaaggacatctttcagaaaaggatcaacaagtaccaactgaatcaattactaatctattccctctattctaatcatttaatatgttcagctacgtgtgacagaaacctccctcttgccaccacagaaaaagaccccaaactgtgccttaaacaacagaggagttctttcataaagaagttcaaaagctatcatcttgggctaccatgaaagcttccgggtacaaggaacccaggcactttatc

SEQ ID NO: 182675 - DNA, 867 bp, Homo Sapiens
  misc_feature (388)..(489): n is a, c, g, or t
ctgagccatcatgcctggccatgtttatcactttctacatttcattatagcaagcggtaactaggggaggtcccctagttgggtgcaagcagattcatttttgtatttgcaaatcatgtaacacagtgaaattcatagccttacccccatactggatcataaaaatattttactttccctattttgtttactatcaagcctgagctcattaaatatatccagtggcctggatcaggatcatgtgaaaaacaggaccttggcttgcttacaacgtttgcatttgttttggttggtacagattcatttggataaattcccagcttattctcaaagaagattctagcgcagtaccgggctcccagtggcttttcattcatagtaatgagcnnnnnnnnnnnnnnnnnnnnnnnnnnnnnnnnnnnnnnnnnnnnnnnnnnnnnnnnnnnnnnnnnnnnnnnnnnnnnnnnnnnnnnnnnnnnnnnnnnnnnncggtgtctgtgcaccattgctgcattctagaattcccagcccagaactatgctgttgtcatgcctaggaaagcatccatgagaaaatccttttctgagtccgaatgccaattccagttctggttagaattccttgacacacacggcacttccagccttggttttcacggttgctgtgatagcagaacacacagctgtgaaacagagagaagatgagcaacagaaatggatgtgctaaaatgtgagatgaaaatatgcagaaaagccaaccatctttagaaatctcatttattcagggttcagtgtaagcctaataggtacaagctgagattttggagtctggtgggttccagttcttgctttccaccaataattagct

SEQ ID NO: 182676 - DNA, 813 bp, Homo Sapiens
  misc_feature (325)..(542): n is a, c, g, or t
tgagactctgcctccaaaaatataataatacattcataaaagggcgtttctactttccaaactatactactatagtttgttaaatattatattgatggcaaaacgtgttccttgactaatggagacaacagagtaacagaaccacaaaaaactctacatgtaaaaaagcactgtcttcaggaaacttcacctccttgggaagtaggaaaaggagtattagcctcaacctctgaaagtgcacctcacagtagttcatatcctaacctccacacgtcaatggctggaagttcccacatctctgtaatcctgcagaaacctctaactnnnnnnnnnnnnnnnnnnnnnnnnnnnnnnnnnnnnnnnnnnnnnnnnnnnnnnnnnnnnnnnnnnnnnnnnnnnnnnnnnnnnnnnnnnnnnnnnnnnnnnnnnnnnnnnnnnnnnnnnnnnnnnnnnnnnnnnnnnnnnnnnnnnnnnnnnnnnnnnnnnnnnnnnnnnnnnnnnnnnnnnnnnnnnnnnnnnnnnnnnnnnnnnnnnnnnnnnnnttttaaatagactatctttttacccttttatttgttccaactcaggataaatatccaagtatctagagggtctatgtgtgctatctatacaataaaagatagttatataaaaatgaagagttctccataccattatataaacaggaggttttacaggcattagtgatactctgttggactcaatgggtttttttctctcttatagctatgaaagactttatgccagtccaaaatatacaatgttgaaagacaggtttggaaataaatccaa

SEQ ID NO: 182677 - DNA, 809 bp, Homo Sapiens
ggtggaaggccagccagctttgtcttcgctcgccgcagctgctgtgtggtggtcaggggactgagttcaacaggtcctttcaggaagctctctggatcggtgattttctgataaaagacccggccacatcgaggaactctgagaaggtctccactggcatgaactcctcctggaaggttttcaggggctttgtcggcagcttcgtagatgggcatgtcgttgtggcggatgtactcagcgagagagcaggaccagcctccctctgtgttactggtaggcaccttctacgagaatcaacaggagacaagagaggtgggtgacttactgctgcctcatcttccgcctcaagtcagtcaggccatttcaacccctcaaaggacagccctcccaacctacaccaaagcataccaacaggcaccctagagcgtgcgttttgtctccaggaacgacacaatttcacttcattcctcttaggccctccttattaggcactgtgtcacctgaagctacaggctccaacaagtggctgcattccctccccgtacacttcccattcgcattccccagagcaaagggacttgtcaatgtgcttccatgagctgtctcattccgatgatgaaaggaaccaactcaaaaactcagattctctccggagaggagtgtcctgttataagctggctgcggtaagtcagactcactcagggcaacagagcttatcccaatagcacggcaagagcagcaaagagagacccgggggggaaggtcttcctgcacagccgagtctggagcaggctcgggagcaggtgaca

SEQ ID NO: 182678 - DNA, 950 bp, Homo Sapiens
ctttgtacaaaaaagttgggtatttattacttaatgtatataatgtaatgttttgtaagttattaatttatatatctaacattgcctgccaatggtggtgttaaatttgtgtagaaaactctgcctaagagttacgactttttcttgtaatgttttgtattgtgtattatataacccaaacgtcacttagtagagacatatggcccccttggcagagaggacaggggtgggcttttgttcaaagggtctgccctttccctgcctgagttgctacttctgcacaacccctttatgaaccagttttggaaacaatattctcacattagatactaaatggtttatactgagcttttacttttgtatagcttgataggggcagggggcaatgggatgtagtttttacccaggttctatccaaatctatgtgggcatgagttgggttataactggatcctactatcattgtggctttggttcaaaaggaaacactacatttgctcacagatgattcttctgaatgctcccgaactactgactttgaagaggtagcctcctgcctgccattaagcaggaatgtcatgttccagttcattacaaaagaaaacaataaaacaatgtgaatttttataataaaatgtgaactgatgtagcaaattacgcaaatgtgaagcctcttctgataacacttgttaggcctcttactgatgtcagtttcagtttgtaaaatatgtttcatgctttcagttcagcattgtgactcagtaattacagaaaatggcacaaatgtgcatgaccaatgggtttggtctatgaacactgcattgtttcagtggacattttatcattttcaaatgtttctcacaatgtatgttatagtattattattatatattgtggtccaatgcctttctaaagagacttttatatgaagggaataagaaagcctgatt

SEQ ID NO: 182679 - DNA, 907 bp, Homo Sapiens
gaatcgtgagacatcatgtaatccaacctcttaatgttacagataagtaaactgaggcccaaagagatatagtaatagtcccagtgtcagtaaactgggtcttgaacttaaatgtttgtttcagttctcattgccttcatctcttaattgtcggcacttaaggccaaccaagcagcttagacagcgcagtccactcaacggtaactttatttgctatattgacaatctgctctgttctgtaatatagaacattggatcaatctttatctttttgctgacttaaggaggctgctattgttgcaatatccagagatttcaagttctagccattgcggggtctttgtggtgttttcaatttctcctctctccacccctgcccccatctgtggccatctaagttagcaatacaatttattttggccatttaaaatttttctgcctttgttttatttcttcccaaatatatttgaaaatgaatgatctatatagctgattttctgaccacatatataattgcaatttttatttgctcttcaaactattacaacatttttgtccttataaggttttttgggcagataatgcgaggtctgtggtgttaccttttatatactcctattaccttatgtttgtgaagcattttacattttacagagcactttgattcatctccctatttgttcatttatttaactgttcagttcactgaaatatttattgaacacctactggaaccaagtgactgtgctagtaacttgtgatatacagtagtgagagtccaggcatgtaactgatcattataatacaataacatccctaaaccagactttacaagtagataggatcaacaatactctatcaattttcaactccaattttctattctacttaaaatgggatctagaaa

SEQ ID NO: 182680 - DNA, 1454 bp, Homo Sapiens
gacatgatatggagcatattttgttgattgcaagatgcacactggcttttagattttaacacaactgaaagataggatgtcttaaaaattgatgatatcttaaaagtgccgtgggcctggattgacatcaactctttccacgagagatttgcatttgcttctgccagtacttaggaatgctaccaatctgagacttcttgaaattaagttctctgtttagggttttgtttaatcctcctggcagagtgaatttagacaagacactggctaataccaactggtggttcctattctcaggggagatattttttcctcctatgacacagtgtcaagtttgagacaatcaagcttccttgctgtccttttctgtgtgggggatttttgtctttatattttcactgaaggtgcaggtttttggtatcccagttgcatatggggggtctattagatgatccatcttaagcatttcttcctctcttggtgggacgtgaaagcacaacttacagttgacggcaacttaagagtctgtgaagtatgatgtgtaattgttttctgtccacttcccccactagaacataagctccctgagagcagtgatggactattttgttcatttgtggtttctttagtacctagaacagtatcaggtacatggtaggctcccaacaaacatctgttgaataaatattagccccaaaatatttgttgaataaaaaatgaataagttaatttttgcctgggaataaaagagaaattctggatcagactatcatttataatattggaaaggtgagactacaacaggctatctgaatcattagcttgacttactgtgtgtgacatctaaaattgtctctttgtctttgtgcatgctactctgaaaaaacatggttctgcttatttaaaaaacatattttaaggctcggtgtggtggctcatgcctgtggtcctagctactcacaaggctgagatgggagggttgcatggtccaggagcttgaggctgcagtgagttatgactgcctaccgtgctccagcctgggcaacaaagcaagactctgtctcaagaaataattaaataataaaattatgttaaacaggatatgtgccacccacataaatttaatattcacaattagcattttatgctctggagaattagaaaagggcatttggggaaagattaatttcaaattatttgatgctggtgataagccacataaaggaaaagcctccgctttaagcttctggtttgtactgacctggagcagggaggccatctcaaaggaaggggagagcctggccggcaagccagcctcactagaaaagatagaaagttgtgccgtttccatttccaatagacacataagcataagaagtaagcctcaggcatcacattcactggatttttatcttcactcagcaaatgttagaaacaaaagttaaaaattccaa

SEQ ID NO: 182681 - DNA, 964 bp, Homo Sapiens
  misc_feature (361)..(373): n is a, c, g, or t
ttggcttttcatcaattagaaggaaagtttgaaacttctgattacctttatgttggtttctcttattatttgtctcttgctagatctgctaaaccaacccagcttgctcagagatctcatattgaagcaacatacaggcaatccacatctttctttccctttgaagtatagtcattggatgggatgagggacagggcctgttgggttcacagggccttgcactgcatgggcacatacttaaaagctcttgtgcatggaatccctgtctgttagccacaggcctctttagctctatacattcaaaataactactgtagtagaaaatagataagcttcagctgagttggcttttgatagtggnnnnnnnnnnnnntttgactttttatggccaaaattccttgttgacagctgtgatgttctaatatgatttgggaatatgtcagtctacagaacctgcatcctgtaaaaacacctttggggtagacgataaaagtcatttttaaggcaaatacttaccatgtgactttttattaccaaatgcatcagtagtggagctggtatgttgtttcataggatggaaacattagaagtccagagaaaaataaattttaaaaaaaggtggaaaagttacggcaaacctgagatttcagcataaaatctttagtatgaagtgagagaaagaagagggaggctggttctgttgctcgtatcaataggttatctgtgtccctcatcttggtgttacagtgttatttctgtcagtattatgaatatgtggttgacccatcctgtcaaatgtaccaacattttcgaaagattcattcaaatctcttatgccaacagaaaagttccttcttgtttaatatctctttacctcagtcctacattttgattctctggaggagattttagcttgtcttaaaaagccaaatttggagtcatcaagcctgctgaacctggatgg

SEQ ID NO: 182682 - DNA, 613 bp, Homo Sapiens
  misc_feature (277)..(353): n is a, c, g, or t
tgtgagccactgcagtggatggatattttaaaaaattctgttgttcaaaactcttcactctcaaacatgtatctgacacccacagtcagtctgttactcttgttccctgtgaaatgtctgcttgttaacctgagagtccaaagaacaggagaggcatagtttggctggtaggaacaatattcccagttagccctggaagacagttccagttcagttctaaatccagtcgccttccctttatgctcccaagctttatgagaaaacagctcacttgatnnnnnnnnnnnnnnnnnnnnnnnnnnnnnnnnnnnnnnnnnnnnnnnnnnnnnnnnnnnnnnnnnnnnnnnnnnnnntctactggctaacattgtggtgatggttaaactagataatgtatggagaccatacttaaaaaagcagtctcctcagcttaagccaaaactgtttgttctgagaatccagactggtaaactcttgcaaactagagaggtgtacaagaaaccatcccaagtaaatgacacataagtggtccaggaaaaacaatcctcggttgttaggaaggattccaagtttaacaatgtgcctgttgtttaccgttatgttccagccttac

SEQ ID NO: 182683 - DNA, 1280 bp, Homo Sapiens
aaaaaagttgggtcacatgataacttctgttttgcattgcgtgcactgtacaacacttacaacttgtcatttaaaatgttttctcgggaaatgaatgctagtcagaaagtaatagattgtattattcatagttttaaaattatgacaatgtcataattactacaaagctaaataatcgtgtttatttttgtgcagttgccctttgatagttcctggttttaaaacctattaagtgtataatcttacaaatagtcatctacaaaatttatggagaaagtgccaagcccattcacatcacatggaccaggaattcttttgtaaatgacttaaggtaacatcatgcagttcagtgcctaataaatgctttttaatgatgaacatttctataatgactcgtaagataccatagtctgatttttctcacattaaaataactgaagtcacttgtgtaacgtagttatactttgctgcattttaattaaccttcaacagctattaaagtggaatgtaagttaaattttgaaggaaaggaaataaatgttttccatatttcgtcttgatttactttctgtatgagaacagctgtgtttttgataggtttatggtttgcatgagttcatatttaaagtgatccaggccaatgcatggctattgctgtaaatcttgatgtttatttctgccttgtaaagttctatcacggcctacctggaatttaaaattcagtagacaaattaattggtcctctgcacaacttttttaataagtagattattttacaaagaaatttgaacaaatttaattgaatcttttgtttagcttgcctctaagaacttttcttaataaagctcccaaaacttctcagcaaataaatctcccttaagtaggaaaactagatttcatatttgcttactttgaattaacagcaactttccacaggtaaatctgttcttgcaaagatgtgagcagaatagttaaaaataatatttttatgtttcatggttctaaatggaagccataaatgcagtaaatactatctgttgtttaactactttaatcgtcattttttacattttcaagtttattaggttaagaaaaacagggcagccttggaaggcagctactacagaaaactgcagttttgcgttaaagataaagtagtattttcagctccctgaaaaaccatttcctgctgaaactgctgtagaattgtgaagctgcatgagtggagagtattgaatctgtggttatagtagttttctcagtttgtttatcttgatgtt

SEQ ID NO: 182684 - DNA, 1018 bp, Homo Sapiens
  misc_feature (266)..(738): n is a, c, g, or t
cagtgtggaagcaatgggtttgagagggagggcgggggtacaaatggtagtgacgctgggatgtgttttaagttacaaaggcgaataatgttactgttgtattcttaacaatgaagtgaacgtaccctgattttccactaagagtgataaatttggactgacatatccaaattctatcatggggttcataaagctagctagaaatcatatactcatcagcatggtgttttaattaccaaggcaccattactggctaggtttagggnnnnnnnnnnnnnnnnnnnnnnnnnnnnnnnnnnnnnnnnnnnnnnnnnnnnnnnnnnnnnnnnnnnnnnnnnnnnnnnnnnnnnnnnnnnnnnnnnnnnnnnnnnnnnnnnnnnnnnnnnnnnnnnnnnnnnnnnnnnnnnnnnnnnnnnnnnnnnnnnnnnnnnnnnnnnnnnnnnnnnnnnnnnnnnnnnnnnnnnnnnnnnnnnnnnnnnnnnnnnnnnnnnnnnnnnnnnnnnnnnnnnnnnnnnnnnnnnnnnnnnnnnnnnnnnnnnnnnnnnnnnnnnnnnnnnnnnnnnnnnnnnnnnnnnnnnnnnnnnnnnnnnnnnnnnnnnnnnnnnnnnnnnnnnnnnnnnnnnnnnnnnnnnnnnnnnnnnnnnnnnnnnnnnnnnnnnnnnnnnnnnnnnnnnnnnnnnnnnnnnnnnnnnnnnnnnnnnnnnnnnnnnnnnnnnnnnnnnnnnnnnnnnnnnnnnnaattgcctgtcttattgtgttctctcttagtctcagccctccccaaaactgcatttacccctttctgaacttcataatctccattatgacatattactattcttcattgttgaaagtgatagtttttcacagctgctctctgtaggtatggctcaatggggcaggaggaatcaaagaaacaacccagctgtactttccacactgcacaaagattagtctttgtgtcactacttacagtgattactctcagtctgtagctatttctgacctagctccatgc

SEQ ID NO: 182685 - DNA, 352 bp, Homo Sapiens
acaaaaaagttggtctaagaagactctaacaaaacattttgatctctcaagtccttaatttacctggtggaaaacaatccttaaagacaggtttaaaggaaaagacttatttgcatttaaggacttagtcttcaggacagtactgttgagcaacaggtttagaatttacacagaagttctatttccaaagttccacagttccttgaaggctgctatgaactatatctatatcagtaatgaaaaacttaatttgttccttgagttatgtgggcaaatgatatattttcccccattcatcactgtgatgtctgttccggcttctctttgggagaggagcatctgtttgggtgct

SEQ ID NO: 182686 - DNA, 898 bp, Homo Sapiens
tactgtgtttctggtttgcaattatactgagtattccagatatgaagtgaccagctcatagcacttgcaacaagattattctcttctgtagtctggttgctatatttctaataatgtgactcaagatttcattcattttacctctggacttatcactctttgaactttacggtttatcactaggtctttttctctaaatgagctattgttaggccagttttcttcttcctcttgcaatcctgtttttcagtggttgatggcatttaacctaacgtggattttcacataacaattgctattttaaaatgttattagttacttaacccatatgatttatcttagaaccacagaacctcagagctaaaatgaacattttataataacaaaccgggtccaaaataaatgacttacatagatttataaggtaattaatgacagagctgagtcaaggattcatgtttcttgatgcctagtttagtagtctttgatgcaacagacatcaagtacatattatatctagaagtaatgtattaaagataatcttttggcttaaatcattttagaatgtgtaacatccttgtaatacaagtcattacccatttcaactagagaagaagatatatagaaatatcaaatgttaacaaggtaataggccattgcttttgtgtaattcaaaatttgataatgattttgttctttgccctagttattgataaaattcttaaagtgaacattgccctactgcctatttctaggtgctgttccctttaataagtatattttgaacatcatttgtttaaccctgttttaaccaattagaaatctatctacttgaattatgttcattctcttccctatgtattctttttgagtaacctaatgagattatttttaatat

SEQ ID NO: 182687 - DNA, 1079 bp, Homo Sapiens
gagcaatgctttccttataatagccaactttgtacaaaaaagttgggccagcaggccacgcagcatccggcaccctgggcgggctggctagctgccttcttaggacatctctactttgaaggattttaccgcaggaagcaatagcagcgctggccattggtgctgatgacagcattgggtctggttgaggggaaggggctggaaagcagcagacccccccagtgctgcgcatggtcccggagctgtcagccaggggagtggggtcagccgtcagccagccctcccatttcccgcccatgggccctgaccacactcccttttctagaagtcaatcctaaggtttctctgctctggctaagaggatgtaaatttggattcttagagggcatggcacccccagtccctgcccagataaagtagcacagtggcaggcagcacctctgtctgttgctgacgttggggggcttacacacccacctcatctccgtgcacagccatgactggccctgccggcagctggggtgcaggtaagggtctctctcatagaggggagctgcagctgagaactggcgaggccccttcctccaaggccctagctggcccccgggtgaacctgaggtggcaggttcaggttttcaagatggtgggtctcgctgtctgctggacagtacgttaggctctcagaactcatgggtgtggagctggacctgtcccgggccagtggacccctgtgtgtgggggatttggggtgctgtgggcctggttatgcactggcagatggaccttgctttggtccagctcttttccttaccctggctctgacgtgggaaggcttggagggcccgtctcatcacccccgttcgccctcagctgtccctttcccttgtcgcctggccgctgcctcgcccgcctgaggcctcctagcaggcagcctgggtgtgagttgagcctctctcttttccctctggtgggaaagtggcctttccctcaacacctgctccccggccccagaggaacccacctgttttggagctcagcttggcccaacgtttccttggggaagggaaaggagggctgga

SEQ ID NO: 182688 - DNA, 417 bp, Homo Sapiens
aaataaaaaaggtactagttctgcatttcagagttggcttgttgaaccaggctatatgcttccaagatttaaatgtttttctgtattatactctcaattgtgttttaaaaaaatctcttacagaaatctctacctcaggcactaagtgttatgacatgggtagcatattgatattgaaaacttagctaggacttccagccttttaagataatttaaatgtaaaattaaatggttaaccagcaatctaatgtcatgtggtgtgcagtttggatattgcatgaacagctaaggaatcacctgttctactgccaaagatcactcattgctaattttgttctgtacagcttatgtaatattttcatggtggagacggactctgtgtgctcacggccttgtctctaaggaagattttgtcat

SEQ ID NO: 182689 - DNA, 1190 bp, Homo Sapiens
tacaaaaaagttgggacaaaactagcccttggtctagtgtcatatcagacacaagtgaggtcatcagccctcagcctgacgaggtgcagagggaaggcccctcttgtccttctccagggcctttctgcagagaggagcttatggtcaaaagtagctttctctccagcccagaaagggctgtcaacccccacctgcctaggcagggttctcctagccaaagtcttgttgcttgtgagtgtgaggcctctaaggccagggttggtggcgagtctgcctcagccaaccctcagcccatcccatgcccaacactctcaggagctcaacagagcagcacgtttgttggatggagctcaccacagacagatcagaacaaggagcccaagtcagaggccccagctgagaatgaagctgccaccagtgagctcggtgactctgctgatagcttcaagaagttgccgctaaatctagcctcccagagcagaagggaaaaccataagggaccacccatcgactcctctgacatcaggcagaggcaggtgacaactggatcagagacgtccacaaagcagagcctcctgctcccagggcccattgtggtgcccaacttctttttgcctccccagcagttggaggcttccctgcggatgctttcactctcagcaactttgccaccagcagccacaacagatcaggacaagagcgaagccaccaggggagctctctcccaaaggccttgtcgccccagacctaactcgctccccctcaacctgcctgaggaagaaactctcaggattgcacggatattttcttctcagtactcccaaaaagactgacgcagcctgaggggctggggggaaggatacttttttttaccctccgtcagctttgtccagcttgcaggaggccccccgcctggctccttcagggctgtcacagtcctgaaaccaccacttgcctaggccacggatgcctcaagagacccggtcagcccagactggaggagtgccccaaaccagtccagtgtccacttgccagaatttcagctccttttttctgtggtgaggcaaaggctagaaataaaatggaatctgcgcccaagtggaacccaagcaggcatctttcggtggagaaacacccaccagtgtccttgacacagctgactgctggcatgagcccacccactgcctgaa

SEQ ID NO: 182690 - DNA, 1561 bp, Homo Sapiens
ttggctcctttccaagtagtcagatcgccttcttatttctttcatgtagcttatcgttctgatatatcttgtttttttctcctctctaaaatttgagggtccgtatcttgtttgtcttattactggctgcctaaggtctagaatatacataacacagaaacactctgtgtttgtcgaatggacacaaactctgctagcttgtgcacaggatttacagctactggtgatatactgagctttatctctgtgagcctctgccttagtgtctgaaggggacagagaaatagacaaaggagaggaaaagtcaaaatcactggttgccatttttggaagcctctctttctccatgttaaaccccttggcatgaatgaaaggctttcccctttatccttgctgtgtttattcattgtgtccaatgagcttctgaaggtaggagtaactttgcacattttgctgtgtgggctgctgcatctctgccaaaaggtttatgggatttttactcaggagatccaggaaaaggaggagcctggaatctaagcacttatctcctgaaaaggtacagaaacatgttggagatcttgagcctcaaggtgcttgcttcagaattttcctgattctccctctccagacctattctgttcttgggacccaagcttcttggctccagcccactcccccactagaggagctggaaagtttggtgctgtggtcataccaaagatgggcaacacccagactcctcacccttttccccagcattgtgagcgccatattcagagcctgcagacccgagtgttagagctacagcaacaattagccgtggctgtggctgccgaccgcaagaaagataccatgattgaacaactggacaagaccctggcccgtgtggtggagggctggaaccggcatgaggctgagcggacagaggttctcaggggacttcaagaggaacaccaggcagcagagctcaccagaagcaagcagcaggagtaacccgcctggaacaaagcctttctgaggccatggaggccctgaatcgtgagcaggaaagtgccagactgcagcaacgggaaagagagacactggaggaggaaaggcaagctctgactctgaggttggaggcagaacagcagcggtgctgtgtcctgcaggaagagcgggatgcagctcgggctgggcaactgagtgagcatcgagagttggagactcttcgggctgccctagaagaagaacggcagacctgggcccagcaagagcaccagcttaaggaacactaccaggcgctgcaggaggagagccaggctcagctggaaagggagaaggagaagagccagagggaagcccaggccgcctgggagacccagcaccagttggcattggtgcagtctgaggtgcggcggctggaaggagagctggatacagctcggagagagagagatgccctgcagctggaaatgagcttggtgcaggtcagaaggcagaggtttcttgaggttttgttctgacagaagtagatctgaggcagagggacctctcaggagttgtggcagacactcccagt

SEQ ID NO: 182691 - DNA, 1020 bp, Homo Sapiens
  misc_feature (788)..(874): n is a, c, g, or t
tcttataaatacaatgtaaactttttccattcttctaaattttagttataaaatacattttaattatatgtcaacaatttgcctcaaccgtaatctcaaatatctagaacagctatatcacattatctaaacatgagtaaaagctgagtttctgctttagagaaaacatctcagaagatgtttagaattacagtaattacttaaataattacctatattctaaaattcacaccatagtatcacatacctaataaaataacaacataacataaccctagattaacagtgcatcttttgggcagattcaatattatatcatattttttgtgtcagtcacaggatcctttggagaaaataatgtgttactagtcttacttacattttctatcaatataaaacgttcacaagcctttagaaactgtacattttctaaaatccaaaattacccttaataaatcttggcaaaacacacactataggagataaagacatccctaaaatttcactctaatttactgaaaatagaagtcaaattaaattcaaatgttggcttacattaaaatagcacaggatcttataatttacttttaatcttggaggaattctcattattctctcatcaattcttcttcaaaaaaataaattaataaaaacttccttgtttgtcacatacagtgtcctaaacagaaacatctgatttttctttgggtcagcaagaacaacttaacttccaaattcctttatggccactattttagacactaagaccaagaactccaaagaaagcnnnnnnnnnnnnnnnnnnnnnnnnnnnnnnnnnnnnnnnnnnnnnnnnnnnnnnnnnnnnnnnnnnnnnnnnnnnnnnnnnnnnnnntacaaaaccacattcatatacaacaggttcaattttttaaatcacatcacgagtggaaaagaaacccaaactatatattctaggaaaaaagcagccggtcacagtggcttaagcttatagtcccagcactttgccaacttttttgt

SEQ ID NO: 182692 - DNA, 329 bp, Homo Sapiens
gaaaggaaaaccagaaacctgtggcagcacctctgagttatgctgagcaactgtccgtactgcaaaggtagggactgtcctcctcaggctttgctgagtgacatctacatgcttaatgggctttactcaagttacccaagtgtttgagaataaactagaaccatctgatatttaagctccctgcccagtaacatttaaaaagcagatgtacacctaaattaaaggaaagacgttctatgttcattgatcagaagacttaacatggttaagatgccagttttccccaaaatgatctacagattcattgcaatctacagcaaaatcacagc

SEQ ID NO: 182693 - DNA, 724 bp, Homo Sapiens
gctgatgaattataaattctaggcatcatatttcaccccgaaaacttcagcatgcatctctgaaaagtgatgtctttctccatgaacaccctccattattatgtctgacaaaattaacaatagttccttaatgtcatctatgacctaagccatcgtcagatttccaccttatcctaaaacatctctctcacagctggtttgtttggttcaggatcccatgcaaggtcatgccttgtatctggctgtctcttcaatctcccttgaagagccccgccctttccttctgcctggacattgactcattgcctgcctgcaaggtgtttgtttgcttccttgcagcagtgttttcatgttcttctaaccctggtgttacgtgagaactggtaggcaggtctgcaaggtttaggctggtgagatcaacagggctcagtgacagatgaggcaaagccagcaggaggcaaggatgattctaccttgggtgacagaagtagatgtcactcagatgctgagaatggggagggaggagggagaggacaaatttgatttggggcacacagctttcaacatgtacaaaggacatccagatggcagtgggctatgtgagcctggagactgtgctgcgagttgttgatctacagccagtggggctgggctctcccaaggcggtggagtgagaagacaggtgagacacctagcatgatgccgtggcggaggaaatggagcc

SEQ ID NO: 182694 - DNA, 1132 bp, Homo Sapiens
  misc_feature (704)..(794): n is a, c, g, or t
ttggtttcctcagcccactgagctttcagggctcactagatcaaggcggtagaagagttacaaaggaaggggtgcaagtgttagcttccttatgtaccttatttattcaacactgatagtttcagaaatggcttagagcctagcttcctcaccaatatccatatacctttgacaagtgggacaaataaaagcataaaaatatctcccttaaataaaacgcctttctcatatctagtccatctacaagaataagctgatacctaatgatatgttttctagtttatgcaataaatggtggtgattacaattttgcacaaagacctggtacatatacgtcttagcatgtagcacatttacctgtaaatgctacaagtagcagaatgacagccatctccctaaagcactgattctccaagtgaggtctgcagtcccctgggatccctgagaccctatcagggtgtctgcaagctcaaaattattttcataattttgataatatttcataataataccaagatgttatttgccttcttcactgtgttgacatctgggtaaaattgctggtgctagactatgctggcagtcacggcattcttcactgctacaaacttacagggggaataaatgccagtttcaccaaagaatgtcctaaattagacagtaaaaattattaattttataaaaccttgcccaaaaggtacttnnnnnnnnnnnnnnnnnnnnnnnnnnnnnnnnnnnnnnnnnnnnnnnnnnnnnnnnnnnnnnnnnnnnnnnnnnnnnnnnnnnnnnnnnnngtgtgatgacttggaaacaaagtatcaagcatttctggtgcatcctgaagtatgatggtcatctggaggaaaagcacttgtgtgagtgtcctgagttgtgatctgcactagtcactttcatggaacacaatgtttactcaaaaggaccaaataaccatagttattcagatttggttatttgacaagcattttctcaaaaaatgaacaaactgagctcatcacttcagaaagacaataatttaacagtattttctgccaaatagaaagtataaagcaaaaaattagaatttttagaaaacttgtatctgccatagtgaacttaacacctttcccaacac

SEQ ID NO: 182695 - DNA, 288 bp, Homo Sapiens
ttggcttaccttaagtacaaaagcatggaaaaatgcgcttttccttcccgcccacatcaccaccccgacttgaagacagtaggtgcttgaatggaaagtgagtaggcatctttaatcgccctgattaaaggaaagtgttagcctgagagggcctgactgaaaagtaaccaaaggcttaatatcaaacactaattagctttttagtgccttaaccctgacctggttaccagttttctgtagtttctacacccaagccactgaagtcatctgtggcccaagaggtaggac

SEQ ID NO: 182696 - DNA, 509 bp, Homo Sapiens
agcaaagtttaaacaactaatttaatatttgataaggttttggtttgcctatatatactggggtaaagtatgacacaaattattaagcttgacaaaataaaagtagactttacctgaccacctttctatattcttcagtgaattcatcaaacagcattttcaacaaagctttggatccagtactttgaagtgaaacagtgacctaaagcctcacgtcactttggtgaaagcggaacataaatgacttttcaacttcagagttcatatttgttagagtagagaatacgaggaatgaataaagttatccttgttagtattaaaagccctaattggaagagaaaagtctccaattagttgaccctatttattaaccaaaagcttcacagaaaaacaactaaaaaagatattatgctttaaaaaatgggatatatatttggataatttgcaacctataatcctaaaagaactgccagaatgcaaagatctttttaatattattatttctccaa

SEQ ID NO: 182697 - DNA, 569 bp, Homo Sapiens
  misc_feature (504)..(523): n is a, c, g, or t
ctttgtacaaaaaagttggatgctttcctgggagccacctgcggccactaagataggagcggggttcagacatggccaggcgctcctaatctcagacccaaagtgcaatttttggcagcctgcatgagaaggagggtgggaggaaaggtggctagaaccaagggtagcagcctgggggcttgagaggaaaccaggcacagcccatcctaccctgtctcacgagcagcccgtcctcctcctgactccccttaccccacacaccgagcgccattctcttgctgcctcatctattctggttaggtacttactgagcatcaggtgctaggcaagtggctggggagagacaacgtttaatgactcagtctccgcctgcacagagcctttgagtctagagggagacgcagacttactgacaggctgggttgtgtaataagtgctacgggaggaaaagctgagagtgtctgagaatttatgagatgtgtgtctcatcagacttgggcatcnnnnnnnnnnnnnnnnnnnncccaactttcttgtacaaagttgtgcgccaacttttttgtacaaag

SEQ ID NO: 182698 - DNA, 1138 bp, Homo Sapiens
ttggcatgtcctgcaagggccttgctgatgggatgtcctgaagggctgggcagccttagatcgggctaagagggcaggactgtgggccagtgccagagccaggcttgtctgttctcaaaggatcagcctcctttggaggacattttgtgtcaaggatagggctgaggacctgcgttctgaacgtctttcctgggattcttgacagccaaagaaattcgaggatcgcctctatgaaggtgaagtcttggcatgtggggtacccctgaatcctgggctaaggtctgtgaccttttgccctccagttggggtatgtgtggtgtccccaaagaacaagggctcgtggatcccgagcagggtgcgatggcggattgggaggtcccatgtcactctcccatgcccgcctttgaagctgaggcgctctttagttaacaaactacaagtcccagcagggaccgggacgcgggtgggagaggcgcctgtggccccgaggcgtgccgcgagttgtagtccctcctgcccgctgtgttcgcttttgagctctccgatgggatgcggcgcttcggaatttcgggctttgatccctgtcccgcccttggccacaggcacctgccggcctgaaggcccccgcggtgggggtaccctgcgcccctccgcgggaaggtggactacagttatcggcaggctgtgcggcgccaaagccacggtgacccagacccgaggtttttccgggcgtcgcagtttcccgagactccgtggcggcgtttgtcttctttttcttagtcagatcccgtacttttgtggagggtagaggaggctttgaccgccgcggccccgggggctggtgggaaatggagttccaaatgagaaaatagaattccccacttctctttcccacaggtgccagggaaacggagtcatcgacccaagaaggtcgtgggagatgaggtcccagggtaaacagcgggtcccgccactatgtcaccctttcctgccgcctccccggatgaactgcatgcagggcggccggctccgtggcaggcagaggcaggaagaggcgcggagcccgctcgtggcgacaggggagtgcgccgggaggggagggcagaggcaggccggcggtcgcgtggggcctgggccg

SEQ ID NO: 182699 - DNA, 1154 bp, Homo Sapiens
ggtagaactcgtagttgccattgaggtctgagtcccggcttgcctcagttggggttcttgcccccatttgcaggtgagaggtggaagctcaggcaggcccagcctcccaaagtgctgggattacctgcgtgagccaccgcaccctgcatcattttttcagcagacatttgttgagcacctgcttgatacaaggcacccatctaggcacaagggacatgaaaggaagcgagtcagacacagttcctatccttttggagtttacattttatgtgtggagacagacattgaacaggatgcacacaggatcacaggatgtgacaaatgcagtggaggagaaagataggctggtgtgagagctgttaatgggggctctgctctagcctgagaggcaaggaaggcttttccaggagtcacattagaggaacaatctatacaagcagggaactaggctgggggaagtgcagggagctttttaggtggaaagaacagcatgttcaaaggcctgaagctggaaggaggctggctgacttggctccagagaagctgttgggggagtgtgggagagacaagacagggagtaggggtggggagaagccagacctttggagtcttgtaagcctggttaagacacgtggactgtcttctgcggccaccagtggctctgttgaggtgggaaattaaagaaaagcaaaattaaaaagaaagagaaataagtttttctgtatgagggtgacttgtcccagaggcagcaataggcacaggccagacccaggaaaatttcttcataatattatctaatgtgctctggagattctcccagtactccctcaacatagggagaagaaaaacaaattttcctttgttttatggaatgagtttatagattcctattctctgtaaccagtgacttcaagtattgttttatctaagcagtggagtgaaggtcatgagcctctgagctggcctgagttacggccacctgggcgccatagtgaaggttatgggataagtctgtgcctgggcaaacctagataacggacatctgggttgcttggcaacggtcacgtgcaatcctgagtttgtcctgcctctatatccctgctttcatgccactgtaagcttgcttcaagctatcccacccccttttgtgaagt

SEQ ID NO: 182700 - DNA, 1167 bp, Homo Sapiens
  misc_feature (765)..(839): n is a, c, g, or t
  misc_feature (842)..(853): n is a, c, g, or t
ttggcatctttctagccacaccttcatgttaaaaatgcctcagccaactcacaccagctagagaacagttgatggcaattatgggaatattagcaacactaagttctctttacatagcattttttcctgacagaagccaagacagttgaaatctggcttggcattcaatccataattaccctcattgcacccttcccctaaataatttccaaagtgatatgaatgaggttggaactgtagctgagcttagtatttgctttttttcccataaatagtcggtgtcatagacatactattttatctcttcatgcgcatgtagtcaaattgttagactgatgcttaataattgttcggagaaaagaatgtgacttggcaaactggctgttgtttctgcctcacactacggggaaagggaataatgataccctgtgtgtgtttgtgaacattctgaggtgtactgttcccgtcatcttagctcccaaagaggggatatcttcaggctttatcatcttcatgtcttctgctgcagagaagcctccaaatccatgggttctaggtgttcattgtatggttcatgagtgttttaggtgaacaatatttaaaaatccatacttacaaaggaattcaagtagaagatatctgttttgtctataaaggaatctgccattatcatcttttaaatcacatgtttgaaaatataatttgtattcctgggtcctcttatttatcttttatctttgagatgcattcttactctgtcactcnnnnnnnnnnnnnnnnnnnnnnnnnnnnnnnnnnnnnnnnnnnnnnnnnnnnnnnnnnnnnnnnnnnnnnnnnnntgnnnnnnnnnnnntgttgagttaacttgtaactactgtactatttcctttgcatgcaaacagctgccaatggaatacctacagaaccgaaatgataggaggaaaaaaagccaaacctaagtggttgaaacaagcagaccattcagcttctgccacacttacagattcccagcaggtgctcccagttcagggatccttcaacacgtgtttgttacaaatgaaggatggacattatgcttcatgactgatcatgtcaaattctgccttctattcttctattaggaccctcaatcccctcaaaaagaggaaaggatgaatgttagcttga

SEQ ID NO: 182701 - DNA, 1017 bp, Homo Sapiens
ttggatttactattccttcacctccttgcacatgtaaattaaagatgttttggaaaatatgagaacttgatgttcactgccctagagcactattctccaaccttttagattcctgcaatctgttaataaaatattgtaggacaacaactctatagactgatacatgctgctctcaatccatatactacatattaggacagcttttcttttctaaatgagcatgaatataaatagaaattctagtattttcttcacctaccccagtgaatcatctttatattttacttgggaaactgctacagttggctagtgggtcttcacttttattgctttgagaaatggataaaagacatagactatcacccctccaaaaatgtgcatatggccccatacaagacacatgtactgccagagcttggggaactccctagaatctactcctagaccaccctagtgaagtaccatagaccatattgtctagatgggacaaaataataaattttgactaagaacttactgtttagagagaaaaaatagtaaataatgttcaaaatgagaagacaataactgacaagtctgtgatttttgggttagatgagaccacttttgatttttgaggaataaaaggagttagttttttggtcctgatgtgtaaaatgattcatggggtttcacatacagacaagtagttttcttttcagcaaatatttaacatatctctcaatatatttttcaccagtttttggtaaatatgcattgctataggtataccaagttttttttgttatgtttagtaactaatttcattttttctgtatatgtaaatatagctattggaccctgcattgaaaaccttcttagtactaacaacactccttttattattaccttcctagttactttaaatgacatatttatttcgagttttacttctggctgagttgcaaagtctatgagaatgttacctcctgtctcaaaagcttgttagttattgtgccacctaatattgtattaaaa

SEQ ID NO: 182702 - DNA, 1452 bp, Homo Sapiens
ttggccctcatttcagacaccatgatgagtgatgtagctctcctgctgccagcttacctatcatcggctgtaacacgccctcggcaattttaatgagctgctggtagatctgaatggaaaggtcactcagcacctgacggtattcggtgaggtcaaaattcttaagacagtgttcattctgctttgcagtgttctgagtcatgaagccctgcagagggagaggcgtgcactactgagttctctggtctgctgggcccagcacaacttccagggctctggtaactttagtcatctatttggtgggcagggggcctactcaggccctccctatgtagatgatgttttacaaaagcctgtcagttctttgaggcctcattgatgacccttgaacttgaaggatgtagaaaaactcaacatgagagagaaagcctgaatcgctcagtccaaatccctgaggcgaagtgatttccctacggtagcaaaacctaggttggtaccaggtccagagaaagggatccctgctttttcccttcatccagcgctttcctcaatatatcaggtccccctaaaatgttagatgatgtgcagcctctaaaggagtgtggccatgggccagattatacgcttgtatgaggagaaattttatacagattctatcactggttatcagaattaatagatgaactaaagtgatttcatagctaccgcactgtgtcctcttagctttctgtattaatcagatgaaatcacatgtaagttaagggaactgctgatatcagaagggctcatgtgaccaatgtccttttcattcaggcctagggaaaccagtatctgccaaaaagattagtgctcccaaaagggcaaccatcttcagcaaggcctgttgtactgtgtcaaatacaaagccatcttaatatgaaaaaaagcaggcagaaaaggggataattgtaatgatgaagatagagtcaatcattcttccttgttatttggactacacggatctggtcatgctgtggttcagctcttgacccagagaatatgagcacatgtaaccacaacctaatgtaatggagttctaggtcctgccctagccttatataacctcccatttagaatgtgtataacattgggtaaagtgatggacctcaatgaaataacattacatgtagttctatgcttcaagtaaatgcttggatattatgattttgtaacagaagtcatggggtttgaaatggctatttctttaacctttggcccatctcttttataataaaagcaggccatcaaatgaagtgctggttcttacgagagagatggcgtcaagccaactgcaaagaaagtaagactgaaaggaacggcatatccttttactaacccaggagaagagtctgtcaaaattggttctggcacaaaagatggaataaagctttaaaaatggtcgcactattttgg

SEQ ID NO: 182703 - DNA, 794 bp, Homo Sapiens
  misc_feature (332)..(400): n is a, c, g, or t
ttggggagtgtcttggcagtgtaaaggaaaaagatggatggaaaaggtgtatagtggcagggtgtgcctttgtttccttattgaacagggcaccttgccatttgcagtatatggaaaattgaagaaatacagtctacttccgcaaaaggcacatacaaagggctctgtttagaccagagatcagcaaactatggtccgtgggccaaatacagcccagcacctgttttttgtttgttattttaaatgtataattcactgatttttagtatattcacagaattgtacaaccatcacaacactaccgcctgtttttgtaaagaaagttctcgttnnnnnnnnnnnnnnnnnnnnnnnnnnnnnnnnnnnnnnnnnnnnnnnnnnnnnnnnnnnnnnnnnnnnngtgtgagccacaacacctgacctgtggctgttttcttactgtagcgatagacgaggagttgctgcattgcatagagatggtatattgcacgcagaggctttactgacttcataaaaaagtgtttgtcccaggtttagtgtactagatcccttgcaatctgtaattttaatttaaaaatgtccagatacccctattttgaaggataaactctgtatgcttgtgcttattttggagaagccataaacttactttgttttgtacatgatcagatgtgggcgctatctccaactgtctttgcacttctgagtaacaatctgatgattgtgcacagtgacctggctgttcacttccctgccattcagtatgctgtgctctacacattgtattctcattg

SEQ ID NO: 182704 - DNA, 596 bp, Homo Sapiens
ttgggtcctccctctgccttctgctgcttcctcccctagaatgtccttccacagcatagctacctgtcagaattctccccttcctccaaggctctggttaaagtccacctcctctctgatttcttctttgtccatcccctccccaaatctagtttgtaactaccaacacactttaacatgcagtttcttatttagttgatgcttcactgtcttatttgcagaattcagttgtagcaatctggggcattgaagaatttaggagcttaaatagttcttacagggtcaccagtggtactctccgcctaagtccatagagaggctaacacccttctagtttattagtctttgttaaacctatgaaattatgaatttaatcctaatttatatgcattgtggaggtcactcaaaaatgtttctctcaacagctgtgataagtataggcttattttgatgtctaaagatctgttacctgtatctgatttcatcttccaacacatatttattgaatatctactatgtcctgtgttctggacaagtatgcatgagaacaacatacacgaagtttatcattaaatgggaaaagagcagacatttta

SEQ ID NO: 182705 - DNA, 1169 bp, Homo Sapiens
  misc_feature (1099)..(1112): n is a, c, g, or t
ttggctttcttttctgcagttcttaaaatttttatttagtgatgttagttgaccttagctggaacaaaagtcaacaagtaatccttttaaacagtaaaactcttagttttttcattataaattgaggcttctaccaaagtgactctaaggtagacttgtgttccaatggtaacttaaaatatgtaaatgtttgtaaaatgttgtttatagatcccagtgttggtcaggcctgggatggccaagacagttggaaagcaggagatggacaacttgaaggcattgcacagtgctttagaggcctcctgcgagccttggttttgaagctttaacaggcctccctcccatctggaaataggtagctgtgtctgagactcctggagaacaattaatatgagggccaggcagatcacaatttcaggaaaatggctaccctgtgaggagagaaagccacccaatgatgctgatacctggccatttcctgtaccgaggcatggggttggggggtctgaagttagaagaatgtaagtcatcaaaggatttttggtcgaagtccttccaacttcaaaccgatactaatgttcactttttaaaatagttcgtctgacaaaagtgtaaaagtttgggatgttggaacgaggacttgtgttcacaccttctttgatcaccaggatcaggtatggcattattatttcatctttagatagtcggggttgtttgaccattgtaccaaagagattttcttttcctgacctttgcttgagctgtggataccagtagatgcctgggcctgagctgctctatctgctcagtcatccatgtagccagagttcctgtgcagagtctggggtgcagaggctgggatgtgctgtcagcctagcaactcacgaggcatatccccacataggctggaaaacatggtgttagcccacagcctttaaatgccgtctttggaaattgctgcagctggtgtctggggccctctcctgggggctgctgcgccatggcaggctcaccaaaagaccttcctcttcagagattccattgcttaaacacaatcatcgcttgtcatttttgggactgtccaaagaagagatgtgannnnnnnnnnnnnnaatatagtagaaggctggaaattctaacaagtttttttggctttagtgttattgata

SEQ ID NO: 182706 - DNA, 1585 bp, Homo Sapiens
  misc_feature (134)..(160): n is a, c, g, or t
atgagccaccacgcccggcctcattcttgttcttttggcttttttctacaagtgacaatcagccagaccctctttcagctacaggaagagtttgataaagagaatgcctgagctcaatcttgtgtgttttaagnnnnnnnnnnnnnnnnnnnnnnnnnnngtcttttcctgccttgtacctctgtctaactaaaaagagaggcagcttcctcacagaaaaatatcactgatcttaaaactgaattcaaagaactgaagaaggaagtttctagtgtttcacttctgtggatttggcccagaaaaatccacagagaaggtgttaaagtcaggtaatttatcctgcatcccttagaaagccctagagccaatcaaaactctccccaaagggctgaaatcaggctctgagggttgtgggagtgacagagccatgtaagctctctggattcacaggtttaggtcactgctgatggattcaattactatgggaggacatttcatgctgtctaattttcattcaattggatgattctcccaaatccttcgttctttaccataagtttactcattattttagctttacctcaaggcactttcccctgggaatttttctgagaccagtgtgagttaggtgtacttcctgtgttttgatttgtcatactaaaaatcttacaagtatgaatttctacatgaaataaaggtaagatcttaatcttaacaatctaggtcttagatttcacggtatgggcattaaacaagtgtttatttctgtatagcctttttgatgagtacccagcaatcccacttctacgaatgtctatcagtgaaattccagcttagctctgtagtggcttcatagaatccagtcattgcagcaatttcaggcagcagagagttggggcaacctgcatgtccatcaccagaatgagtaagtactgcagtgaatacaagtttgtgtgaagtttcatgctctgcaggagtcacaactaatgaagcagaggtacatgtataccaaaaacaggtggatttttcagtgcaaagtaaaatctaagaaacaaaatgtatatcaggatgtatagtacaataccaaaattaaaattacagagttacacaaaatacagtgggtgaggcagtagctgaatgactaatgccagagggaatggtggcaaattgtgtgaagaggggaagaaactaagttaaattatctgattggcacacttgccacctcttggaagacacctgattacactcagtcccctgccctcttgctggccaggaagataattggtcacaggtggccccctgaccccacctcactccacagtttcttatggcaaagcgtttccttgacagaaaatgctaaatgtcgccaaagcccctcccttggggtcctggtttctaaaaagtctttttttctgtaatcaagaggttaatgtttgggtgtgttggaaggatacagaaaaaggcatagcacagtatggacatggtcttgaaataaaattcctccttattctgcctgaatttcctgacatgatgacatggtatttatgaggatgtgggtcactgggcgaaagccttccttggtctt

SEQ ID NO: 182707 - DNA, 1008 bp, Homo Sapiens
ttggcacaccttcagaccttaggagagggagaatagctataccttttaagggctgaggcattcgtgagaactggcagcctcttggcccctactccagccagcaggctgagaacactaattgaaatgatcaggttggagcaagctttgcagaagatagagatggaaacgtgaaaaactgatcctcgtatgggaaggaatctcaatgactgactggcttctcagtggaagtaggactgcctggagtccctgaaatgggggagcctcctggagagaaaggctacctcataaaagtagatccagttcttagtacttttgggagctcaatgataactgccagtagagccaggaggtctctcattgatctcttggcctcttgcccttttgcatgtttggcggactcttctcccataacattttttactatgaacttgatccagttgagctccagtggttcctggggagagaatccttttgcttcctccttagctatagcggtcagtacgcctgaagctcagttctaagcatatgactgcaggcattttggagatggatcatctagaagtataaatccagtatgaggctgttgctatgttactaagagctgggggaaggaagggctcagctgttcagcctcatctttattggaaggagctatgggtaggaatggaagaattgtgtggtttctaagcaaggaatcaaagattacccaggttctgagagcttgggggagcttgaggaagggagtcaatccctcactatcaaaaggaattgaacaggccatggacaataggatatattcagcctttaggaagaggcagagagaaaaagtgcttctgctctctttagagtcattctaatggtttctggaagagtgttgccattgcccaatccaggaatggtccaatccaagaatggtctatcagtctaggaatagtttagaatgactttgtagagggactgagttcaaaccaactgacaaaacatcagggcttaaaaacaaattgggcc

SEQ ID NO: 182708 - DNA, 1142 bp, Homo Sapiens
gtttgctaaaaattttttttattgtgactgaaaacattgccaacttacatatatcatttttatttggagtatttttttgccttgcagtgctcctgaaaaattcaaaaatgcattaactttagctctataaataacacaacctaatattaaggttgcgttggaaatttcccacgtttaaatatttccctaaaaatcaaaagacaatttaaattgttttacataaagaaaccttaataagtatttaactttttaataagttaaaaagtaaagactggcaaataatcacaaatgtcagaacattaaagtagcattttttccataggaatatataaaataaatatcatctatacttacttgatatttacaaaacttaaagataaatttttgtggatggaagatgtcttgaatacttcaatatgtggaaaacttcattatctttaaatatcaggtccaaatgcttttaagtttgatggataatagtgttttctaaaaaattctcatcactctactgtccctgaagacatagcttttccccccattgattggataagtattttgatagtttctgtactcttttcaattaaccattaagaggttaaaagaaacctaaggctttatttggggagatactggacgttttaattgactagttggaaagaagccattcttttcctagggttttgttgtttagttttgtttcattttttaaaaatcaaaaatgacaggaatgaaaattcaaacaatttgatccagtattatgctaaaattaaattcagtagttagatgaattttctactacagtatagaggttgaaaaccattaggaatgtggtaaaaaactatggcagcgaaggtggaattcaaccacaaattctactgagtggatagagaaataaacagaaaaattactgtagttaaaatattgcagttaaacgcactgttagcaatgtcctattgccaacattagaattatatgcttcatcactggttactaagacggttcagtgagcaggtggttcatctctgacacaactaagtttcagaaaagtcaatgacttatatctggtttagatcaacgaacacttagtatacataccagtcagctatagtttcaatgacacaatgaaaacattaggtacccaa

SEQ ID NO: 182709 - DNA, 750 bp, Homo Sapiens
ttggggattcattccggcaccaccatgtcgaaggtttcctttaagatcacgctgacgtcggacccacggctgccgtacaaagtactcagtgttcctgaaagtacacctttcacagcagtcttaaagtttgcagcagaaaaatttaaagttcctgctgcaacaagtgcaattattaccaatgatggaataggaataaatcctgcacagactgctggtgagtatttgaaaactcatagaggagtgggtggggttatatatgtcaattgacactgaatagttaagctattctaattacacttgacagtattttaacataatggagctgttttttagggattatataccaatctttacctgtgtgtctgagtaataagttgtttcattgtgtatattgattgtagatgtttttggctacaagtaacagaaaacctaatagtggcttaagcattaagagtatttattatatataacaaaaagtctgtagataagattgctttctaattggagtattttttgacctacctcttaaggtagttgtgagatagtgactgtaaagtgcttcatagcttggattatttatagaaagcattcattaagtgctattattttttttaaatatagtcatttacatttcaaggggctgagtctacattcacatcttcaaactgttaaatttatacaggtgatatattcgtgtcctgaccaggagacagggtaaaagtagtctcatactttataaaaaagaagtct

SEQ ID NO: 182710 - DNA, 1392 bp, Homo Sapiens
ttgggttaatatccgtgtgtgactagcttaaagacagtgtactccacaagccagaagattagtctccttccctgtagcctcatctagcttacttattcagactttctgttcacaaggggtttgttatcttcatgaaattttaatatgtgtaagttagaaatgaaattagaaaaagaggttcttgctgtaaacactgggcagagtagctcagaagaagactgtggttcttggatgccctcatgcctttgttccagtgcaggtgcctagtggagggtgcagtgctcttgcaacatagaaggacccatcttgcaggagctgatggcttagctcctgggaacgggaggagaggaagggcttgtggacccaacctctgttgaattgactggctttttgagagaccactgaaactcccctccccactccaccccccatctgtgctagcggaagtctatctagaaagaaaaaaggagaaagtgtttaaatacgtgatggacgaatgccccctgcctctggtatactttttcttaacagaaaaggtcattctaactttgcataatcttcaattataatgtagaagacttttccaccttcctaaataattaaaagcaaactaatgatctctaaatatttgccttcctggttcttttgaaaatccttttgtctcaaataccacttcagtgctgtgtgcatgaatagtctgccagctgacttgtgctatggaagatgtttacccctctgtatacacttaacccatctcctgccatttacattttagctgttttagagaactccagttaattcagaaaatgcttaactttttctgtgttcatgattataaatctaattttgttttatggttttaggtctcgtcagcctatctcggcccctctcttttcatgtcctgacaaaaacaaggttaatttcatcccaaccggatcagctttctgtcctgtaaaacttctaggccccctcttacctgcttctgaccttatgctcaagaactcccctaactctggccagagctcagctttggcaactctgaccgttgagcagctctcatcccgggtttcctttacgtctctttctgatgacaccagcacagcgggctccatggaggcctctgtccagcagccatcccagcagcagcagctcctgcaggaactgcagggtgaggaccacatctctgctcagaactatgtgatcatctaaaaaagggggagctggcctccaccctatgttccatggattcggaacaagatttcagacatctgcatgagtgactaactttctgaacaccaccaccaccaataatacttatcagcatcataaggtatctcttaaacactgatcttggcagggacggaactccctattcaacagtttttgtggaaa

SEQ ID NO: 182711 - DNA, 771 bp, Homo Sapiens
ttggcgtcagtgttgtactaacagtggactttgattattcagatttactgattcctttgttgttttccagcaggtgtgaaagacaacatacatcaccatttgagaatttgtgttacggttttttgggggaattgattaacttcagagtcctgcaatctttttaatcaacaatgacatttctataattaagatcctaggcagcaatatttttcaacctcaatgcaattcttgatccaaagaaaattaaagttttatttaatggtatattattgataatcttgggtaatatttacatgatagaaaaatgttttcatgatttcttttgagcaataacgttttatattatgaataataatacagtggttgagtcagcaaggtaacaaacacctagagagtaggagggtggaaaattgtatttaataaaaaacgcaaacccttttcatttaggtgactgctaggccggccttactatttgaaacacctgttaaattaaaggtagaaagtggtacaaaaaaacccaaatgtcttgtagtctatcaatgcatgaactgccttatagaacacaacaaatgtgccaccttggaaaattctagaaaatttctagtcaccaaaggttttactttatgggattttgcagcattagcacatgtaaaaataagcaacttttgtttatgtactgaatctaattcactgttgccagaatagaaaccaagtgtctaaaattttattagctctcacaggacagaccactcagaaatggcatctgtgaaa

SEQ ID NO: 182712 - DNA, 971 bp, Homo Sapiens
ttggcttagatttcataatttccttattgttctgactcaaaatgaactaagagcttttcactttttgtttgtaagttctcagagagtcgggtctgcaagtgcttttgcctgccaggattttgtactcaaataaatgctatttggcaactaaaattcttggctctcatgtaattttgatgttactgaggttggttggtagtttattttattaattttgtggttcttctatcatatagaaaaagccaaatacagttttgtttgaatatttgtaaatggacgtgatctttcactttaccactctccagcatgctttaaagtttctccttggtttctagaattgattctctgttcttattttccattttgactattttttagtattagaattcttccagctcctaaatgctattgtctatctgttgttatcttctacatgatccccttaatgatcttatccatttctatgggtgaaatgactatttttagagtgatactaatagcttcccaaccggtatctccagacttgttgatggtggtggccctccttgagcagctgctgcaaggacaccagctgcagcaagggaagcatggctggggggttgcaggctctgcagaagtggcaggggccggcaataggtgatcccagcaggaaccctgccttaccatgttggcagggcaggagcttgtgctcctgggtgcagctgcagccacccagctgcagctccagatccaggcatctgtgtgctctcgggggcctggaaagtcccctgcccatgcaggcctggaagtgcctgctccagttcggagcaaagttgtggctgagcttgggtgctgtcacaacctggccaggtgtgtgcatcctcagggtggtgctgacatgtcaggttcctgctacctcggccccctcccaactatggggcaccaattgagcatgggagggtggcccaaggggctgagggtagcttggtgtg

SEQ ID NO: 182713 - DNA, 276 bp, Homo Sapiens
ttggattttttaaaccgaaatctgtggatgaaatagaagctggagccctcctcttggaatattcagcctaagaacctcataggactatgaattcacccgaaattctcatttgccatcaggccgagcttttaaagaaaaattgttctctaaccaggattgtaacaaaagtgtaaatactgtttcagagttgagagttggtggtgcaaatatgtatataatgaactgtatttttactatgatcgccgcttgacaatttcccaccctttttatactcca

SEQ ID NO: 182714 - DNA, 820 bp, Homo Sapiens
  misc_feature (268)..(277): n is a, c, g, or t
  misc_feature (463)..(488): n is a, c, g, or t
ttggctcttaatgtgtctccttgcctgattcctcttaaatatatgaagaaaaaaagaagaaaagattttctcctctgtgaaggagtgggacactctcatccaatacccagtttattacaaaggtcactattgcaagaaaataaaccagcaaagtcttcaaatatacccacagaacagcttgccagccctctggattttctgtatcactgaaaggaaggactagttaggacggccaactcacaagcaaatccattaagatcttcctgcnnnnnnnnnntgtgttattgagaaagccctggtgcgataggaaggaggggaacctgcactagctctgggacatttgtggcatcagttccccgctctgagcctctgtcttgatatctactacatgaaagtgattaaacctaaagctacagttctttgattccaccaaaaaaatggtgcagaaagtgcatgtataccnnnnnnnnnnnnnnnnnnnnnnnnnncaaatagaaggcaggaggtgataaaatgcacggtgtgctgagcgtgatgctaggtttacatgatctcatggcatgctcacagtcggcctcagcatcaccccctctttaaagatggggcaactgatgatctgcctcgggtcctacagctaggtgcagcttggtccactactgtgataacttgaactccactgttcaagacttaagccttgttctttgccttctctccttcaggggcctctctgttcactccccacttggcttcacttttgatagaggagagagaaactcctggaaacaattgtaaaatattggaaaatctaagagtttatggg

SEQ ID NO: 182715 - DNA, 929 bp, Homo Sapiens
  misc_feature (236)..(346): n is a, c, g, or t
ttggctcaccatcatggcagaaggctcttacatggcggcagacaggagagaatgagaaccaagtgagagggtgttccccttataaagccatcagatctcttgaggcttattcattataagaataagaataagaataagaataccataagaatagtaccgtaagaatagtatgggggaaaacttcccctgtaattcagttatctcccaccgggtcccttctacaacatgtgaaaatnnnnnnnnnnnnnnnnnnnnnnnnnnnnnnnnnnnnnnnnnnnnnnnnnnnnnnnnnnnnnnnnnnnnnnnnnnnnnnnnnnnnnnnnnnnnnnnnnnnnnnnnnnnnnnncagctgctaattgtgccaggaatgagaaagcccaggctagaacctttcttccctaaatttcatcagaagtaacagtgattatatatagaagccttaagtgctgttttcttgtgaaaacataaatttaagaggataaagtctggacttctgaggataaaacatgaactagattatccattctgcaattgtgcacctggctgtatcccagaggagccttgctatgcccccctccctttctctcgtggtttgttaatgttggggaaaactgatgaggtctaattgggcttggttaagtgaattcccaaggggaagcctccttgctcctttgctctctcaatggctgctttgtgtacagctcccctctgactctccactggagccacgttattgtattctcacctgttcaacaggttttccctgaacggtctgagaaataaataccagttaaaggggtagaaaaacaagcttgggcctttgattcctagaaggttagatgaccttttttgctgtaattctagacaattttatgtagaggtgggggcaaggtacttaaaatgcattttagtttttattatttactgtc

SEQ ID NO: 182716 - DNA, 1028 bp, Homo Sapiens
ttgggtggatgcatgttaatgggaatccacaccttcagttactcctaaactgagtacagtggctctaagtattgaaaaggagcatcattccattatagagagccctgtgcagcctggttatctgataataagataaagacactcagtttaggagtaactgaaggtgtggatgcatgttaatgggaatccaatttttactatttttatattaataacagcgttctgtagaaacagtctctcccttctaaataaaaactatgtgactgctgttactagtgctattctatgcgaatatcctaataataggattcaggaattctaatgaattgtttcttaattaaggtgaacaagtagactcctgatcaagaggagaacactgtgaatgtctcataatcaatagaccttcattctcttgtagaaaatgtggattttcaggaaaagactgattattttcatgaataaattttcttatacaaattccattttgtttgacataaaagaccctgaatcttaagatatttgtaaatcagaatatttaagaatgtaaaatgaatccccaaatctagtttcctccaaagcacttcttaatgtaggaaatagtttttacaaaccctatgtcagtactaatgttcctgggtcaaacccagtaatattgttagtgtatgttgttacaccttatttaagaggcagagtggttttgagcaagtcagttaacgtgatttgatgaagaaataaggaattatatacatttagacagaagaatattttattttgaaaataggatttcgtgcaataatttttcttgcataacttagttcatataaatatgtacatctgtttttctggcagatgccttaagtcatgtttttcagtatttgagtaaatctgtatgtagcaatgttctcattgatttcagaaaaaaatatattctttatattgttgccagggagaaatgtttttgtttatttaaaattattatgggatatttgtgttgttgtatcataactaaactgcctcaccaacaataa

SEQ ID NO: 182717 - DNA, 742 bp, Homo Sapiens
ttggaactgtataacttttaataactatatattatatatgggataaaatatatggactgaattgtgagaatataaatgcatcgaaagactctggtgtcatgaaagcacaagaataaggctggagatggtcccagatccaagatgtcccaaaagccttttgtatcagtttctctatttttggtattttgcataatgcatggatccttagttcaaatgagggacaaagtttctcagtcagccccacttcctttctttctaactcctacctttcccttgcagaggaggtagtagagattctggaattgtctatttttatgaattccattattttgtccatggcatctctaatgaaaacaggttctagaataaaggagttgattagtctgaacagtactaattaactacaaaataaacgttagtgatcagcctcttcctctataaacaatgaccaattagacgtttccgtaattccatgtattatgtatagtacactctataaatgtaatgcttgtctaaaaagtgcaatttattgtacattgtcccaacaaatgtttacttttataatcgttatgaacttgaattggattagtatcttgtttttatgtgtgaatgaagccttgtgaaataaacaaatgcaactgagaaggtaacaaggtgactgtttttgtgagccagtgatgttttcaatgctttgtgttgcccctttggccccattaagcagtaataaacatttgttctgaag

SEQ ID NO: 182718 - DNA, 903 bp, Homo Sapiens
ttgggtcaaaataagattacatacacatctgggctacataaaaaatgcactcacataattctttcttttgaaacatgccataaaatgattaaactatatgtaaacacagaatccattgacatatagccaccatggaaatgaaataggacaaatacttagtagaacctggaagttctacttacattgagggcaggaagtaaagaataatttatgaattccatctgtaaaacagggaaggagtgaattagtaggtcagagattattactcaatttggaggctagccaaagattggccaattattctcttctgagtggagccaaatagttcaattattattatagtttcactctctaaattcctctgctcccttttacgagaacaaagtcatcaattttccattcacattatttaatttgcatattatgaaggcttttggattagtgtctattattaagttttctgaaactatatgtacaaaagatttttgtgaaagcaccatcaaaaattaatcaagagcattttattttattttactttaaaataaattgtattgtgcatatttgaggtttacaacatgatgttatgggatacagatagaaaaatggttactatagtaaagcagactaacatgtctatcatctcacttagttacttttttgtatgtgacaagagcagctaaaatctacttatttaacaaaaatccctaatacaatacaatattattaactacagtcctcatgttatacattcgatctccaggcctgtttatcctacgtatctcctccgttgaatattggacttacatctccttcattttctccccaccatgggtaaccactattttattctctatctctggtatattaggcttttttagattccacgtaagtaatactttaaaa

SEQ ID NO: 182719 - DNA, 745 bp, Homo Sapiens
  misc_feature (81)..(89): n is a, c, g, or t
  misc_feature (413)..(448): n is a, c, g, or t
ttgggtttttactactgaaaagatatctctttgaagcattatttataaaaagtttaatccatgtttgtttttgataagttnnnnnnnnntctttattgaagaccttatttcccaggcttcatatgtgcagattagcagtggttcttgtttagcattgggctaaaataatgtacagtgaagtcaggtttggctaatatgacacaaaaatgtagagttttccctgcaaatgctatacataattgaatcactgaattacttagggggttatagtcattaccacacatctccaatttgttttctggaatctctgaagccacttattacaaatagacatttagttcctaatgatttcattgggggctgctacaatttttcatttgtagctttttcacctattgctacctaataccttnnnnnnnnnnnnnnnnnnnnnnnnnnnnnnnnnnnngtacctcttatttgatattgtgtttccagaattaattaatttagatgactttcacgtagtaacttttatccacaagtaatactttaagcagaaatatataacttggtttttctaaaataattaatttaacatatcaagaatggtattaagaaaaatatttggggatttttaaatgaaatttaaagtggaaatgtattacttgaggtagaaaaaccaattctatacatattcttaatagttaaatctcctagctcactgaagtttaaatttttggtatctcaattattcaaaaaactg

SEQ ID NO: 182720 - DNA, 202 bp, Homo Sapiens
tttgtacaaaaaagttggctgtgtgcctggcactgtcctaggccctgtagtagagggtgagcaaaatgtacaaaactcctgccctggcagacccaacattctactaagggatctagacaaaaaacaaagaaataagtaaaatatacttactatatagactgctacgtagtgcgaagtaacgtgcaaagaaaaatagagtagg

SEQ ID NO: 182721 - DNA, 765 bp, Homo Sapiens
  misc_feature (91)..(132): n is a, c, g, or t
  misc_feature (157)..(181): n is a, c, g, or t
  misc_feature (711)..(720): n is a, c, g, or t
tgtacaaaaaagttggcactttgttaccttaaaacaaggagtgcagtggcacagtcatgggtcagtgcagcttcatcttcctgggcttatnnnnnnnnnnnnnnnnnnnnnnnnnnnnnnnnnnnnnnnnnngtgtgtgtcaccatgaccagctaannnnnnnnnnnnnnnnnnnnnnnnnggagatggagtctcactgtgttacccaggcttatctcaaactcctgggctcaagtgatcttcctgccttgacctcccagagtattggcattacaggagcaagccattgtgcctggcctgctttctttcactaataagcttaatcaactttaataaaattttttaaaaactgattttatctgtcactcatattctttgtccattccatttactatgcattcttatttaacaggtgataattttatattccataagtgcttaaacaccattcattactaaactacatttttgtttaatttcacataatttttatataagcagtactctttctcagtttctcttgaacattcaactcattagtgagtggttttccccagtcatttccatttttctttatttggctctgatagttttctgtttttgtttttcagagataatcctttactatactaaattctacgtgattatattttccacctctatttgcctatatttatctgctgtcttttccttttccatatatgggcttannnnnnnnnnccctcttcttccttttctacctttggtatttaaaaagttacttag

SEQ ID NO: 182722 - DNA, 593 bp, Homo Sapiens
caactcattgtttactgtcttttttcctagtaatcttaaaataatttgcctcacagaaatagagacagtaagtgtctgcagccagttcactgtttttggtaattcattggtcttcaggagttaagattttacattgtcacattttaatttttaagcctatttttcatctctgaaactttccttttctccttggttctggctatacttggactcaaactgatcagtgtgatcatgtccaaaacagcttggcctggaagaggtaggccttattttttcagcctagtagtgtcccatgcacatgctctttgtagcattcaagtgtttaacattggataaattaagaaggtcaagaatgttgttgaaacttcaaggtctcaaaaggaaatgatggggacatagaacaactgttggtgtaccaaaaaaaggtacagaggggcaccatttgtattgtcacacaacaatgatcagaatgatcagtttagaatgatcagaacaaaaacaccactctttaatgggtctttttcttggctagaagtctttcctcagtttttgttgactatcatacgctgatttgtgggtgatgggaagggggc

SEQ ID NO: 182723 - DNA, 144 bp, Homo Sapiens
ataaaagccaactttgtacaaaaaagttgggcttctggaagatttaatataagacaatatgtttatgaccttgggttaggcaaagatcccttaaacaaaacattaaaagcactaaccataaaagaaaagattggttattttgag

SEQ ID NO: 182724 - DNA, 989 bp, Homo Sapiens
tttagtatttgatcctcagtacatcatatatactgaacaaatattgaaagaaaaatgaggttaaacgcttatacctatttcattcactcctcttatttatgcactataaagtatgccagaaaagataatgtggcttggccgagatcactcagctatacatattttttaatgagagtaccaaacaggtacaataagagtgtaacagtaaaaagaaaagtagtttactgtccaacagacatgggtttgaacctggactgctcacatacaaactgagtagctgtggcctttctgcatctcagtcgcccaatcagtaaaaattgtgaaccacaaccccaagcttgcagagctgttgtgaggattaaataacaaattgcattaaaaacacagccaacgctgagcacaggacactgtatgtgtttcaaaagtgctctgtcctttctacatctggaaataggagagcttctgccaccagatacaaaaaagaattctccatgaagcaaaagtgacgacattatttcaacagccacagggaaaattgagaaaataatctttactcaaagaatcggttgaaataagataataagactgtcccatataaagatacagcagaaaacatttgaacccatatcccttagctgattaatgacaggccagctttgctgtaaagattcccattgggtttagagcttgttttcaaccatggaatcacaaagtgtctttcatgtgggtagctttagtgacttgggtttggagctattttaatatttagtaactgtggatgagaatttctgttgccctatttttttatgccagtcactggaaaccaatagtttacttctaacttttatctattatggtccagtagacaatttgtgttttctccatgccggtaccacaccatacaaatctgttctatgaatcttgggtttctttccaggtatcctgtcctggaagggcacagaacactagtgcacgtcaaatgaagccaa

SEQ ID NO: 182725 - DNA, 643 bp, Homo Sapiens
tttgtacaaaaaagttgggtttagttgatgtaagctcactatttttttcctaccgcatgcattttctaatgtttggggtggatggtgtgtcggttatggaaggcatagacgtcattacaggtgctacgatctcacacacacacaaggaaatgttagtctccttattttatgattggaaaatcaatgacctagaggcaaaatggcatgtttaaggacctgggatgacaagtcattctgcagtcagccacagagccaaatttggactcctcaaccagaactccatgaaaagcctgactttgccaaacactgtgctggaaaagctaagcccctttcatttgtgaagtaaattttaaattcaagatatttagtttagagaattgagtcttgagatgtaaactacatgagatttctttggtttcaattgaataatattcactaacaaatgatttactaaaatacgtatttcttggtccttatcatgtaatgacagattcacaacagcaataaggatggagatttccccaataattaataacaccgagagtagcaatattttttactgtattttcatttaattgtcaaagttgtttttgtggaaaattaaattcttcagaaattaataataaaatatgtgagtctcatc

SEQ ID NO: 182726 - DNA, 508 bp, Homo Sapiens
aatttaaaaagcccttgtggctgccggtcctgcatttttcatcagagctagtagtttttcatctctatctgattcttgcaattccatccaatatctcatgagccatgggggacaggatcctaaaaatcacagcagggtaaggtggagggttgaaatctatgtacagaaaatggtatgtccacaggtctagcaaaagaaggagggtggagctcatgcccaaggaccaaagaatgcccaggtcctcctctctgctgtccgtctagcccaaggaagagacaaaggatggagggaactcctggccttctctgctcagggccttacttgttcttgttgtgtcttgcatgtacatctctttctccaagccacatctccagaacctgccaacctggttgaggcactgtcttcattttattctcttctttatttttaaactcacttttaaatttcatacataatgtacaaatatagtctcactataaaaatgttaaatgcgggaaagtaaatccaa

SEQ ID NO: 182727 - DNA, 923 bp, Homo Sapiens
ttggctttaaaagtggcctttctgttacgtctgtggcacaaatggctcatgagcgcaggacacttatggtcttgtgtcctatacttcatgtgtgatgccaccagaaatgttatggattccgtattgaacacactgagagtggtatgagccctcaggactgcaccacagagtaaacacaaccttgatatggtggcgaatatgtgtgtctttcttgtttcatttgtggttggggacaaaatcgatgtatttgtctaaatagtcgatattcatcttaacatggttggttgtgtaatcaccagctatattgtgaactgtgcaataaaacagaagcgtttgtgtatataattacctttggatacctgaaattcccaagcttggttacaatgtaatgctcagtataaggctgtgcaaacatgtaagggaataatggtggtcgatgggatatatgaaatgggatctagagggcttcgagtgaagccaatcatgttgaacgaacactggttcagtgtagatgaagtagagtgaggcgtatgcagtcataaaatgaagggtggacaggagattacatttgaagaaaggataagcactcagacttggtctcttttaaattaaaatatttcttttctcatgtgcaaatgtatatcaaagacttgaacaggtattctcttgaaatttgaggatttttagtttttaatgctgtctttgcttaatattaaatatgtgttgcctattggctcccaaattgtgtgggagtctctaaatgtttcctcttgaaggttcattattgaaagtggttaagtgcacaatgctatttttgtttgatagtttgagttttatgaccctatgagtttaatgaaatctgttaaatgtttcaaatttaacacttttttttgatatttgggataaagtttgttttttaaccc

SEQ ID NO: 182728 - DNA, 1316 bp, Homo Sapiens
ctttgtacaaaaaagttgggaaaaaaagtttccgtagaagttacagctagtggtcttttccctccagagccagtgatgagtgtgggagcacttcagctctgtaaggggccagcgttctgacctttaaccacatgaactaacctgcgtcagcagttgcagaaagtagcctgttaggacagcagctgctaagcgttgcctggtattttagtggggagaaggctgggactcttcatggcatcaacacttgcatgctctgaatctttgatcagagatgaggtgccatttttggcatttccaccccgtctcgtggtagcctttaaaagtggtagaagatgctgccctaattccccgaggatgattgtcattccatgcagcataatgtgccgtgaggagttttctcattccagttctttggacttcgtaacattggaattgtttttccataatttccggcattccataaatatttgtcaaggacaaagaaaaggaatgtggatgtttattcttttcatatgaatgactttgtacacatgacttcctgctttcattatgaaggaggggaaactagttcccttgtatggtaactccaaagttaaaaaattgtgcatgtctgaggggttgaatatattttgtaaaactctaaatacatttgtatttctgtgctgttctaaagtttacctttttacttatatgaaagataactatatatttaaatcatgtaagtggaacacagtgtagggggtttttccaatcttatttttcatcaggttctcacacccacgtagtatgctgctcaaattttttcgtgtgtgcaaatgtgaacatttgaacatttcagttaggtactgagccagaaaaggtaattgaagttttcagaaagcttctgtgcttagaaaatattttgttgttttcttaaaatattagtattttgtagctggaagaataagatcaaggcttacatgtttcaggccacttggtcactggttcctgaatttaaaaaacattggattaatgagttggtgaaggcatttaatggttacaaaaacagtttaaatatttatgattaaaggcttttcacaaacctttttaaagaaatttagctgaaaaaacttaaaagttttctaaggaagtttaactgtggcacatgttttgatcagaaaggtagctctctttgctctggtaattttaaagtttgtactagttctttatttctgttgtttttttaaattgttaaaattataaatcacgtctaatcatactgaattgtaaaacttgaattgtatctttattttaagcagaaatgagaataaaatgat

SEQ ID NO: 182729 - DNA, 1313 bp, Homo Sapiens
  misc_feature (128)..(151): n is a, c, g, or t
acaaaaaagttggctcttgaattcggttaatatgtaagaacattgttttttattaccagttgatctctcaaatgaagtgatgactttttccatattctgtgtacccttgagcatgttgtgtctttttnnnnnnnnnnnnnnnnnnnnnnnnttattttttaaaatgtaaatatttattaccatcagacttggaaaatggaaagtattttattgtcatgattgaatttagattgttacctgtattttgttcaggtttgagacatataaaagaccccacctgtaatagaaaggaatatagacccttgcctcacctgtattgctgtggatgtgttttgtgggtttttcattcgattttacaaaatagggaaaggcacttccagttgtatttagtaggcagttgttgtgaatcatttttttctcttataggaggagattcctctctagccatgtttctgttaaagtttcattaattgaagcccaagtttactttttactgtacatacttattttctaattggatttgaaatcagcatgattttgtttgacaaagcaaagtttaagattgaggtcagaaatactttaatggagcaaagacacataccaactttacatgacggtgtgagaaatagtcctataaactggtctcttcatcatttatgctctcactttagatatccaaatattaaaaggcaggctgacctgtatcacacagaattaaggcagtaattttctgcttcagtagatcaagggtagggctaaggcatcctgtggtaattctgattcacagctagatttgggaaacacaaagttagggaatggctatatgtgatttgctagttggagcagtcaaagtcttagctatcaagagttgtgaatttgaatcatggcactaggtcaggggtgctatggattgaaatgaccttagttctcaaggagtgatttgtcctcatttgtcaaatgaggaatgagacacttaccatcatctcaggttgtttcttaaagacctaaatacaaatacaatttgttaaaaacttacagagggcctattttgaatgctttaagatgtaggccaagtaatgtatttttctcttagtgtagaaagttaagagaaaaagagctggtaccataaattttttcaatcttagtgtaaaatctgtatctcattgtagcttctggtcaatacctatacataacaacttaatgtgatctaaccaactcaactgatagaaagctgaattgttcccagtggacaagtggtatttgatgtttagcagttttttgttgtaattttttggtaaactctgtggtaaatc

SEQ ID NO: 182730 - DNA, 1072 bp, Homo Sapiens
  misc_feature (382)..(576): n is a, c, g, or t
  misc_feature (798)..(814): n is a, c, g, or t
ggggagaggattagatttatacaactaaacagtgtatgaatttacaacataatatgggtggaagttaaggttttttcagtaaaactctagaataatgccaagatagaagaacaactttctaaagtggggaaatgccatgaaagagaaaggcagagcagtatacctgatccctgttggtcttagagcttaacaaagaaacccttgtgcttagaagcaaaatgcttcctgtgtatactaaagcaaagccatagctcttaatttttagtctgtcaacagagccagggattgtataattaatatctgaattcacttccaaagcaatagtgattcccaattctgctttagtaatgcattctatagctacagctctttaatcactagnnnnnnnnnnnnnnnnnnnnnnnnnnnnnnnnnnnnnnnnnnnnnnnnnnnnnnnnnnnnnnnnnnnnnnnnnnnnnnnnnnnnnnnnnnnnnnnnnnnnnnnnnnnnnnnnnnnnnnnnnnnnnnnnnnnnnnnnnnnnnnnnnnnnnnnnnnnnnnnnnnnnnnnnnnnnnnnnnnnnnnnnnnnnnnnnnnnatttaggccctcatttataaatatgagctaagcagactaaactttttaggaaaatagaaaccatgaaacgcatgctagaaaccctcccatgcccagttaagagaggtaatgtaagtcacagaagagtacttttaaaaacccgaaacccgaagtatcctaaattatatccttaatgattcaaatagctttcaaagtccaaaaaccagcaaacactgctgttgnnnnnnnnnnnnnnnnngaatcttgtgacattgcttaaaaactaccactgtggttgtagaaatgtaaacatcttaatagaaaggctgaataggacaaggttaaagactaaattagtgatttgggagatcaagccaatgggcttgtctaaaacctagtcaaaaaggtcaaagtgataaaaattatgaaataaaatttgatacttggaggctcaagctaagaaagctgctctgtctaaaggaaatacagaggacatggaaagtaagaaagaaatgat

SEQ ID NO: 182731 - DNA, 1625 bp, Homo Sapiens
tgataatccaggatttggttttatttttacacatgaactgtgaacatagaaatgcatgccctagaagaaaagacagctggtgagaaaataggtttctgtgcgttatctggagccaagagtgctaggtgcagaaggatcagtagatgatacagtggccaccttggtacagttgccagtgagctatcaggaatcacaagtagatttgaggaaagcttcaatagaaggaatagaggtagtggaaactgattcatgaacccttctgagtaataacaaatactttaaaaaaccatatcatgagttctaatataattttcttgtctggaatcagctactttcaggatcacttgttcttttaggcttctgaacttttacactgaagactgtggcatcatcagaaaaaagatcacaacacttggaatccctgattacctaatcctccagcagttaaggcccaaggaaacagcctctaggataccaattcatcaaaaagtgttccaggttcattctaattcaataaattatgttgagattaagttatacataatagatgttaatactaccattattaatattgttattattttcaaacctcaaagtttatttttgaaatacagattgatttttttccctaaaatgctaaagcttttacatacatacaaaagtatgacctggggtttggaaatttgctttgcagtctgggaggttgtagttaacttaaagaattttaaatgcaattagtactttcagacaatcgatgtcagactgtcatatcttattctttggggtatgaagcaaggtattttacaatgcccaaaaataactttcaaaatagtatttagcaaactgtctggagcctctttccccccaaattagagtatccaacacagatgatacacaagatataacttgaagattactgattttttaaatgcctccccagaatttacatattaaatcgattattttctccttcataatagttaccttttgacacttacacattcaccccaagtacaaattcactaattatcaaggcctaggcactattataattctgggcatataaatcttaaatattctatgattgaatgggtccatgagtgagtgagtgagcaaatggtaaaagaacagataaattaatttagaacctctgctttgaggagtgctttcccagccagtaatatttttaatatctacgctaatggcaaaactttctggtttggggtgaatttgattaatgaaaagagtcaaaaaatcatttggaataagtcttgggagtaagagacacaatccagtgggataaggacacgtaggaaaacacaaggcatgatcaaaatattggaagtctgactttctcataattgtgtcctgaaggcaattccagaaatgatttgagcatccacagcggctctgaactaggcatgttaactccagaatgactgcttagaaagactatgttattttgaatgaaggaaaactgacatgctgattttctgtttctctaattaggctcatacattcatggtcaaggtttatatcatattttgtgaatgtgattagaagaaaagaccatttttcttatatgtaagatgaagggtaagactagatgatttctataaatccaa

SEQ ID NO: 182732 - DNA, 1798 bp, Homo Sapiens
actttgtacaaaaaagttgggacttcgtgatgctgggtggcatgctggctgggcacagtgagtcaggtggtgagctcatcgagagggatggcaagaagtacaagctcttctatggaatgagttctgaaatggccatgaagaagtatgctgggggcgtggctgagtacaggtatgtgtggaggcccaggagcttagtaatagtatggaggcagaactcatggctgctgagagggggatggtacagttctcagagaagcatggtgaaccggggctcaatgctagggtctgtggaaaagtccctgggcttaaggaatccagaaggagaagataataaagtttttcctactttaagagcctcagagggaaagacagtggaagttccttttaaaggagatgtggaacataccatccgagacatcctaggagggatccgctctacgtgtacctatgtgggagcagctaagctcaaagagttgagcaggagaactaccttcatccgagtcacccagcaggtgaatccaatcttcagtgaggcgtgctagacctgagcagttctaccctcccaaggcaccagtactctaccatggggcatcccaagtggggtcctcacccatcccagctactgcagctctgtattactttgtcatttcctgttgtctcactcctgagggctcctgcagtaactctgtacttctctatctgcacacacaaaatgcccaaggcactcactggggaggaagcaaggaagcaaacagtctgagaaaatgatgcaagaaaatcaaatgggaatctggggacccaacacaacatcctgaagattattaaaaggaaaagatgctgattggtacataaatcttttacatggccttggtctagaggaggcaggcttttagaatcatgttttgttaatccgcttcactaaattggaccttcacatatctaaaaagctctgaagtgtttgtatatttgaaatacctcaataagagagagctcattgactgtaaagagatgctggggcttttctgtacaaggctagcatctgggtgctgctgcagagtgggtggtggtagggtcagcactgacccagtggggtcaagaacaatgagtattattcccatgaagtatctccattctagtgccaccacacccagataatctggcagcatgagaatttacaaagtatattctggcctgaggacacatatttccagaataccaaaggacatttctcttccaggctttcaaccctgctaacccttttaggcacagctgaacaacacttagcaagggaagtaaaaaaaggcaaagggatcctttcagtttggaagggccagttctgtttctaaggaatgacttatgctgaccttatggaaaccttaattcccctccttcacatcaaggcagtattttaacaaatccaaagtttaattattaaggattacaaatatttttagcagtgtagttaggcaatccaagcctggacttccacttcattcctactaaactacttgcagagctgaggaggcaggagactagagtacagagagcattttagttctatcacaaaggtctagaactgtctctacagtcacaggaagaaacaggtatggcaccgtggccagaagggggtaggtattcacagagagtgggtatcaaggtgtcaaactttgtcttctgatagttttccagagattcctgtagagaagggagcagggagagcctactatccgaaaccattccctgaaccctctgaattctgaagcatgtggatttctcagccaacttttttgtacaaagt

SEQ ID NO: 182733 - DNA, 553 bp, Homo Sapiens
  misc_feature (403)..(421): n is a, c, g, or t
ccattttttattagagatagcttagaatgtttctttctgtgcacaagacttaccctaccagcagcagagccattctctgttgagtggttcattttgaagttccacagattgaagagaacatgccaccaatcacctcacatcttcttggtggacatgataaatgacacaatgaacttgatttctttactaccttgactgtagctttttatccctacctgtgaaccttcaaagactgcattaacttttaggctacatcggtccaattgaggtataatatcagtacaccaaagatttttatatgtccttcgtgtgaccattcttcaacggcctaagggccagctgcaaagacttttggaaaatacaatttacaactcaaaattatttaataatttaggaagttgcnnnnnnnnnnnnnnnnnnncagtcctgcaatttcctgaagctctgaatatgatatttttttcagcctgcttctctctgttgttcaaattaggtaattttattcttctgtctcaaagctcactgattctttattctgtctaatctgttctgc

SEQ ID NO: 182734 - DNA, 662 bp, Homo Sapiens
gaaagaacgctagtttatatgaaagcatttaacagatgcagtaaatataaaaaattaataaaaaattaagtctaaatgaacatcagaagattcacagtagaaaccactaagacgctaacactttcaatgttattctaaatcagggcattgattataaagagtaattcaaggttaacataatttagttagcctaaacagaaataggagattaatattttgagacttaaacaattatattcaaagtacactgtttttgcattgaaagaattttagatttttacaaaggcaaattttgatgtaattgaactctcaaattacttgatgctgtgtctttattcctagtgtctgtatgaaagcatgtggtcaatttctgctgctcggggtttgagaagttctatattaggatgtcatttacatacttttcaacagaagattgaggacactgaaatatgaggtgtgtgaagaaagtacacagagaaacttttgtggttgacttataaaacttgtaagtgctgcatgagatagatgttcagagtaatagtcttgtgcattattcaaattttagtaaattgttttaccaattgcacattagatagtatagtggattttgtaatgcttttcttagactgtgtgaacttagtttcaatgaaacaatttatttt

SEQ ID NO: 182735 - DNA, 1609 bp, Homo Sapiens
ttggattttataatcgttcttgtatagcagctcggtactgaaggcggtgtttaacttggcaagctctgagacttcaaatgggaacaaatagtaagtagctaagtaaaccacatctttgcaaccaaaataaagatgagttaaaaggtatctggttaggcctatttcatgaggactatgctctggtgggaccacaggtcacctgatacttagtgctgtgctgcctgaaacctcagcatggagacatcaccacatgcactgtggccattcagcatctttctggagcaccagttcactccaggtttttattttagggtgtcatcgattttacctactttgtcagactggtagaagttgctttgcatatcagaaaaactccatttttttccacaaaagggattacagaaaactcttttgtgagtgagtgattggaacttagagactcctgttgccagaatcagactgccctagaacagaatggacaatgcagggaggagaattcacacaaacagcacctgttctgaggcctgtgccagcccaccaggcctgctcaaatgtggtctttacttcaagtgcacagaggcacatgaggtttctggtgataaaccagcgtcttaccgctgttttaaagtcccatccccatggctttcacaatcagttccgttttttttgctgtacttgataaaatgtttattctcatacaggtcaagtacatttacttctattcacagtgagtacccaataacaacaaaagcgcttacaaatttggggggcgtgattttagtacctttatttgaagtgtaatcattttaaattattattattttaactggggcagttatcagtggtttaaacaggaactttagtggcttcaatttgtttaagaaacatattaagtttgagggaaaaatttcccatgaaatatttggaacgtaagagtagtattgattagagaaaattaaataagaaacatagtatggtagccaaattttttaaaaaatcttgaacttttctgtaggtcagttttagaactgctgtgaaaagtgaaggttgccctgtggagattaaaattagagttgttttcataactgacagcatggtgaatccatttgagtcaaagtgaagaatttcctcatcaagtgactatacatttgtttttgtgtgctcaaaagaaatactcaaacacagactgatattaaccagccaggtaaattgaacgacaatgtggcattaggtatttggctgtttattggtcgttaaatactatggttttgcaatatgattgatggtaaaagagtgatgtcatattgatactagagtagcttgtttttttagtaggtgtgggaccatctcttttacaagtgcaactcagtctaggacagccatggatgcagtgtctggagttggaccctctgagccttctggctgccccagtagcatctgcattggtgaccaaggacactgcactttgaagaggtcgccactgggttatttattgtcttcactgcttttgttaaaaattgtaaaattttgtacacaaaaagttgtgtttttgaatatcaattgtttaaacacacctacaatgataaataattgcctttaaaggcccctc

SEQ ID NO: 182736 - DNA, 1070 bp, Homo Sapiens
  misc_feature (950)..(976): n is a, c, g, or t
ttggctctgtatttcggcgtatttgatatgtgccattccattgcctggaagcatgaattgttcatccttgtcttccaacagaaaagttccatagtgctactgatactctagccttttcattttaaaagctccctgctgcccttcttataacggtctgtaggtctttcccattacccagtctgtactgctacactgcagtggattacttcttcctagaatggtgcttttcttttaagcctaggtaattacatcatattatttattgtgcaacttctagaaaacatcccagatttggaaaccaacagagaataaatttgtcatttagattaatgtgacttttgatgatatgatattactttccttactctgatcagtgtatcaatgcctttctttccacatttgaatgaattgtgctattgatgaggaaatccaggccaataagggaataatatggaaatataacactgcagaagtagtggatctttaccatattttgtatgtcaaacatatgtctgttgaaagcaaacaatagaaacctcagtttaaaacccaaaggaacatttcagtaagaaatatcagtcttagaaatttcagtcaagcactgaaggttcttgagctggtcaaatattgtatcccatttaagccaaatagtcatcatcatacattgatgtgcatgtagtaccccttgtagactgggggcagttttgtatgccaggaaacactagtgcaagagttgctaaacagtgaatactttccacctctgtatatcccatctctacagtgattccagtttccaatgggagagaatcagaagagtaggaagttgtgatggaagattgtagtgtaagcatttgaaaccctgttcccctaccaaagtgccaaactaatgaattctttaatgcaaaggaagagtttgtaatgtcataaaaattgtattcctagatagcacnnnnnnnnnnnnnnnnnnnnnnnnnnnttgtttgggaggactttttttccatttatctgtgtatgtctaagttatgtacgattattaaaatactaagtagacaaatttacttactgttttt

SEQ ID NO: 182737 - DNA, 1586 bp, Homo Sapiens
ttggctcacccaccatatacctctggcatccctccatgcaaagaaatgtcgaataggcatttcttggtataatttacctacacttgtgcttgtggggtgggagtaaaaacatatccagtaagtaccaaggctaacctcctaatggctggagctcagttaggtctctgggctctctaaaggagtccagagctcttgtccatgtcacaaatggagccttagaatttctgtctttccttatgtggcagctttggccattgtgtcttgaaattctccctcaggaaatgtgataggggatattatcccatgggattttagtaaaaatcagcttgcctaatttcatattcgtgttcataatgaagaaatgcgaagtggtggtagtcctcaggattaagtgtaaaggaaaatatgcaaggaaaaagtagcagtgtcagcccttttggactgcttatgatttctgccttagagctacaagacttggaacaagaaataacaatacctcaagaaaatgtctggagagatagcaccactgtccctcaaagacttcagccactgcacattaccaattcagctgtgaagcatttacaactgtattatctgtgattgtctgcatttcctgtttacatgcatgtgctggggatatgctttagtgtgtatggactagagtttaaatcctgtctttaactgggctgcaaggatggctatcaatcccaaattctgttttcaactcactggaataattaatctggtgttcctgatataaaacagtgggttctattcacatgatggctgctctttaccatatatttcacctgaccctcattttgccatgggcctcaacctttatgtgtgctttttatggctctgaaaggactggctcccgtgtgtggaatatacaaggtataaacaccacccctcacatacccctgtaacttaaatgcttccatttaactcacttagattactttccccttagtggtaaacgggttgggggatgggtggtagtgcaaagaaggtagtttgaaatattgccatagtaatatgggaactttttattccaaccctttaccctggcttttttttctctcaatatttgcctaaaattctaaaatgagttatagtaaaatcataaaactatggaaacaactgaactttggtacacaagttagttcgatgacatcttgttatttgagaacagtaaaaggtgtgtcattgcctcatgatttatcatagtcattactaagggtttcagagagaatctggtgtgaagcactatcctttcagacactaagggctttacctagttgctcccctaccttctgtcggaataggattattcccatgcacctctgggtaggtataggtagtagctattgaacggggattattttccccatggcacaaggggaaacactcttggataaccttcaacaatgaggctttgctaagtggccagacttgggatttgatcttcctcacttgttatttattaagtttaagccttattcagtatctctaattgcaatagatatagttcctgtgacttctaaaaaaattcctgttaatgctgaaacagtatcttttttgtc

SEQ ID NO: 182738 - DNA, 576 bp, Homo Sapiens
ctattgctgctgcacaaattagcacatttttacttcactgaatttttctattggtttcttgttttctattttattgatttctactataatttttatttctatccttttgcttgctttaaggcttacactgatctttcttctctagtttcctaagatggaaacttagattatgaattttaaatctttttaatctcttctaatataggcattcaatattataatttatctccaaccactactttcactgcttcctataaattttgatacattgtattttcatttttatttagttcaaaacattttaaaatttctgttcagacttcttctttgacccatctggtatctagaagtgttttgtttaatctccagttattttgagatttcccatctacgtttctgtttttgattttgtttaatttcctctgaaaacacactttatatggtttgtattctttgaaatttgtaaggggtatcttaaggccaaatatgtagtctatcttggtggatgtctcctgggagcttgaaaagaatatgtactctgttgaatgaagtatactgtacatgtcaattatattc

SEQ ID NO: 182739 - DNA, 769 bp, Homo Sapiens
  misc_feature (88)..(118): n is a, c, g, or t
  misc_feature (217)..(244): n is a, c, g, or t
ttgggaaacgtattttatgcttaatacagaaacttgataaatacaacaaaatcaaaaaggggggaaattgccattaattgggaaagannnnnnnnnnnnnnnnnnnnnnnnnnnnnnngcatttctgcctaacctaaaaggtcaggtttttgtaccttggagaaggaaattataaatgcccaagaataagatatttaaattgaaaatctactttagnnnnnnnnnnnnnnnnnnnnnnnnnnnnccctctgagaacctcaattttttatgctttagcttttcttaaaacataacatttagcatagtaaagaattttaatagctatgtagataagaatgaaagaggtgaattatatgcttgttaaattaatctaactgcctcttttaccatctttactatagattattatccggtattaattgtcatccttttattcagtccttgatcccaaagtaagaagaattgatgaggatatgtgcattgtgttatgtctgatcacagtttgactagcacagtctggaagtgggttgtacaggatgagagagagaagcctaattgctctcccagcatcagcagcatctataaagcatcctgggaattgcttgccctacgttcagagcagctggtcacatgagcctgaattttcagttcagttcattagtcagccattttggtcaacaccctgcttactgcgcacggccaatcctatgagaactcagcatcccagctcatctgaacaaatcctggaagtgatttctgcagctcatga

SEQ ID NO: 182740 - DNA, 793 bp, Homo Sapiens
ccaactttgtacaaaaaagttggacaatttgtaaatatttgtccatatgtataacttcagtactacttgaactataatattaatattttaatgtcatttattaacattatattttggagactgaaaaatgattgaaactacattgggaacacagattcctagagctggaagagtaagcctgagcccttaataaaccatcaactccaccctagttcttggctgagtatggaactaaaccagctaagacaggtgatgcaaaataaaactccagaagaggtgctcaacacagtttttaggatcttaagtttagagtataattatactaactatccaaaagcagtcctttttaccaagatcacctattgtattggtctttacacagtaagctatttagagaacagttttaaaatctttgattaaaacaaatgctaaatcatccgttagctgtttctttgccagatcgagccatcctactttattcaacctttttcagcgaagttacaggataataatatggcattttgaaaaataacagaagaaatgccagtttagtcttaaataggtattcttaccctggggatctgtggatttagttggaaagaaaaaattatactttgttttccctgacctctctcggaaattgagtattttcctccattactatatcacaaattaatttttggctatttggttatttcagagtaattcttttctttgtaaccctgtgtattttattttatgaatttagaaacattttgagaaggggtctatatgcttcaccaggggccatggc

SEQ ID NO: 182741 - DNA, 1190 bp, Homo Sapiens
ttgtatgttacaaaacaaatgaacacactttgtgtaacaaaatggaattttaacatttaaatctttgattccaatattcctgacctatctcttgtcatatgaaagaaagaagcctttttttaaaacaaagtttcaattcagaatttttacaaacaaaaacaatcctgagtctacttaatatccctgtatatcctcaaaaagcaagttcaggaaatttaaaaatgatttataaaaggcactgaagttagcaaaagcattggtgggttttcattttggattaaacactggaaatgttcacagagaaacaactgtgtgagcagttgcccgtaacacccaggaagaaaccgacctccaggcagcacctcctgaacacctcagcggctcctcacacattccaaccacagaccttcattcaagtcaaggtgaaggctacagtcagcacggcaagaaaccaagatgggactcaaacctctaaatgcaacactctgcatacaggagatcccaactgaaatgagttccaaaataacggatacctttatcgtataatcatttatgctcaacaaagcctcaggataaatttgaaaacagaacaatgtatagactgtattactgctgcactggctcctgaatgaagcaggcggtgaaggctcacgtgctgaggaaacagggaacaccttggcgccgctgctgagctctgtgttgctcctggtatcactcccacgggctgcaagacttcccaagagaaaagctactttcatcttctgatcagtaatttaaatattccgaacaacccaaatcacaatggttgctgcaagtctgaggcgcgctcctggctccctgatccctgccgtccacctccctctgtctgaaccatgagacccacgggcgaaccaacaggcactctgccaccatcagatgccaccccccaacccaggaaaagacagggcggcaaatagttcatcttggtgagtgcaggttatcaaagggacatcggtgctcacgcctccgccaagcccctcctcatccacagcgtctgtcggatgaggtgagtacagggtaagtacagggctgcctgcctgcaactgcctcagcgccctttcctctgctatatttcagacctagaaattgccacctaaaaagtctaccattaccacatggatccaacttttttgtacaaagttggcttttat

SEQ ID NO: 182742 - DNA, 595 bp, Homo Sapiens
  misc_feature (31)..(47): n is a, c, g, or t
actttgtacaaaaaagttggactccatctcnnnnnnnnnnnnnnnnngaacaacaacaaaagaaaggcacgaataaagctccaaaaacttctgccttggggattctgatcaggggccacagaggaggtaaaggctcagctggatcttggaggagaggtgtaggtttgccccgtgaagagagggcagggaaggtcttctgaacagaggcaacagcgttagcagaggagggagagtgcttgacagcccagtcccacagcggggtcatggtttgcctcttgacttaggggtgggacaaaaattggacacactttctgaatagctgtttattctgcatccttatattccacagtgtgctttgttctcataactagatttataatttatttagtgagttttaaaatttctgcaggacatttgctagttaacaatctaaaatgatttaaaactttgatttatgctaacattttgcttaagctttcattgagtgtgaaattggagtgtgtaggctgaaatctttaagaggggaaagttgaaatgtactgcgtgctgtgccacttcattgagttttactctctggatgaaaacatttttttcc

SEQ ID NO: 182743 - DNA, 244 bp, Homo Sapiens
actttgtacaaaattgtggttctgttaactccactttgaaaaagtcatagccatgactgaagaaaatctaataccaatgaaagtgcctaaagatatttggaggcagtgacaatgagtgagtctccctataaaataggctaaaaagattagaacccttgacatttggaaagaagaatgcttctagaaaatataactgaagtttccaaataatgaaggctattttaaggagcaagactccatctcg

SEQ ID NO: 182744 - DNA, 1391 bp, Homo Sapiens
ttggatgaactgtaaatggtgacagttctgaagaacagagatccaatttcaaaacatgcccacgtgtttggctcacgcatgcaagaatgaccaacaaggaggggccctaccaactccaggagcccaggcgacacgcactggagacctgaggccttcggtcgtgcgccaggcagtcctgcaggccctggagctggccatcagtgtgcgttgtgaggcaggaagcatggtgccctctggccccccaggacacctgctcagatcatggaggttctcagctccagactcgggaggaaacacttgtctattttggtgaaaagataccaaaaagcatgttgatcagtgaagagaaaaaggtatgtctagttcttaggtttgaaaagcccaactcaagctcacggacctgctgcacatcctggtatagttccttctccactgcgacaagcccccgtctcccaagtgcttcagctttaggtctctttcttccaacgcagcaaatccggcttcctctggttattatttacctgtcgtgtagtttcccattcttttacttttgtcttttcggaattccagtgtagcaggtgtgtttcttgtaaataaccagtgcctgtatttttaaaagcaacctgacaatctctgctcctaactgatgagtttaagtccatttattgtcactgtgttgctggcatgctgggatcattttcatccatgttgctctgtatttctgtatttaccctgtttttttctatgcttcccctgaccctaggttctcttagattaagtcttcatttccctgtattgccttgaaggttacacattctattgctattggcttgacaacataagaactgcagtgtactggaactctcattgtcccacttgtaccttacattttcagtatttcagttcttttttatattgcccaaattagtcattattgctgttgttttaaactgagagtcagaaagctttttctgtaaaggtctagatagtaaatatttcaggctttgcagccatatggtttctgttgcacattcttttgttgattttttaaagacatatttaaaaatataaaccattcccagctggaggatcacacaaaaataggccacagttagctggcccctattttatatggtcaatactcctttagattcatccttaggaatatcacttgtttttgcttgcatttctccttgcatctcagactttccttctggatctatcttccttctctaaatacattgtttagcaatttttgctgggagcatctttggttaaaaatgttttcacttcacccttactcttgtgtgcaagtttatctaggtacagaattctaagtcatttgattcctgaatctaagaatgtttgtctttcatgtatctggaaaccaa

SEQ ID NO: 182745 - DNA, 880 bp, Homo Sapiens
  misc_feature (525)..(544): n is a, c, g, or t
  misc_feature (710)..(728): n is a, c, g, or t
tcatctaaagggcacttttgagagagacaacaccgctcatattccccgccacctcctcagggtttcaggaggcatcagctaattccccaaaatgtaaagttgcctgtgtttcaggttttcaaaaccaagaaaacgtgtgtctcccaggggcacagataacaaggtccagcacgcaagttatcagctgattcttagaaaatattcctatcagaggggaaatatttggctaacaggcactctggggcagtaaggctacacaatagccacccagagtgcagagttatttaagagaaatgtagaaggactcccaataaaccacctcagaattgtcactgcctcattcaagctgctggacaattttggaaagaatcatttacaccacatcttaagtttccacaaagaagaactcaaactcacattttaaagtacataaaacaaaaagttctaggaggccgggggccaattccccttgtgcccctcctttgacaacagtggacaaacacccctgaattaataattaagacnnnnnnnnnnnnnnnnnnnngtgagttaagatattgaaagagagaaagaaaacatctttagaaaaacacgatcactgtctctttaaaagaaaacaaaatcccagttgggaacagtaatgaggaatatgcaatctaaattgacacctggtgggagattattattgaatattatgtacactcagaacnnnnnnnnnnnnnnnnnnnattatgaacacctaggcagtgaaaactgttatgttaatacatacatagacacacccaaaacatacaaaaatactattatttcaaactactaagaataggacagttcaattattttcatgctatgactttaagagccaacttttttgtacaaa

SEQ ID NO: 182746 - DNA, 823 bp, Homo Sapiens
  misc_feature (307)..(494): n is a, c, g, or t
cccatcaatgatagactggataaagaaaacatggtacatatgcaccatagaatactatacagccacaaaaaagaatgagatcaggtcctttgcagggacatagatggagctggaggcccttatctttagcaaactaacacaggaacagaaaaccaaagaccacatgttgtcacttataagggggagctaaatgaggagaacacatggacacacagaggggaacaacacacactggggcccacctgaggatgaagggtgggaggagggagaggatcaagaaaaacaactaatgcaagtttgttcaacnnnnnnnnnnnnnnnnnnnnnnnnnnnnnnnnnnnnnnnnnnnnnnnnnnnnnnnnnnnnnnnnnnnnnnnnnnnnnnnnnnnnnnnnnnnnnnnnnnnnnnnnnnnnnnnnnnnnnnnnnnnnnnnnnnnnnnnnnnnnnnnnnnnnnnnnnnnnnnnnnnnnnnnnnnnnnnnnnnnnnnnnnnnnaactaatgggtactaggcttaatacctgcgtgatgaaacaaactcccatgacacatgtttacctatgtaagaaacctgaacttgcatccctgtacttaaaagaaaaaacagaatattaagtttttcaatccatgaatatagaattcctttccatttatttagacctttaatttctctcaacattttgtagttgtcagtgcataagtattgcatttattaaatttgttcggatgtatttcattttttgatggtattatagaaatggggtaccttggttaatttcattttaaattgttcagtgttaagggacagaaatccaattcacccaa

SEQ ID NO: 182747 - DNA, 1398 bp, Homo Sapiens
  misc_feature (204)..(218): n is a, c, g, or t
ttggcgttaattaaatattgaaacatcattaggccattgcaacaagttcaaaaagatacttaaattaattccaacaaggtgtaactattatttataaaaaggaattccctttggttgtagttttcaagcaattatttccctacgtttactcgtctttagaaacctggtttgttaatgctcagaatagcctggctgatttagaannnnnnnnnnnnnnnagtcttataaaatctttcttcctgtagtggagtatttgctggtaataaaaatatgaaatagggcatagagaataatatatgattatgaaaaccgtctttaaccttttatctcacaaataaataaatattttttaagtgttttattctctgagttaagtgtttcatctcctaaaattagtgtggaaattaggttgacttgccatttgagggttgatgagataattacctgagcatatcataggggcacctttgtatgagactgttacaaagcaggttaaaattatagagcgtaattaaatagtcatttcaacttgacttagaagacaaatataccacagtaggaaaattatgaaagtgtggaacagtcagtatagtaatcatttgtcacataaaacattctttataatctttgagagtaagtaacttgctctaataagtttaagcaaaaataaaatgaatactgccttctagaataagacacattgatttgttttaggtctgaaatgtaatacatttcctcctttttgcattttcaggtgactgtaatcaatgagagactgaagacagatcaacatacatcttacccatgctctttcaaagactgtgctgagagagaacttgtggcagttatatgtccttattgtgagaagaatttttgcctgagacaccgtcatcagtcagatcatgagtgtgaaaaactggaaatcccaaagcctcgaatggctgccactcagaaacttgttaaagacattattggtaagtatctagaaagcgtgttttgttgctttcctagttccagagctcctgcttcttatatctactttccaattatgggaggcatcattaataaccccagtggtattcgtattaacttgtattttgatgatattcttgtgacagtatttcttatgaggtctacctgaccgatggaaatttggaaattatttggaggtactccactgtaagtacttatctcttttgctgagccacttagattagctagttaaccattgggctagaaatggtattcatgagattgaagtagtcagctgctttctctacagattaaactctaagcctagtcagctgttctgtgaatgctgctgataataagagataccagaatgaatgtatctgtgacttaaatcagtctgcctgccagtatgtaagctcagatttt

SEQ ID NO: 182748 - DNA, 189 bp, Homo Sapiens
tgaccccaggccctggcttacatataggatcttgcaaacccaccagggaaaaattgctaccctgaagtgaaaaacacaagcttcattggatttgccacctgccgattgtagagtccttgggccctgagtgaatgtagtgatagccagtcagtggtcagtgtgggccttgatcaagacccagtgttgtac

SEQ ID NO: 182749 - DNA, 411 bp, Homo Sapiens
  misc_feature (310)..(340): n is a, c, g, or t
ggccggtaaacactggtgattctgctttatactaaaaatgatggcggtgatgggggaaccgtttactaggtacaaccacaagatatttggtcaaaaaggattgaaagccactacttgctttcatttcttgaaatacatttctttaaatacataccatttcttgaaatacatttattaagcacagatgagtgttgttttggtttttgtttagtgattaagtgtacaatccccaataaaatattttgaagtttttccaaagaaaagaaactctgcctggctgcatcagctagacaaaggtacctgcgctgcnnnnnnnnnnnnnnnnnnnnnnnnnnnnnnnccctgtatctgctggaatattttagctgatggacatttgagctggcattacttaaatgagaatctcttcaa

SEQ ID NO: 182750 - DNA, 447 bp, Homo Sapiens
ttggctgttttgttttgaaaagctgttacagttagtgatacacttgagagtggtgaggaagcccaccacacccgtcattttcctgccttaagatacgcagtacatcataactgtgtgtccgtcagagcttagtttacttgtacactgattttcagcagggactatctgaggaaggggaagatggcacttgcataacttggaaatgcctgcagttgattctgatgtgcctgtatgttagatggtagtgattacaggatctgtttcctaaggcttttggtgggaatgagctagcagtcggcacttagggctcaataaaaattagttaaagcaaattgctaccccctccatcccccactccctacacaatatggatttgtgagtacttttatccttgtctggcccataatagatactcaatacatatatatatgtattcatttttattaa

SEQ ID NO: 182751 - DNA, 906 bp, Homo Sapiens
ttgggtcttcttataacaaaaagatataaatagcataaagtgagctttaggagccacaagttgtagtacactttaagtgaatttatatatacacagaatagttttcaaaaggtcagatgataacatatgtttgtacttgtgaaattttgcaagacagcatttgagagcaaaagagaaaatctcggctttgctgaccacaagaggccatctatgttcttcattattttgtttcactgagtgaactgtgcaaggttcattgttgctggaactttcagaataaaagttgggacagacgcctctgctctctcgagggcgcgaacattgggagcaggttcaggggaggatgaacagtgacttaatgtgtggtctcttaggaaagggaaggcaaaggaccacaggagcctggctgacgagcctggcagatgcccagaggatgcttgacttggtagaagatcacgtggggaaactgggttataccagacactgagagtagcaacttttctaattccaaacagagcaaatgagaaaggggcctcagaaaatgccttggtgttagctatgtgggatggcatggcaaaagaaaatgaagtatatgaacacacctagcccccagtggtggtactctatctctccttccttagccatctcctacagatttgcacttttgctttatctagaccctttcctaattttaagaggacaaaggaagctcaagtcccttcttttttcctggaaaagttttgctgtaacagaatacccagtattttatgcaaaagagatcaatattgtcccaggtggctaatttatatgtcaaagggtatccaagatttgtcgacattttgaaatacctctgaagttcatcaactctgaccaaaatattttgatagaatttggggtgtgttattt

SEQ ID NO: 182752 - DNA, 902 bp, Homo Sapiens
ttggggaagagtgatgagtcagtgccccgcagaggttattaagacacaatagaagtgtccattagacttggaaattcagcagtaaccagtgtgataagagctggttaatggacatgtggtgggtcccaacaccagcctacaggaggttagtaagtaggacagtgaaagtacttttagaaaatttggcaaagaggggcagaagttagagggaatgccaaagctgctggaggaatctgatcgctagtttctgtgtgtaaggttttctgctgttttgctcggaggcaggggtttataatggtatttacttcacgaaggctcaagtctccagcggtgtgtctggagggggttatatatgccagaaaggggttggagtaacaaaccaagagatctgcccactttttaaccacccactcttctgctcgacagctgcacctgtgcctttgcaattcaaacctagggactcgccaccctcagtgcccagtcaaaacccgctaaagccctggcaaggaagccgtttggtgcaattcctgctatccctgggagagtatttttgttgtcttcattatggttttgcttttccctggagagaattgtgatgggtacgacgaagggcacacctggagagagggtgaagagaacagggaggggatgctagcgcagagaggagaatgaggtctgcacagcagtgtcaggccagtgaaggcaggagcgagcaggaggcagggcaggggtgagttgcagagctcagggcattcatgactggccagctcacctttccctgtttagtacggggcaaggcttcctattgtgcagatgacgagggagccatgaggctccaggaaaaaatctgaggctgaactgttgtgggggctgagagggagctgaatggggctgggagagga

SEQ ID NO: 182753 - DNA, 904 bp, Homo Sapiens
ttggcatctcaaaattaaacaaacaaacaaataattcaaaatcaagtgacttccaggtcaagggatggagaagagttagttctggattggagtggtggcagccatgagaaaaagagccaggttctctgctagaatctgacccagcttttccaaacaaccctttaatccaaacaaccctttacaatttgctgtatttcacaacttgattaagactgtctccacctggggaaaaaaatgacaaagtattactttgaaataacccgtatcagcataggggtgagaattagggataagcatttagatactacggagggtcagtgagttttgttctcaagggagttcagtcccacacgcagtcagccataaatattccactcttgggtggggtctcagaaaaaaggctgtgtaactagccttttgctatggatgcagccgtgggaagttatggctctcacactttaaataagcatatttaatgattaatgtgtacccttaaattttaaaaactggtgggtttggagggttcattcaactttcattaacccatcagacatagggccagaagcaatctgcatctagtctcaatcaaaatatacttacatttctctgtcctccttaaagaatgaattccccgtagaatttgctttgggagaattggaaatattaacattatttgatgaatgatttaatcttagccttctgtttgaaaagataaaaatggagacagacacatagcctccaaaatgtcctgtctcgtatttgtgattcagggcacatttctcagtacgcaccatgaggctgtcaaaggtacacaggccaagaggtagtccattctcctttgaattctggttctgccatttatttataggctttgagtccttcagttgtattatctgtaaaggga

SEQ ID NO: 182754 - DNA, 740 bp, Homo Sapiens
ttgacacaacttttctgagggcagagatcagtcaggagtgtgactgcatactcagccaggaataagttacaaccttctcctgaaagcagcacacaggcagcagagtcacatcacctgggtgctgagcccagcaatcagtaacaatgctctctgtggtccaggcccaggcagcagagacacatcacctggtacctgggccagccacaattttttctgtggggcacgtacaggcaaaaatggagcatcacatctcctaggttattgatgcagaggtatgtcacaaggccctctgtagaaagagcccaggtggtagtctcccattttataggtgttggacctagtaatatgtcttaacatgaaaaatattcagggcctaagcaaaaaaggagagtcacataacctgagtgcagggcttaggaatatgtcacaatgcaacatgtgggcagctccaaggctggaaaaaagagtcacatcttggaggttcagagtcaagccatatgtcacaatctcatttgtgtgcttggccaaggcaggagagtcaaatcactaaggtgctttgcaatgcacacaatcacacctgcaggaaagtccagggattagattagaaattccaaacatgtccaggttctaaaggtatgaaagtcaacacctcctgtatgttgggtctaagtacatgagtcgcaatcacaatgattgacagaatgtgtgcaaaagagccacagtttcttctgcagacccaa

SEQ ID NO: 182755 - DNA, 691 bp, Homo Sapiens
agctaaccacccttgttataaagatttggttacagctttgattattcccccaaccaacccttaggataaattcctagaagtggaattgcccagtttagataaacacactttgttttttgactcgccgcctgttgctaaaatggttatacatttttaatgcccatagacagtccccgagcgtgtctgctcccctctgctcagccctcacttcaacttcatgctcccatttcataggaaactgggcccctgggtgctctgaatctgagtgtcctccccatccccaaggcacggcttcctccaggatccccacctaccctggacttggccatcaccccctctcctccctcctctaatcgggcgtcgcatcagcctccaatccggtgctgatttttccaaaaacacaaatctgactctgataatcaatctacctaaatccatccaaggactcgtcctggactgggaatggtgcacggaccctatggtcttcttgcctccccttcccagtcacccaggagctcccagcctcatcctgtgctctcctctcctctgacgctgctctgtcttttgggggcacccatcaccagccagtgcccctcgatctgtgagaccagcctgggcatcatcccagagggagatcccctctccctttattgctccaaacatgggccgtgggcctgttccaatgacccaa

SEQ ID NO: 182756 - DNA, 1466 bp, Homo Sapiens
  misc_feature (214)..(229): n is a, c, g, or t
ttgggtcttgctctacccccaccatgccctcagcccgctgtggccacgctggttcctcaattgctggggcgtgcagtgtctgtaagggaggctactgatgccatccgaggaagatgtaaggtttcgtgtgggcagcgagagcctagcaggcatgtggggtgcccagcaaagggtaacagtggacagttgttgcctcattccacagagttttgannnnnnnnnnnnnnnnaatggtcactccatcaacatcccccatggccaaagcctgagctggtccccaaagacacaggcattcagctgacagcctcgccttcacgctgctgctgttctcatgggggacaggcctcaggtggcaatgcacaaatcattagttaagggcagttgtgacagttaccaaggagtgtagtcccccgccccccgcccagtgaaaacagccctaaccaggggtggggacctttgggctctgacccgaagggtaggagaagctggaaggacagcattcctgtctgcgaaggcaggagcaaagctgccaggctatgaaggaaatggctggagcctgaagtcatgcaagctggggctggcagggacagggccaacttccaggcctgggggccaccatgaggattcaggacgtgacccccagggcacatgaaggccttccatctgtatttaagaaaagactttatcagtctcccaaagtgctgggattacaggcatgagccaccgcgcccagcctaggataactttctgattcctctctgccagccgttttgcgtctcttggaaagccaaacggtgaccatgcttcttaatttatgccttcagggtctggcttctcctttctcccttcctttcctgtcacaccatgcatacatacatacaaatacacatccttcaaccatttattccatggcttatgagacctgcaaatgagttccacagtacggaaggcatagaccactaggcttcttaattgatgtcaaggcagatcttggtgagcaggtaaaaacctgctattgtccaccaagtttaatttaggtcctccaagttggagggttaagaacccaggcaaagctgctgctgaatctatggaggaggctggccctgggacatcaaactaggggttaactggattgaatgaggagtcaacgctcagggacattctaggtctttacaggtcagacagaagagaggtttttactattggagggaaatggaaagatggtataaataggatcccttcatgaagcaacccagaggcctctctgcagcgtgtagggtgtggggcgacagtattgtggggcttccattcatcttagtacaaaacctcacctgctctgagcctggaaatgggagggcttcacgcaccaagtaatgcacaccagaaaggcacttatatcctcagcaacatggcagttcctctttacttctctgcctccctctttctatattatcaggccatgccta

SEQ ID NO: 182757 - DNA, 817 bp, Homo Sapiens
ttggcttcccaggaaattcagtggtggagatatgggtggctgcttcctggagggggagccaaggcagggaaagcgggaagaggaatcaaaagagggccaggagaccagctctaagtcgcctttttaagcttggaggagagactcaagcaaggggggtgcgaaagagaggatggggggtatctgggcttcagtggcacccaaagaagccagtggttctggcctccgcgggcttgcccctccccctcctgccatccctcccttgtctcggcctctggctattgccccagcgcagttctcttgcctggtgcggatatcgctgggttcccggcagcactggcatgtgaggcggtggcgctaagggacgtcctggtttctatagggcctggaatctccgccgaggccggcgagggagaggaaacggctagagaaacacagaaaagacaatttacagagaaatgtttactatctcccttcggagacatttttgaaattaaagggctgtgggtggaaacaccaaaaatgagggagactcccccctcaccaggaagcctgcccgagaatgcccaagtatctcgccactcccgcaggagggagcctcgctctacagggagacagttttgtggttttaatgcggtaggttacagctgttggtttctgcgtgatactgattctattacttgcgttgtattggtatgggatgtgtggatttcggtggagaaaaaattgccatgtgtgtgtctgatatgataacatttcaaactttcctgggtccagacatggtgattgtgaagaagctgtttaagtgcctttttgtttt

SEQ ID NO: 182758 - DNA, 1016 bp, Homo Sapiens
ctgttacagtccttagcccaggcatcctgtagcactctgtgtcccagactttttgatgcagaaacaagactgaaggaagattgtccaatataggaaagattcaacttttcctctatgtgtttgtccgctggtattcctatgaggcatttgagttacaggtagcagcacatcagcaaatgactccgctccctctctcagcacacatagcctaattgttacagaaccccgaagggacacctgaatgtcctttctttcaaggcaatatgtatgacacgctttcaaatctcctcctgcctactctgcttacctaaagggcaaggggagaaaatccagcactgacatagagtctgtaggttgaataaggcagccaagattagagagatgtaagtgaagaaacccactttatctggctttggagagagctagtgacttaaggcaggatgttcatctgtatcatgttgactgggacagtcctggttgttcccagtgcagctccattatcatccatctggcagtggggagtctctgctgcccatgtggtgctggcatatgcagttctgctcatgctcctaacgtgaatgcataaaacacccctgcagtgccacagcactgctatgagttcatggaaggcgtaggtgaggatacaaggcaagagtgctctggcaccaacacttggaggggccacctgagcataagttttcttagaggctcagaattcaaattgctaataggctcttggagcaaaattgcaaaggacagataggcttgttggtggcttctgttttcttcgctaacaatccaggttagttctgatttccttcctggtcacttaaaacaccttagtaagtgtgttaattgacttttagagttgcaaagggctttttattccattcaacccctgttcaatttacaggtgaggaaactgaaataaggtacttaagtgacttgcctaaagtcacgcagctggcgagaggtaggagcaggctttctgacacactcatctccaacttttttgt

SEQ ID NO: 182759 - DNA, 1122 bp, Homo Sapiens
  misc_feature (649)..(658): n is a, c, g, or t
ccacttcaattaaccataataaaattaaattcttccttacaaaagccctctcttttccaacttcttttccactttcttccagctctaatcttgactgcccgttctacctctagtgctatatcaccagcacccatgcattccaccaccaccaatccaatctgtcaagaagtcctattgttactttaaagaattccccaaatccatcctttaattgttcattgccctcatccaaattcaagttcttgtcacttagatattaaaacagcttcctcagaggcaagagaggcagagccctttctatctaatcctttattatcactagcaggttaatcctccagcacattgcttggattgctctttagtagttctcagtgcctccaggataaatctccaaacaggtattcatgcccctctataacctttatccaatttaccaacattattctcttccctcccttgaccattttcccccatcggccaaatggagttactctctgcctccaatgcaatccaaataaactcgccctacatcttccccagtcttcaaatctcgatttctctacctaactcttaccctaaccaatccatcctgagaacttccctcttctaaattcctaaaattatttgcttcatgaagtcattataggcnnnnnnnnnnccccaacatatcagaatttaaacatccaaatgagtgcacatgggaaataacagacttacctccaatagtgccatgatatgcaattgattttgaaattgtaaaaatcatgtaatttatttcaaagttataaatcatgtatgtttaattatacaacattaggatggcaatactggaataggttttgtctcttctaaattactgtcaagctattatttaagtattctgttagtttatattatttttctttttcccagatatctacaatgtgagaacatggaggacagatcatgtttataaaaggtagtttttgtatttttcacagtacttaggacagggtaatttctaacttagctttgaacactcaactgacatttaactacatgtttattaatctgattcagaatacaaaagaccattctaattactatcttcattcaaaattcaccaaaagcttttaattccaa

SEQ ID NO: 182760 - DNA, 1505 bp, Homo Sapiens
  misc_feature (314)..(352): n is a, c, g, or t
  misc_feature (586)..(602): n is a, c, g, or t
  misc_feature (789)..(801): n is a, c, g, or t
gatttgaacttgaatttaaagataaaaagaaataagaatcttgggctcgtctggaaataaacagtctcatttcttttgcatgcttaaaacttcagaaaactgttccctggtcagactataaaacagtatccccttaagggaagccagactgtggcacatattgtgccacctagcaggcattctaaatgcttaccaagtgaacaaacaaattaatgctctcaatgcctctcccttccttattctttgcccaccaccatcttctctgactgaggatgagccctgtcttaatttattcctcaatctcaaagtagagnnnnnnnnnnnnnnnnnnnnnnnnnnnnnnnnnnnnnnntagacctgggttcaaatctctattctaccattcctatctgggtaacatcagacattccttaacttcttcgaacctaagttttcctcatctgctgaaggtgcttgcccttgtaggttgctggaaggattaaatgagctgagtccctagtaccatccctggcaaaggcagaactgaataaacagcagatagttctccctcatggccaaggaggggctcttgaaactcagtaacagnnnnnnnnnnnnnnnnnaatgaattctaggatgaaagaccaaaattaggaaagaacaaagatgcattcatgaattcaagaggagtcataaagaagccaagagtattttaacttacacaataataacataacattaatcaaaagttacagaagacacagctcaggcttgtaggtttacaggcaatagacactgtaatgacagtannnnnnnnnnnnngtcagtacttctatatgaattacgtttcatcttttatttgtatatccattcacattctacataatgttcactcttgtaaactcccaacacattccagttggctccattaacttcagggagttctgtagcacctctgattgttaataggatacacaactcccatagggaatattatctccccactgagccaagctaactgtgagaggtatcaccttcccaaccagccttcttcgcccctttctgaggcatcgagctgcagctccaggtagacgattcaagcgagtatggtaccctctttgagctggccgagaaggtaaaaggaatgtggaatctgaaaatttatccaatccagaatccattctttctacttcagaacaatgatcaggagcccacttgggcagaagattagggacagtgaatcctgggacacattctccttcatagaaccaatcactctgttcgtcatcaccttgtcgcccttcatcattggtaaagagcccagtgtcactgctgctacacacactgctggtttcacattctgacatgttctcatcagagccctgtttttgttcatctgtttcacactccatcctttctttccttcctgttttgcttaggaaagtcctattttctgctgattcacacaatccgtggcctgatgaggtccagggagtattctccttccagcgggacagacgctccaa

SEQ ID NO: 182761 - DNA, 621 bp, Homo Sapiens
ttggttcaccgataacctgtttccttgctactttgctttggtgtaagcagagttctttctgtaggttttttcaaatgaaaacattgcaagaatatcaaagagagcagtgtttgcgttagtgattataaactgcagcatggtgctgacattgataactgaaagtcaactaatgagaatttgagacttctgaagtacacttagttgctagtgtctcccttttggtgtcactggaaagtttagaaagcatggttttgtttttgctcaggtttctctttctgtgatgcagagactctcagctgttcctcctctatgtctacattatgtctgaaggaaagaatttaacaaaacttgaaatactgctgtttttctgcaatgtttgtaaatatttatcttgctgcttttctaggtttgtcttctggatttaaaatttggggcggctggggtggaattgcatggtttgggaatgggtaattgagctgctgctcattatggtatgtaacagtgatttgtctgtttaatatgtacaagaactggaaggtcaataaaatgaaagtggttgtcttgactgggtaatagtgttacatattttgttaaaagttatacatcttttcaataaaacac

SEQ ID NO: 182762 - DNA, 400 bp, Homo Sapiens
atgcaaattaagcccacctaatcaaatttccaaatataggagtctctgtaatagaggctggtagccttaatgtcgcctgctttatggtctaaatgactgcatacatataattgctggatctcagccatagagaggcaggagtatctggttaaaagaaacaatggaacaaccattagaggaaagttaggtactcttgcatagtccctgtatgtataaataagtctttttggggggctataatgaacaattagaatatatctaaaaataactaaatattattaataattaacaattactaaatataagtagaaatattcagttatttttagttatgttcagtaactttaaaaagcatgggtacagttaacaattactgaatataactaaaagcatcccccaa

SEQ ID NO: 182763 - DNA, 926 bp, Homo Sapiens
cccaagaggcagagggactaaatcggagtatctcccataccatagagggcagtgactatatacttgtttccaactgaatacctgtcccatggaagacaaatcctacccaaagcataaggctaagagcttttgttatctaaaagagatggcaggattctcggctgactgagggaacttgcgtgtgtgtgcgtgtgcacgcgaggcgtggtagacaatagctctgaaccattacattaaaaaagaaatgcccgttaggcgtagcgatgcggttcctttaaagagggtttcgcatggcacagcccttggtgaatactttccaagtcgcagttcctgtggaagaccttgctcctcaacaaaatccctctcgcctcccggccgatcctgccttgctctccttcctcacgggctctattctggcccccggcaaggtcatctgggttaatgtatcttttaccgcaataatatggccaacttgggactccatggccatcggtgaattaaccattgccagccatgccagcatgaccctccacatagggagaccaggctccagaaagcgaaagaactcggtttcaggccatgcgcgtcttccctttggagttcccagtgtccccactttttctgctatcagccctcccttccagcagcctgagaccttaaaggaacagttctgagaaaaccctacagggaggactgggatgtctggctgtcacttctactggactttcagagccacgggacttgaggtgacatgtgcgtgcacagtagtgttttatgtaagttccagccaagagtgggtgcccaggtgtcccacataaaacagaggaaggtttcatagatagacaaaactgcatactctctctttagtcacattttaatttcaatccaaatcatcactgacttgactacggccagcttttgttttg

SEQ ID NO: 182764 - DNA, 1804 bp, Homo Sapiens
ccaagccattaacgtgtattactctcatgaattcctgtgaaaaataaaacagtgggattgggatgaaattcaagatagaccagaaacaggaggaaagtacaaatgtttacctaaagccagagaatttatttctagatgataattacattattgtattctctgcctttaaacataaacattgctggccgatagcaatctctggtgaataatggttttcgaggagaggagacacttaaattgttagtgacatgagtggaggagaatctgatatttactaatgaggcagtttgcaaagactgtccctgaagtgtagtgtagtctttcagggggattcatttagtaagctagattgatttaacctggtactgtactagcatagggtcaaatacgtgtcatcagagacctgggtatgaccaggcttacaaaactcaggaacaaactcagattcctactgacctcaaccaactaaactaggccaaatttctccgtgtacaaaatggaccacgttatttacaatccacgtggtggagaagatggtagacatgtggagagagtttggccaggtgctccattctaggtctttttccagtttctcaaaggcagaacattggctcctaattatttgccatggatatttgcttcctgttctggagctatgttgtaagacagctgtgtgatgtccatcattcttgactccagaatgaagacagggcttgctgttttctgtcctgttggtatcatctgttgccttggcgatcactcagtgatgagtcgtcagtattttgacatgtcccagtgcttgctgtacaagaggggactcagatcaacaggaagactctgaagacaggaacctgcatggtatcttacatctttgatacttgggtgctgatatgaagcagagttgttgatttactttatctaggcccttctttcttctcacctggatcaagcaactgagaagtgtatcaggagacactggatacatatctctatgaaatagagagggccatcgcagggcctggtacttaactacattaacgttctaaaacccagtttggtttacgttgtctttcacagtagtatatttagctcttctctggaaagttgtgggttaatataattcttaaacatgaaaatgtaattaaacacaccacgagagaacaatattccaggagacttaatagtgattactttcttcaatcaggaaatcgtttcagtgcctcctttgtaggaatgctttgttttgtgatgggttttcttaaagaagagcacacctccgtccaatctcctgagacagccacgtctccgctgacatcccactgtgatgctttcagatagtcagtgaatgtttctgataaccttcatccagtatctgaaacacaatgtgagagattatattgttttagataataacatcccatttagttgactaaaatcttccaaactctgaaagctgcacactgctactccagagagtgcaggtcttagctcttctcctttctgacttcaagatgaatctttgggacgatgtttctggtgcttggtccacagtgattcacttttgaaggagaggccacatgacatgaactgcctggtgttacaacctagctaacatatttgatgctactcctgttgtctgtactgcttattcaagtagtattctaagttatgttactaaaaaacatggtgggtaaagcacaatccctacccatcattgtcctccaaaataattgtatgacatacacggcccagcccattgccctccctgcatctctgtgctgctttgtcatttccccttctaccc

SEQ ID NO: 182765 - DNA, 1530 bp, Homo Sapiens
  misc_feature (171)..(182): n is a, c, g, or t
  misc_feature (394)..(402): n is a, c, g, or t
ttggataacctattttcacttttgtttgggcaaagacatttaaattgaaattcaattctaatttttgttaattgtggaaagggtaattaacagttcctatcaggtatttttaatgtggaaaaggacagaaacccaactcctaaaatcttaaattaaggtaacagtgctttnnnnnnnnnnnntgcatggggcaattagtcggcaactcaatgagtgactaaagtacttttatttaacatccacaacttcaactgttaagttttattaattactaaatcagctttattaaaatgttgacatttatttagctattttgaataattatagtgacttgacgagtgtgtatgaggacacagccaatgtaagccagtgtatccattttttagaggtgcannnnnnnnnaaagaattctgtagatagaagtgctctgaaaacaactaaaatatgtttattcatggtagtatcaaaaaatgtttgtacaaaccatctgcttctcccggccagccgagttcattctccagcaccgtgaccgctggttctcatgtacagcacatatgcgggagagttggcagaaaatttgtgaagagatgccgcaaaggaagggtctgttgacgggtgggattgggggttttgatgaagttgcttagtcctggttttgttttgaaaattactgcgttgcatttttgtgttaagtttttgaacccacgtgtgttttggtggagtatgagttggaagtcactgcaaactagcataaacaacaaagctcacagagtaggcacagatgtagagaacagagaccaaaatggggtgaggtggcagtaaatctaggatagggaaaaattaatgtgagggtgggaaataaactgtaattacctgaaatcaaatgtaagagtgcaataagtatgctttttattctaagctgtgaacggtttttttaagaatcattccttcctaatacatttgtgtatgttccatagctgattaaaaccagctatatcaacatataatgcctttttattcatgttaatgaccaacgtaagtggctagcctttatgtcttatttatcttcatgttatgttagtttacatacaggggtgtatgtctctgtgctgtccccttctcctgccttcattttaaaatgcatccatgggtcctccgtgtttcctttggccatgccacatatatagactcagtttggccttcatgatatcgcctgatttttgaggactgtatcacagtgatatgtatttgtggtaatctcatttgttggttgtacatctgatcctttcctcaacatggcaattgctgcctttcctaagataggatcatacaactgatcaggggattgaatttgatcattcatcaacatgtgtctctgaattttattcagtagttgtcattgctctttggtttagaccaagaaaaaggaaatccccccttttcatgtattccttggtttgaggacatgactcctgtaaggagaggaaagggagatgcttcctgtttgaactgcagtgaattcacggttcc

SEQ ID NO: 182766 - DNA, 923 bp, Homo Sapiens
  misc_feature (692)..(755): n is a, c, g, or t
ttggcattctaaagctagagttcaaaaaagtatattttgtaattgctagtctcagcaaaaatagaagtcagaaattcttttctaaaatgtcttttgctaagtaattgaaatggccctagcatttttttcaccaattaatttaccttacgtctcttgcactttaaacagaaggggagacactcattttctggttcactatttgatagccatggtatgtaggctgagtcccactaaatctgaggccattgtttcattttcctggtggccccaagttagctgctaatactgtcttccaaggccaccattaattctgatctgtttaatgaacacgtgcagaacccaagaaacctaggtgaaaagagtacatagattgctgtacccttcttcaagacaagcacataacttgaggtcaaggaccaagtgctgtctcccaactgaacaagcagtatactctgggttgtggattgattcctggccctctgatttgatctcatgctgtttcctagcacccagaggaatgtgaaatttgcaggaggaatttcagttctgataaatttttactccctggaactaaataaaaccagttctcgtgcatggaataaaaacttatgcctcttactagaataataaattgcaaagattgaaagaattaaatgcaaaaagaactaaaaactagagcaaaagatcaagtnnnnnnnnnnnnnnnnnnnnnnnnnnnnnnnnnnnnnnnnnnnnnnnnnnnnnnnnnnnnnnnntagtgaggacaggaaagaagaaatgcaagggaaatgggaaaggactctggggtgaccagacttctcctggtcagtacctgcattcatcctgtttgttactcaatatttctttcctaaatattcatttcacatctatggattccaatgaaaaatatatttttatgtgtc

SEQ ID NO: 182767 - DNA, 1377 bp, Homo Sapiens
  misc_feature (151)..(201): n is a, c, g, or t
  misc_feature (239)..(335): n is a, c, g, or t
ttggctaacaaaagatttacaattttggttaactggagattttgtaaatagatatacacatgacataaacacctatatcatgcatgtgtatcttatctacacatacacatgtcataacctctcattatattagttttcaacagaaatttcnnnnnnnnnnnnnnnnnnnnnnnnnnnnnnnnnnnnnnnnnnnnnnnnnnngagaactgggtctcactatgttgcccaggcaagcctcnnnnnnnnnnnnnnnnnnnnnnnnnnnnnnnnnnnnnnnnnnnnnnnnnnnnnnnnnnnnnnnnnnnnnnnnnnnnnnnnnnnnnnnnnnnnnnnnntaaataaatattatagtaactactagcactcattgggtactcaatgtatgccaagtattaggccaaataatttctatgttaactcatctaatatcaaaacagtcctttatactgttttataaatgaggaaacgagggacaaaaaatgaaagtaatttgcccagcatcatatggccaataggaaatggaaccaggatttagatccaggcaaactccagagcctactctcttagttaatacaccatcatatctatgtatgtatttaatagaaatagtcattgaacaatctttaaactccagtctttatttccccattgcctggtatatagcataatcctgtcatgtcatgagtacccagtgaatatttagttgaacgttaaatgaacttgaagtggaaatattaaataaaccagccaaacaaaattgttttctacttgaaccactgtttgcaacttgggattagtaaatattttaattgtttaaagatccaaaacttagtaaagttattcttgcataaatgtagaattagatattactctattctccaatttgcctttcactaattatgtaaataaccagacacctcttattttttatctcgttttgctgggcttcccaaatccactctactttctgaattctctatttctgtttaatgatgtcaccatacttttcagttctcgaaatgcaaaaccacgtgccaggcagttgggggggcacaatggtatatgagactaacattatccctgcttttataacgctcatagtatagtctcaaaggaaattcagaagtaccaacgaataatttacacatgtgatggaatgggaggtaaaaggtgctatggagggatatcatagggactggaaaaaactcactactgtagaagtgacatttaagctgaaaacctgaaggataaatcagaattagaggaagagaataaatgtaagtggcctgagcagaggtgttaataacatgtttgaaagcctagtgataagggaaaaggcagtgtacataaggaactaaagaaaagtcagtctgggtt

SEQ ID NO: 182768 - DNA, 820 bp, Homo Sapiens
  misc_feature (188)..(491): n is a, c, g, or t
ggcctcacttgccatctgagcaattggcaaggatgtgccaggcctaggttaaacttggaaacatgcttgaccattctattccctggtcctttaagatcagtttggctgcaattttggctccttggaccctcaagcatagctggtaaatcaagttagagatgtaactgccttaaaacatgccagcttannnnnnnnnnnnnnnnnnnnnnnnnnnnnnnnnnnnnnnnnnnnnnnnnnnnnnnnnnnnnnnnnnnnnnnnnnnnnnnnnnnnnnnnnnnnnnnnnnnnnnnnnnnnnnnnnnnnnnnnnnnnnnnnnnnnnnnnnnnnnnnnnnnnnnnnnnnnnnnnnnnnnnnnnnnnnnnnnnnnnnnnnnnnnnnnnnnnnnnnnnnnnnnnnnnnnnnnnnnnnnnnnnnnnnnnnnnnnnnnnnnnnnnnnnnnnnnnnnnnnnnnnnnnnnnnnnnnnnnnnnnnnnnnnnnnnnnnnnnnnnnngtgccagcgtatgaggtaattagattggttctctccagaggtaacctgccaagaagagatgctatagatgttactcctatactgtaaaacattgtgaaatcagattactttaaaatgatgtattacaaagttatgcaaaaaagcagttgtgactatggaagcccaaggcttatatcccagctctgtcttacactaaatatgggtacagtgtttccactctgtccataaaatgggagctaatattctccaacctgtgtgcctgacatgatggttaaagggattaaacaaaacaatagtttgtattttattctgtcagagcaaactgctgg

SEQ ID NO: 182769 - DNA, 1331 bp, Homo Sapiens
  misc_feature (48)..(65): n is a, c, g, or t
gggttcaagaccaccctaaagaaaacagagtgagatcctgtctctacnnnnnnnnnnnnnnnnnngataaattttttcgaaaagttttatatgaaaagtgtactctgaaaaaatctagctgtcatacctatccctccattcctaaccatctcttataagtaattattatccatctcttataagtaattattataagtattttcttagttttccaatttatctttcatgtgtttctttttaaaaagcaaacaaatatgcatattgctgtacttactgtgcctctttcacaacatggggtctttataaaatttctttggatttttagaaaggtttgtatgctctaatttatactgataccattttatataatgcatttagagtccccaatttgcttgtctaggcctctactatttaatttgacacctttaaatgatgttctttgactcttatctaattgtctatgtgaccgtcagtgaatatattatctgttcatattttctgtagtcttatttctttttgattagaacatataatatttacacactattttcccatcctaatccccacctttgtaataaaattaattaaaattttaaaaaagtatatttaataacctactgatacttacctgaagtctctctggtcaacttttggctggatgaagctcttctgtagagtattcaaggagggcttgtaagtactgtacaatattctctgagttgtgacatgtttaaaatttcttctggagcctagatacttaaagtacaccttggccatgtagaaaatccttgacaaacatttccttttcttgagtttgtctgaatttgtgcttcactgttgggttgcttgatgttatcatcaagaagtgtggcaccacttgatttttttcccttttggaaatgacattttgtttgttgttttttacctagagacccagataattttttctatattattttatctatgatcctttttatctcatttttgttctcatagctgttttattcctcttctctgtatttcttactttacttttatttgtgtctctcaggtaccctgtgatttagttttcatttttagatgattttatcttttcagtatattgcctatgtttgttcaactctcattttacatcttactattgagtttaaaaatttttatttgctgtgttcttttatatgtgcaattaatgatattcatgttggagtgttgtatattatttgcctctgcttcatattgtctagagggtagtattttctattgattgaaaagttttcattttctgttttttataatagccttgtatggatttttggtgggcttttctattc

SEQ ID NO: 182770 - DNA, 352 bp, Homo Sapiens
gtggtgacaaaagtgactccatcttggatgctaatttgccatgttgacctcagattaaccgcagtcctgtgaatgcctcctgattccttgtttatttactgtctttaatgtaagaatatgtactcacaatatatcctacctttaggtcaaagcaaccttgatgttatcacgcaactcattctggcctgttctagagggttgcctttcattgtctctatagtgcacataccctttttcctgtggtatataagtcccgggtctggggaataatggtgtggagatctacctgacttgttgctgaccagaccatgcttgtgtccataagttccctaataaattgccctctgctgat

SEQ ID NO: 182771 - DNA, 1556 bp, Homo Sapiens
  misc_feature (165)..(184): n is a, c, g, or t
ttggattttgattaaaatttttaataagactttatgctagaaaattctttgagctttgaatcaccagggcaaaaatgactttcaactaaccttgtgaatcttttgcagtgtactgtgtgcaataccaagggcatagctccctgtaatttgggaaatacagaaagnnnnnnnnnnnnnnnnnnnnggcagcctgtgcagtcttcgtaactttagtattaagagcacttaaagtcaaactgacaattttgggcttattacaaaatgtgatgctttaaagcacacgttctttattgttgttgtaattagtccataaaaaatatagctttcggaagaattaaatacccaccatatcatttatgtatttgtgtatgttttacgggagatcaaaccactctcgtggtgccgcatccgtactcgcttgacttggaagaaatatcacaagcactaaagtatatcagggcatcccaggattgggtactgtatcctaggtttgcagttgcagaaattagcatctagtgtcacaggtaaaagaatttcaggaccaggtttaaactttattttaaatatttttatacttaggtctctttttcctgcctctccccaaagaagagccactggccttagttgtttgagcttactgcttatattatagagtgtaaataggtaactagagactaaaattttattaaccagcatgtttggtatatttaaagcagtgactgagtgtgtttgagtgagtggctgagtgcagtgtcttttgtttaaacacactgcctcgtgtctttgtagctgattcagagagtttgaattgtggggtgggagactaacttcagctccaggctgcagtaatgtgttggtagttacacttgaggcatttttttgttgttgttaattaactctatagtctcaaactatttttgcaaatatatcatttttcctaattggttcttgacgtgcagtggactggctctgtgaatgattggcagggtcttagttttgcgagagtatttccttctaagaattattgtgatctgcagaaacagccatttgattcaaaaatcatgtagaaaaggagtaggagaagcaaaacgtttcatttttgggccttaaccatttgaaatgtttggactttaaacataaagccatggagtttataaagccaagtaaccatttgatatggataataatatctactctagagagagtatatatatgcacattgatttttaatgctgttaagatacttttgtaaaactgtaggaacaagagtaattagaccaaattgaagcttaggggacagtaaagtggttgctttccatttagggtaaccatgcatgtggttagtcctctcctcctgagattcagaaccagttgactgtccccttatgtgtataaggagaaaagttgacatgtctgggacctctgacatgtgtacacatgcttgcacacatgcacacacagtgaatgttttaagttatacaaacataagaccttaagatgcaaagagccagaatattctaaagaggtgatgaacagagggggtggaaactgcatca

SEQ ID NO: 182772 - DNA, 1451 bp, Homo Sapiens
  misc_feature (925)..(1235): n is a, c, g, or t
attttcttttgctagagaacatagaaatggatgatacttaatattgatggaaaacaatgacttcaaaatatgcctatcaaactgtgaatacacatacaagtcgggtttttttccacacttactgacaataaagatacagttttttccttctcatgaaggaaccctattgcctaaccatccataaatatctagagaattttttagaactaaaaatatttttgtttcacctatgtattagtgcctcatggcacacaagtactagtaatatttactatatgcttagatacgtatgctacctgttaaatattaccgcctactcctcattcaaaataatcaaggaaacatcaacgcacatcttcaaatggagcctctgaagtataccagaaagcattactttttcccttctactgtgggtttaccatgcacagctcttatatattttggtgtgtgtgtcatcaaaaggcatatatgccttcccaaaataaactttaaatgtgagttcacattctacagatctatcagtcactgggatcacatgtacggctgtggaaataggattgatgaaatatgtacttgacaaaacagtcaaaattattggtggctgatacaaaaatgtaaaaattgtggacataaaaatgggattacctctttatgataaaataatttggttagtttttttgggtggaaggagactcctctctgaagtaacctgaaaaacactcggtttataaaagtcctcctaataccttaaacagactgtggaaaaataactgtgaaaacaaacttggactctaccagatgggagctttgtcttattttatctgtatccccagaatctaattgagtgccaagtatagagcaggtagaaaagtctatcaagtgaatgaaggaacagggcatttcagttaattacaattattttgannnnnnnnnnnnnnnnnnnnnnnnnnnnnnnnnnnnnnnnnnnnnnnnnnnnnnnnnnnnnnnnnnnnnnnnnnnnnnnnnnnnnnnnnnnnnnnnnnnnnnnnnnnnnnnnnnnnnnnnnnnnnnnnnnnnnnnnnnnnnnnnnnnnnnnnnnnnnnnnnnnnnnnnnnnnnnnnnnnnnnnnnnnnnnnnnnnnnnnnnnnnnnnnnnnnnnnnnnnnnnnnnnnnnnnnnnnnnnnnnnnnnnnnnnnnnnnnnnnnnnnnnnnnnnnnnnnnnnnnnnnnnnnnnnnnnnnnnnnnnnnnnnnnnnnaaattattaacttggaaaagctttctgtgttagcctttatgagtatttggtgatatggtagaaaggctttatctaatcccaaagaaaaacaggcccagaggtaatagtttttatttttagtctttatattctatagagggtgataagagtcacaagccttcttatgtttacattaataactctaaataacctgaaatcacacaaactcagtcccaa

SEQ ID NO: 182773 - DNA, 852 bp, Homo Sapiens
  misc_feature (260)..(351): n is a, c, g, or t
ttggatgaacaaaaaatattatacaaatttgttgttaatcgtaaactataaaaaaaatcagtaattgttaccatgtgaaatgaatttggataaaggagatacgtttttgccccttcccagggtttaggagagacgaaatggtgagattttagctctgaatcagaggttcttattagaggtggttttgttcctcctgacccctaggggatatttagcaatgcctagaggcattgatggtgggcagatgctactatgccctnnnnnnnnnnnnnnnnnnnnnnnnnnnnnnnnnnnnnnnnnnnnnnnnnnnnnnnnnnnnnnnnnnnnnnnnnnnnnnnnnnnnnnnnnnnncctttaaactcttgggtttatttgctgacctttacagtggatcagcttttatttagttcatgtagaggtcaaattaatactagtgctcaaatatgtctttgtattctggacttggcctggatcccccgaccaaatttgggacaagctcctgccatgtgttgaggacctgaattcaggcagctaacaacagtatttgaactgtgttttcagtggtgggagtgaaggagatgagccgacgtgctagcaagcgcatagggttgcatgaggaaatagagagtaaagctgcagcgtggagccctgctattcagagtgtgcttggagaaacagcagtggaggcattactggggagcttgatggaaatgctcccctcagacttgctgaatcaaaatctttaatttagcaagatccccagtgaggcttgtgcatgtagaagttagagaagcacggggtaaactcttcttttttttactttggaggaaaatacaccttttttcttattat

SEQ ID NO: 182774 - DNA, 1523 bp, Homo Sapiens
ttgggtataaagaccgctccacatgtctctcacttattgaataccatataagcaaagcacttttaaaaatgccctactctgctcctgtgtacccttgttgctgtagttctccagatgggctcttagaacacctaatggcccgtgatcctcatatcccagagtaggacatacatttatttaaataaaagcttgagacaaggaatctagggaaatcataccttctgagggagagttcatcactgaaattgttctcattgtagaaggaccagtaaagtaatgtgatttgagttctgtccgtgagccttgggtataattccagtggccctgactgaagaccagcagttgtactgtggctgttggtttcaagcagaggcctaaaggactgtcttcctgtggtctgttggctgttctgggacctcagtagggaatggctatttcatttggaagaaacaacctacagctcaccatcccattggaagaggctcaggaataggctcttccaagggactaggatagctaatatgggaagagcatctgtccagaattaatttctgttgtattgttcttattgctagtttaagtggccactgataagtcagattcatacttcagaccacagtgaatgaattactaactgaagtgcctttatttcttttaacagggccagatgcagatggctgggatgggtgcagatcccagggatctcgaaattctgagaaagcctctgcaccattgtctcagagtggattggctactgcaaatgggaagccagaacccacttctattagttgatagtttggggaaccattttactttggtggatttaaatttctcgttcttcaaagaagtatttctgatcatctctcacaaaacacaggcaacccagactaccttgtttttcttctggattgagtattatagtcaaacgtaaagccaaattttgaggacgtggaccgtgggtttcttcccactcagggcaaggaagagaaagagagataatccctatcaaagcttctgggattatttgggactatacctaaaaggaaagtgacatctttgtaatgggatttcccaagtcatggatagaaatccacttaagtagctaggtgggagctgtctttgtgagtggtgtctttgagatactgatggccctaatatcggttatctctatctgaagacctgcagtttagcttttcttcacctctacttaattgggcagtctttaacccctttccctggtgaactctggctttttatcctctgagaaaacagcccacaggactgggtcctccttatccgtcttgcttttaacctatgtaaatttctgtggttgctatcttatgtaaaatatagtaaaaatttattgtatatagtttctattaaatgttaaagaaaatgttatgaaaatatcaaacagtcacctgaattgaatgcatgttttgtttgagaatatagtttctttttcgcggttttggggacctgtctctgatgggaaaagggaagttggggacagatgatacttc

SEQ ID NO: 182775 - DNA, 774 bp, Homo Sapiens
actttgtacaaaaaagttggcttttataataaaccagtatatgtaagtaaagtgttcctctaagttcctctaagttctgtgaattggtctagcaaattaatagaacctaaggagggggtcatgggaaccctgattaatagccagttggttagaactacaggtaaaacaacctgattcttgtggttggtatctaaaatggaggctagtcttgtgggactcacccctcaacctatgggatctgacgcggtctccatccagaataaacagccattggactcttcaaacaaaaacgctgtctccatcaagtactgctttcgcaggataagtgaccatttttaatcagttgaaattaacggaaagtagcagttatttttgaaagatgacatcaattatataatatagtaaagagatttaatttttagtcctttgtttcttactgcacaaattgtatggcgtttgaatagaattcccatgatactgacacttcagcaaatacttgcttgatggctaccaatctctataacttacattgcacagtacctaggaatattcatgtgagttcattcctccctgctcagattcttcagctcctcgtggttggtttattcaattggttgtttcattatggatggaggggatgatggtaaccttattatcaaaaagaggtttgtgtctgaggcatatctatatgaacgggcgcaaaaggaggcaagaagaatgggagaaagttcgaaaaacctggaagatccagaagaaatgtccagaaggaaggtt

SEQ ID NO: 182776 - DNA, 860 bp, Homo Sapiens
ttgggaagaaaatcactcagaaagtctgttttgatataaaataaaactttctttttaaaatccttcgaagtataaagaatttcaaaaataattaacattttaatcacactgtaaacattgtgcattcagatatttttttaagctgacagactagttagatgaaaagagtccagactgaaatgtttggaatgggtgtctcaatcctagattaaaataagtactctttctaacatgtcttaagacactacttttaaggaattactccagaaaaacttcaggaaataatttttgcctggttagtagcctcaaggatttaaactgattaatatttttattaaatatttctgtagtagattacatttttttctttctttcatgagaagtgttttatcagaaaggtgtgtctaaaatggatgctttccttgtttattttctgggtgtgtttggaagtagactgttgcttatcttcatactgctcccaatatcaccttcttctgaaataatttgttttgttgggtttggtatatttgaaaatattcccaagagccacagactggtgaaaattcttccttgaaggggttgattggtaatatatatatgtgatacttataacttcatttttcttctctccttgactctgaccaaaacctttgcactgattgattatagttgcgccaaaattgttcacaatgtctgctagataaaccataataatctagagctattcaatagcagacaggtccttactaaaaaataatttagaactagagaattattaaggtcagggaatagtataataagagcactgttctgattttccccaaaattatgatgtgccttagttcagaaaacccagcctt

SEQ ID NO: 182777 - DNA, 1377 bp, Homo Sapiens
ttggggaaaagattgaatgaatcacagcctcatggggtacttgagggatgatatgactatttctctgcatagcatatctccattagagcactagtccactgtgtaacaataaccttgcatacatgcctgccacttctaactagtgagtccttcctgggcatgaagcacgtatcattcctctgtgtactgcagagttgtagacactgtgcttgacacatagattttagtaaatgtttatgggtggaactaatgagagaactagaagagggagtgaattgaatgttcttgagttaatgggaaggagttaatgaaggcctcacagaggggcaaatgagctggatcttgtaggatctgtaggagtttaccaggtagagaagagtgactccaccagcaaggtgtttgggatttctatagttaattgttaagaatttattcctgttccccagatccttatgactaatgccaacactaaacataaaacaggatgttactctttctacaatgagctttggtgtttttgtttttgaaaaatattttcggtatatggtttttgtttctgataggaattctcctttaggctattgtcaatttgttttcctgtaatgatttgaaacaattatattaacttaaaatgatgtcacaatgagtgaaataatgaaaaaaagttatagttattgagggtagtctcatgatgagataaagtgcatacagctgcactcatgtcgccaggtgattaagaacagaattggtattaaggtcaacggattagcaaaaagggaggagattattgtcttttcattattttgaaagaagtaccatctgcccttgattgttttggtttaggttttattcagcccaaattagaatccgctgtggtgttgattgttccttgttggtgatagccctagaactgtgtttcccatcgttgatacttgcattcacgtttgctagttctctcttctcctgtgaagacatgaacgtagctgctcctttaattacatttagctagttttaattcagagatggctattggccctttgttttcttaccatcttttattgtgttcattttcctagttgatttttaatggtgacatcactaacagctctaaagactcaaagcttaccagacagcacgcttccctgggtcagaagatgagagtcctctcctctctcattcagtaccagggtgtaccagtgagaggcttgtgaagggattgtttcggcgactccttatctaagaaatgaagataatttttatgaggtgcattttggtctgtggggagtggaagggaaaatgacggtttccttccctatactgtcctttggtttggaatggttgaaaatgttttgaatctgtttctggtgtgatcgttaa

SEQ ID NO: 182778 - DNA, 1401 bp, Homo Sapiens
ttggcaatcttttccatttttattttggggtgtaacgtattttacggcatcctgtttcatggatgcagtggcatgtttgtgcattaagacttcacaccaattttgacaccctcttctcatctccgtgcagcttagattgtcgcttcacctgcttgctaagtccgatgcacgcctgcattttaccatgcagaaatatgttcaagccactcatcctctcatgtctcttcaccagttcttttgttatgctggcatatacctttgtttttatttatattcaagtttccagacatagcattaatgcctttacttttgtgtttttatttctgtacactgtcttgctgggtctctagagatgacttggctcatctttaaccagaggtgctgcgtgagggtttttatcagagactgcaacacaaagtcaggtgcatggcttgggtgtcttgtttggggatgtttctctttttagatcactgtttcccatcataacgtgtttttgctactaaagcatcgacaggttttgcttgaaattttttccaaaaattaccgggtacgccgaaacatgatccagtctcggttgactcaagagtgtggagaagatctcagtaaacaggaggtggataaagtactaaaggactgctgtgtaagctatggtggcatgtggtaccttaaagggacagtacagtcttgacaatagtagcaaactactaacccagcaaatctaagcccaaggaagaagggcggaaccagaagtagggcctcgacttgcttcagacgacacagagcaagaggaactgaccatctcatgacctgtggcattgcacggtgcagtggacagaagggattatcctcagccagtcacagggtcagcttaagttagttagatcactcccagaagagaccagctgggaccttctttgcagtacaatttgaaattcctgatgtattttgcttattatttggtttcattctcataataaagagagtgtatactgacatgggcaggatgataaaaatcatggtttaatattttcttttgtaaacttaatgccaacaaggtctaagttatgtttacaacatgaagaaaacctcaaagttcttaatttttaaaatgcctagaagacaatatttagtcttggattatctatctgctaagacctccaccaatttcattagaccaaattgaattattctattcttgggattctgtggccacttcacctttgacaacaacctactttatgtagcaagtctcacctgtttacatgaaccatagcaaaaaaatcagaatcaaatccatctcccttttaatgttttgcagaaagatgcaaacaaaaacacgtaagtatgggaacatgtgtaagtgaaggttatccacactttgatggtaaaaatttctatttt

SEQ ID NO: 182779 - DNA, 1507 bp, Homo Sapiens
  misc_feature (1302)..(1325): n is a, c, g, or t
ttggctcctacataataattattgcttgtcacttttgaatcaacaaatagatattatgatggatcagagaacttttgatatatccgtattaattatgattgtctcattaaatatagaaaatgtttgttctcacattcctttggctgacacctcctcttccttcaggcgtcggcattacaaaatgtatttcccactgcacctgcccctgcctctacccatccctaccacctttgccctccaccctcttcatatgaaaaggtcttcctgcttcacacccatagcacactgaccatcagtagcactgatcacaactacagttggttaaattttgcgtaataaattttctaatgaggatttacctcaatatattctctgcttcaagaaatagtgatattaggaaagggcatatacaaacaactcaatctactttgctgtataaaaagttcacttatttatagaaaatttaaatataatacatattaagattctctgagctccctactaaataacaataacccctcacatttgcatagtgctttatacaagacacgtatattatcctcctcaattcttcagaggtaggtagaatctcatttattttatggataagaaactgagactcagaaaggttaagtaagttccacaagatcatggagcctagtaatttgcaaaataaggcctccaatcaaatcctagttttctttctataccccagctgcagcttttagtaatggtctagttcagcatacatataaatatttataaacattgtgtcattgttctgaatgagtatatcttactattttgactgttttatgacagtggagctgcgtagtaaagtgaacatttgcagaagtttaatctacagccattttatattccctctccctctgctttgagattttatcctttgctagcaacaacattcttctgtaacaacaaataaagcaagcatcttcctatttgccttcaaataaaacaggtttagggattatctgctcttttcacatacttaaacacaccttgagtttctttttatagactttcctttctcctgacactgtgaaatcccagtgctgtttcttatttgaatgttttatcatctgacacctaataataaaaagtcattggcacaataacagagtttcatctttcttaaagtttaaaaatgtttagaaattatttcatttcttaaataaaaattgcagtagaattaagtatttccctagagagataaagattgaaatttgaaagtaaattgctactaactttgagccaattaaaaaactttcatggaaatgnnnnnnnnnnnnnnnnnnnnnnnnaatgtagtgctaaaaccaaggagtatcatataaaacaggcccaggcacgttttgtacctaagctaaaaattacttttgtggcctttgacatatcaaggaactttgctatataatgcaagcatagatgaaatttattcaccttttgaaagtttaacataaaagtttaacattagaaactaaaa

SEQ ID NO: 182780 - DNA, 702 bp, Homo Sapiens
tgaaaccctttctaaattgaaccacttcactttcctggctacaaaatgcccaacacaattcaatggtgttttgatgattcaggatcttgtgatgccttggggtatctctcagaatatgcatacttttgttagaggagaagactggagccaactactatttcctgttttacatgaatccctgatatcataagcttattgtcttccttttacctcattctcctaaaaggagggtgcagactaaggttctagttaagcaagattttacagttctagacatatccacaaatactggttcacgcaaacaagacagttcactaactttttaccctctatttctctacttaataaatatgcctagtaacaacaattacaatgtaatgggatctgtttttctggatgatatcaaatttcagtatcctatgaattccttgtttgaaatattttctttaaaaaacaaaggaaaatcactcatgaagatgacttccaaaaccatgagagttatagattttgctagtggaatcaaactgtgcttcctatattattaattcataactgcttaaacaatctttaaaacgttatcaaaaaacaagtaagttctctcagatactaggggcttaattcctcaaagccataaaataatgagttgctaggaaagccaccttctgattcttactacagtcaagcatttccatagtgcgccaa

SEQ ID NO: 182781 - DNA, 1430 bp, Homo Sapiens
tacaaaaaagttggcatttactaatctcctaaaaatatatattgaatacatctatgtagcaggtactgtggtaggtgtggaagatagttgagacaggtaacaagcccaacattacggagcttagcatcaccacctagaagagtttttaaaaaacatagataagtgaatcatgattataaagacaaagagattcttgccatataattacatataagcaaatttaggatgtgatgaaagattttgatattggtcttctgatttggctgtaggatgaagtgtttataagtcatcccaaggaagaaacaattcagatgagaactattcaatggatttgcaataacaatccaaagatggaagaagacacttctaggtagacaaaattgcaagtatagagaatgtaaattaagagagagcttagctttcagatgaattaaaagattgtggtgatcagaatgtagagattgacgagagacaaatgaaataaaactagaaggacaagtagagatttgtgggtcaagttttaaaattttattataaatgcactgatactgttctgaacattttcttacacatggaaatttaatgattatggctattgaaaaatgtaactcttcatttatatttttccgagaatgaaatcggtggaattgctggggggtgaaaatgtccaatgcgaaacaggaggctaatttaagaagggatactgcaaaattggtcatgatggctcaaactgctgttcataatagagagaagaaaatggatagagttacatatggatgagagtaaattgacaaggctaaatgctaaaacgtgggtagtgacagaaagtaggtgtcaaaatagacttccaggaaaagaaaaaatgggtctacagaagagccaaatgctgatgtgggttacatgatcctgagcagatgcagttgtaattggttaagtaaagtaagttcttaagatagatttggcctggcgctatacattctagagcccttgaatataagtgggatataaaaccatgggaatgactgtatttgtctaaggagagaatttggcagaagaaaaggagacataagatgaaatgcagaggaaattcaaatttaattggcaggtgtaggaagacaaggagatgacaaaaggaactggaaatgagtaatcagagacagaaaagtaaaagtaagagtagaatgtcatggaaggcaaataattggaatgtttcaagatcagggaaatgggcaataaagagaagaaaaaaatagtgaccagagggtatagtaatgtgtagaaattcatcctgtgttaggtttgattgcttagacgttttatataaaaatctttcccagagagtaataaaacagaagtgaggttagagaaagaacatacgaatttagccaaaagtgggaaaagttaggaaatgaagaataaatatgtttaaa

SEQ ID NO: 182782 - DNA, 2152 bp, Homo Sapiens
  misc_feature (1832)..(1862): n is a, c, g, or t
ttgggttgttattttcaggtaacaacattcgttagcacaaatatttcagaccaatattagtgctctccaccccaccttttgttatcattttcatttcatttctctcattcttttttattttggaaaatcatattgctatagtgtgtactttaatctgccagcagataccatctacactaacatttgtcccacagcatcctcaagagaaaaagttgttgcaccttatatatatctcaagcaaaccaaaatatgatgctcttctgctttgttttattctaaattgttgtatcatatctttctgaaaccattctgaatttagttgaaattatcaatatttatgcttttaaccttaatttctggattcaagcctgtatataaatcttttgaaaaaaaattgtcctagcccttctctgcgatgctggaagtagaagattgcgtctcagatggagacgcagtactgttccagttttctttagccttttatttatttagttattctgggtatttcctatgtaattttgaagtgtgtagagtatattatagtaactgaagctgcagctgtaagaagctgagtgaaagaaaaaatactgtaagacatccttaaagtttttatttgtttgggtactgtatatgagatcaggaaaaagaaaaatgtcccacagccacattggaaatacaggttcttgtccccaaattaggttagttcccagattttagatcacaactgttaattcattaaaaccccttttaaaaggtaaattctactgttgtaattccgatagtctttttcccacaaatatcagaaatatatttatttaattctgtcagatgagctttctaccgatgccatgtcccaaagccatgttaaaataattcccacgttatcattgtgattctacttcctgccactaaaattgctggagaaacaaaataatgatggaacactatgaacaaaaaggagcatctgaactggtctggttatttagaatccaatgtgttcaaatccttttgttttcttattaagtcagatgctactgtaagtcagataaaattttgtttgcactctgcagtctttggctcaatgtatggaaatgtttgcacctatgtaaagtcacaagctaattacaaattgctacagaacaggagtaagctgaaaactgaatgccatgttttgtttataaggtggggaggggagggaaaataccaaaaaactctgttccaagtttggcatttgacattaatgtgaagcagtgggaccatgctgcctgctaaactactgtatgaatcgtaaatgttctgaagacgagcagctggaggctggaggatggcattccatacagcaaaggagaagcacccaccacttcatctgggaaaaggaaggaaattgcaggaggcctggagccatcatttgtaaaggggatgttgcggggtgtgatgctgttgaggagattcaccttcaattgcactgctccacagagccctcatataaggccaatcctaatgggctacctcggctttaaaagttaatttcagtaagtcctgtttcaaaagtttgtctttttttgcttctaccttcagtgccactattttccactgcagtgttttgacttcacaaactgcctcctccagagagaacaatgtattgctgaaaatgggcagtagaagcaaatgctgttgttacatttgacctataaagtattcagagtgactgctaggtagaaattaaaacttagctttcccaaatagctccttattttgcaccttataaaaagtatactatttgttaattatatgttgcttttgtttatacaagcattcccaaagaactagannnnnnnnnnnnnnnnnnnnnnnnnnnnnnnaaaaattatcttatttagattgactaacagcatacttacaattttaaaagaagctgttgttcagttcatcttaccagatgtgtctggcgaaatattcagggtttgatggactgctttactttcgtttggaagtgatagctaagtttattatactctatattaaacaactttgttcatttcactgaggaccttatcttccttatatttcagatcaaagaagcaacaagcgtgaataaaaagacaaatgtatttgactccctcataatccccatctgtattgtgctaccctt

SEQ ID NO: 182783 - DNA, 1545 bp, Homo Sapiens
  misc_feature (853)..(1112): n is a, c, g, or t
tggtacaaaaaagttggctaaatatgcatgaaaattgacggagaatgctagttaaaaagaaattaggatttatcactggaattgaaactaagagtacaaaagtctgaacgaatgaaacttttctccaaattttacaaattcttgttcctttctcattagaagagcatgctatccaaagcataaatctcccttgaaaataacagaggcttcttaagccctctcttagctatgatcaatggatgatattatgcttcccatagctaatgtgatagctccttgcctaggattcctgttgaaataaggattctagccccatgttaagtttttcaaattactacaaattttagataaccatttggagctttttatactataattatcaattttttattttagctaattacctgtgggcattatacttgaggcaggtaccaaactacttacagcctttttaatgaaaatgtgctgtgtactttgaatccattcatatacaaaattaccttgatgttctcttaactcattctttattttagtgattaaatacaacctttgagttgttcaatatcatttgaaaatggtaggatttgtggttattttcattaccctattagatttaagatagagaggctgggatgacagaggcctccttgaatagctatgaagcctcattcagcatatcaaatggtagtctgagttctaagaaaccttaagtaatttatcattctgtaaatactcttataagcaataatttttatttgtatttttgaaaacaaactacttaaatatggaaaaatattaactggaaagccagcagtagggtttttctatttttaaaagacatttcaaggatttnnnnnnnnnnnnnnnnnnnnnnnnnnnnnnnnnnnnnnnnnnnnnnnnnnnnnnnnnnnnnnnnnnnnnnnnnnnnnnnnnnnnnnnnnnnnnnnnnnnnnnnnnnnnnnnnnnnnnnnnnnnnnnnnnnnnnnnnnnnnnnnnnnnnnnnnnnnnnnnnnnnnnnnnnnnnnnnnnnnnnnnnnnnnnnnnnnnnnnnnnnnnnnnnnnnnnnnnnnnnnnnnnnnnnnnnnnnnnnnnnnnnnnnnnnnnnnnnnnnnttaaataagtaaataaatgaataatatagaagtctcaaattatagtgcttactgtaatacaaatgcttatgaattttcattcattaccatactcatctgcatttccttatagaaagcctgtactggtgcaaacttctaaaagtggatttcatcaagaaaatgtgtttcatagagacaacaatattgcttttttcctgagaggcagttcattcttaaacaaccacttcactatttcttaagttattaaggctaaatcaaagagcaaatgttaaagtgtttaaatctctcttgaacaaacacagccacagtcatgctattctatctatattttcacttaaaagatacaccagcagacctattttaagagatgtcatattgagccaaaaaatgaactgagcaaatgacatttccaaactctttttttgctcaaaaa

SEQ ID NO: 182784 - DNA, 872 bp, Homo Sapiens
tccaaatgaaaaacataattgcttcaaaacacttacacagttggaaagttatatgtaagtgaaaatttggaccattgtgtacaaataaaaactaagatgcatgtttaatactccacacagcagcctgtaattgcgaatgatgggatagagttatgtatcaagtactgacacttggttgtacccactggaatcatattagctgttttatgttatatgcttccacagtaacctgcttattcagatcagtcaaaatatatcagtatgaaagatcatagctaatgaaaggcactcactcatattgtttactttaaaatatttataaatatgccttaaagaaatacaaatgataacaattacataccgtatttacttgcttaatttcctctgtatttgtgtagatactttgacatggaataatatatggtggggagacccgtagtgttaccgccccagtgggagggggccctggggaccctggtaatgctttagtcaaagggatatctctcttgtatcagaggctgtgtcttttagtaacaggagtcctcgtcagaattgcgtgtctgttgtctctaaaagaatgggtgaaccaatcggcctttgtgaatttattcagtgccttctctgtaccaagcactgggtaaggcacttttgtggagcattagacagtaaccctcaaggagctagagaaccggatgggagacatgagcggtaattaactcacttgttccccagagtttctatttgttttgattttctttttctgtgacttattttcctattttctttcctccatgtaattttcactatggcccaactaatataacacctggaaattacaaggaaaaaaattcttcctctaataacttttcaaa

SEQ ID NO: 182785 - DNA, 1252 bp, Homo Sapiens
  misc_feature (108)..(119): n is a, c, g, or t
ttgggtcattttaatgatgttgtctagtgaccctgccctccctgggaatggaaggcacggcactgatgtgtatgtagatgtactcatcaacatattgaatttgctgannnnnnnnnnnncttgttggagagttgaaaccagtcggcaagctgggtgaggttgaagtgttggaaagagtggtgcaaactgccattttcatgttctttagagaagtctgccaaaaaaggagtagtggttctgtttttaatggatttatgagttttatatggtgatgaggagtgagtagaggtgaaattgtctcatacagcatgtaggctttattttttattttcattcaaaacagtaagtacactgaagtcagagtagttgttttcagtaagaaaattctgcctccagagcaaatgttttggtgaatagataaatatgagtactgagtcccaatcattttggctcataggttccccagtatttccataggcaagcttaactttgcaccattcagagacttatattttaggttccccacagggcaccccactggacgtggctcattttccagcctgtagtcttgttcttctgccaccctggggcattattcctcttcccctctccccaggccttcccccttgcttcttggctggaacctcccatggtgattcacccttctcagcctaggcagacagcacctccctgttaagcccttaactaatcccgctctgatggctgtgatctttctctctgtgtcttaatcacttggaataaagaaccattgtggtgaggttgaaagggcattggcccaggagtctggggatctgggttttggccctgcctcagctacttaattcactgggtgaccctggactagactctcagtgtgtcacagaggcacgaagggaagagagctcaaaggtcctgcagggtggaagtctgcatttcacagttttataagtgtcttttgtatcctttaatatagtgcaggctcagcgtatgcttggtatgggttcgttgattaattccttgcgtattaccagtgtttgtaacctacagtagcactgccaagacttccttttcctgctttcaaggatagcagcacactgacacattctcattagtcaaatatgctatattaaactaatgttttaacaaacagtgaatcgcaaagccaactgttccttccagcgaataatagatcatatgcaaaatgactttgcattgctatgggatttgatggagtgaagaagcaagcactgta

SEQ ID NO: 182786 - DNA, 1149 bp, Homo Sapiens
ttgggaaaaacacaaaatcttaagtttaatttggaatacaattgaatttaaaagaaaggtgtaaatttcagcccccttttaattagcaagtggatgttaacaaaaatcagtcaggctttatgactctaaaacaggaatccctgagtcagatttgtaatcccttctcattaaaattttaactgttattcaaatagtatctctaagacattttgatacatacttgaatgctttactgaaaacaactaaagctcacctgtgtcttactaaacatctcaaatactgatctgattcttgatttctagtcacatttctattttacattttcaaaatatgtatggaccgacttcatgtacttgtcatttttaataaccatatattacagtttttaatgtataactaaaataaattttggtcattggtacaatgggctgtttttgccactacagtttcattaacgtcaatcttaagtaagcacagtaattaagaaagaagtaatactttcacatacagcaacagaatttttatcagaatatattgtaaccctcaggtttctgttttgggtgatacatactgcaacatttgaactttctccatgtccacatttcctgttcaggggacaaaacatgtttaaaatccatttaatgcactaaggattctcaaaaggcaccagattattttttcttcaactgttttgacttttattgttgttgggtttctttcttggaatagatggggaaaaaaagaatcaagtgatgattcatggaattgagccaatgttggaaacacctctgcagtggctgagtgaacatctgagctacccggataattttcttcatattagtatcatcccacagccaacagattgaaggatcaactatttgcctgaacagaatcatccttaaatgggatttatcagagcatgtcacccttttgcttcaatcaggtttggtggaggcaacctgaccagaaacacttcgctgctgcaagccagacaggaaaaagattccatgtcagataagcaactgggctggtcttactttgcatcacctctgctttcctccactgccatcattaaacctcagctgtgacatgaaagacttaccggaccactgaacgtcttctgtaaaatataatgaagctgaaaccttt

SEQ ID NO: 182787 - DNA, 932 bp, Homo Sapiens
ttggagcctcccaaagttctaggattacagcatgagctaccatgcctggcctaaagtttatattttaaagcattattaaatggcttttcacccttttggtagagtcaaccactccaacaaaatagctatttctattttctatgtttttctagtcattgtccataggtatgcatttttctctttatgttaaaaaaattaattattgagtagatacaaaagagtattcctaaattgtatgaaaagtatgaagattcttgatgccatgaacactgctgatatctcctacccccactttgagtgcatgacctgtgtggtcctccctaattctgtagtctcctccttcacatctcccctatccacctacccaagtaacacttctctgaatttttgtgataagtatttgtgataatgatagttatttctgctgtttcttggttttcttgttttcccatatgtttgtatccctaaacaaaagattgcttagttctgcatgtttttcaactttatgtaaatgaaatcacactgcatttattcttctctgactttatttagctgaacattatgcatctgatccccatccatattgtcatgggtaactagcatttattgtcttcactgctgaacaagtagaacctattcagttcactgcccacttgtcttcccagattccatggttctggccacactagtgacttctttaaatgcatcctgctcttttgcgtctgtgcatcttgcccagggtggtctctctgcctggagtgctttttccttcaccttcttcacttgggtggatttctctctttcagcgttactgaaattttcccttctccctgacacctcacccgacttcctcatgaagttaggtctcccttcattcatcctcatctacatacattctaatttttttggaggctcgtgaaagctatgtaccc

SEQ ID NO: 182788 - DNA, 990 bp, Homo Sapiens
ttggatcatcaaaaaccatctaaaactgtgtgcagagactgttactggttttccaagttgtatatttttgagtatcttaaaatatttcatcaactttctaaaacatcaagaaaagctctctatacaaataccatggttgattttaattattttgttttccatccttttaaaaatattttctgctttgcatcccattattattttgagtttcttttcatttgtagtttgttgttcattgtgttgttttacagctaagattcatttcatacgtttgatgcttagctgaaaaattacaataaattctccaatgaaattatgtatctttatttaatgaaaatgcctgctgcgtaccaaggtatgtactagggcatctggggtaagtaaaaacaaacacatagagcctgcctggagaagctcatggtctgatggaaagataagcaagaagagttaatttctaatcaatatgataaaaaggtcagagagcagtttctgaaaaacatgtttttgagttgagtcctgaaagacaaggagatgttagtaaagcagagaagggagaattcattctagaaagatcagacagtgtgtgggaagggcagagtctgaaaagagcatgccccatttggagaagcatcaagaagcccacgtgttagaagcaccggccccatgagacaaagacacagctagagagattgactaggccatgtcggaatgtcctcttattttatacatacataagcatatagatacatatagccaaagttacctttttaatgatcttttttacccagtgtattctggaggtcgaatggtcacatatgaacatctccgagaggttgtttttggcaaaagtgaagatgagcattatcccctttggaaatcagtcattggagggatgatggctggtgttattgggccagtttttagccatccaactgacctagtgaaaggttcagatgcaaatggaaggaaaaaggaactggaaggaaaacc

SEQ ID NO: 182789 - DNA, 1450 bp, Homo Sapiens
aaagatttctaagttgactgcagagaaagaaaataggttaataaatgacataataaaaggataaatattcacaaataagtaggaagaatatgaaagtattgctgtagttcagaacagaatcactaaatgagctgtacacgtgataaatttattgtccagctaagtttatacagacctaaaatcaaggataaagcaatgaggactcttaagggagaaataggaaaagtcactgactgtagaaagaaaatgatcacttcaggaccaaacacctctgaatagaagagctacagtaaggaataagaaatgtgctcatcagctatggccaccctggaacagcaaaaggaaggagagaagaagccacgtaagaaaagtaaatttttctttagggagagaagaataaaattaatctcttactaagtcttctaaaaagtaagaagtaaataacataagaattgtattttcaatctttgactgctatggctaaaaacaactgggaacataataaatagcaaaccaggactcaacttgtagaaatacagattcaataaataattactttcatcatcaaaactagattaaaatgtgtgtattaatggaaaagagagaatgaaaatagccatcatatgagaacctctcagaagagtaaaaatatggttacaccaaatttctccaagaaaagaaagatgtaaattagatattgatgatttggagtttttaggcaaagagcaattaaagtttagaggataagagttagggaaacgatctcttaattaaacatatgagccattagcaatcttatgttgtaaaagttggaataataaattatttagaaaataatttctctagaacaaaaaggcaaaaaataaagatccatggcccaaaacattattactactattaggttttttgtttttctgttgccgttttatttctctttttggaaggtggagaagggccaccactgaagatatgacagaaaaattttagaagaccaaaactaaaagcagttcatgagaaaacaatgtacccttcaatgatgaagttactctggatgatataattttctagaatattttgctattttaggaaaataccaacatatttgttgatattggcttataacaataaatttattaacagctactcacaaattaaagaaatgaaagaagtacgaaaaacttcacagagctaattctaatatgtcttgtattcctgtttttgcctaaatgtaagaatcaatctatataaaatcacataagttctttataaaatggactccatgagtcagtaagttctaagttacatcatcaaagttatcacacagctttgacataacatttggtaacaaaactactccaataattagcaaacagataatttatagttaatctgtacatatatacgtcaatatatatgcagtaaatgcagtgtaaaattgtatataacccaa

SEQ ID NO: 182790 - DNA, 666 bp, Homo Sapiens
ttgggaagatagaaggtctctccctgtgttcctcctggaaattggtggttatgatcacgtttatgtggcttaagcgtcaagcggatcaaagggcgtgagcctggatggcgtccgtggggcctctccgtgaccctgcgtgggcggcctctgtctgtccgccgccgcccctctgcgtccagggcgctggtgacctcccccagggggccacagtcacgaccgcacggctgcagctggcctgagacccgctccgactttcaagtccacacacgggccgggtttttccaacacagaaacgcaagtgctcccctccgcccagcgtttccccaggtggcctcctggaacgccagttctgctgcagtttaggggcctgcctaggaggggaccgtggggtagaggagggagataagctctgtcccgcaagggcctgagcacctcacagcatgattctgcagtgtccccaaacctacttggttggggagcctcctgtggggctgtggccgggcccaggccgccagggacgctttgagacatggaccggccacagcagcttcagagagcatacagggagggtcgtggagcatagctgcgttgtgaggacggaaggcgggggctggacggccacacggtggaagtgcttgtcctttagcccttggccagacaggggca

SEQ ID NO: 182791 - DNA, 521 bp, Homo Sapiens
ttggatttttcccattcttcaaaaaaactgtatttcagaagaaacacatttgaggcactgtcttttggcttatagtttaaattgcatttcatcatactttgcttccaacttgctttttggcaaatgagattataaaaatgtttaatttttgtggttggaatctggatgttaaaatttaattggtaactcagtctgtgagctataatgtaatgcattcctatcaaaactaggtatctttttttcctttattttaaaataataattgcacctgacacataaacatagaccacccacaaccaaaattaaatgtttggtaagacaaatacacattggatgaccacagtaacagcaaacagggcacaaactggattcttatttcacatagacatttagattactaaagagactatgtgtaaacagtcatcattatagtactcaagacactaaaacagcttctagcaaaatatattaaagcttgcagaggccaaaaatagaaaacatctccctgtctctcccacatt

SEQ ID NO: 182792 - DNA, 1065 bp, Homo Sapiens
ttggattaaaaaaaatgattcactgtaaactcgcactagtattttttgaattcttgctggaaaataactgttactgtgggtttgaaattttctaggcagtaactatttttcccccttgggagaatggggataggtgagtttcaggagtccacggatcacattcgagcagtgcaggttgcacctgtgagtgagtgggcagcctgtcctttctctagggtgaagatgtgtataccttaggatgggatgcatgtttttaagcttcgtgtgactcttcatagatgagcgggatagaagtaggcacagcagcagatcagagcgagatggagggtcagagcgtagcagcagaagaaatgaacccgagagcccacgacatcgacctaaaggtagactcactgttttggtggcttgtgaggattcaagtgtataaaaggcagagtgagtgactctcgtcttcagtgagattgctgaggcattgagtcagaattcccgattctaccatgaacatcttgggatagttggttctgagtcaggtgggcacagctctgcacttggggtggatatggttcctgtaaggtgagaggctggtttgctgaatggccagttttccaaatggtaggaaagaatagggagctggaggtagaagaagtgtttattaaaaagaactacttatatccaagaagggtgtgtttgtagagataaagtaaatatctcttaaaatgttgtcataaacacagaatgcaaactggaccactgcacccagcctgattcctgtttttctcatagtgtttaaataccgtgtatagtgctgggacctgaactcagatctgctcaagtctgcctttcaccgaatcacatgcaggaggctgcatgcaggaggctgcagaaattagatggctgggttgctggggttcctgttgagctgccatggctcccgcccgctcccagatcttcctgccttccttcccaacaggccaccctggagaaatgtgccacgtgctcccagcccatcctggaccggatcctgcgggctatggggaaggcctaccaccctgtctgcttcacctg

SEQ ID NO: 182793 - DNA, 898 bp, Homo Sapiens
cattaaggctgttaggacaaaataaaaactcgtcgttaggctcagaaatatgcaaaacttactaaaactctacccaatccagtaagagtgcttacatctttaaaattgtcaaataggattttggtaatcactaaatttggcaaattcagaaaattgaccaataaaattggcaggctaatcctaaaaatgctgggtgcatttaaaaaaaatccctgagaaatgctgaagttatatatttataagaataagatcttttattcactgaagatattacaggaaaatatttcacaaaacaagtttttgggaaacagattggtgaattcagctagttaagacaaatagattcttcagcagtttggccttcactgagttagctgtgccacacattgaccattccttggaagttttcttggatgcatctttatcagctgcagcagccataggggagtccctggaggcatgggcagaaaatttgaatggcccttcgtgatgaaaggaaggcagtcacctgaaaaggtatgaggaagagtttgtttctctgatcaaaccttcagagtttccacagcagagcagaaatataacttctgattgcagccatccttaggaccctgcatcaacccgggagcaaattactgagttatttctttttccgtgcctgattttattaaacatttatttacttagagaaaaatcatcatattccttataagagtgaaataattatcaatattttgaatctatgtttagaaataaatattttaatttgtattttaaatcaacccctatagggcaggaatttatgtagcatcttctgcatctgctatacaatgggctttattttatagattaccagttatgtaacttagattcctaaaactgtatacagataactaatttt

SEQ ID NO: 182794 - DNA, 663 bp, Homo Sapiens
ctttgtacaaaaaagttggctcagcctttgtctcaacgaggggcgtaacatttccttacagtcaagccccatcaactagaagtgcttattacttttaggattaaaaaagtaataacagactttgacttaatactctgtcttttcagaggcaaagtgggtgggtagaggggagctttaaaaatagaagtacaaaacaacatcctggaaacatatgaccccagatggaataatgtcacattccccagtgcagataatgggctgctgctggctctgtggtgtctgtctgcagaagatttgctcagtcaaggaaattcaagtggtgagacctttccaccatgggtggtaagagaaacctgccttcaccaaaatctctgaaggggaaagaagtggagagaaaggtttgcttcacttcggggactgcagtttgagaaataaaagggatacagagatatctgcactttgtagaaagggcaagattatttgcttatatctgaagggaggtgggtggttttgctggatgtttggtctgaaagagttacttttgataaagttaatctaattgtagttatattttctgtgtgcttttttttaattactaagaaaaaaattggtgagttcagtagctttggtattatgagtgcaaatcataatagctccaatgtg

SEQ ID NO: 182795 - DNA, 1202 bp, Homo Sapiens
  misc_feature (866)..(902): n is a, c, g, or t
  misc_feature (1007)..(1058): n is a, c, g, or t
gctaaaatgttacatgctataaaactacttcagatttataatttggtacttcaaaaatatgacttttaaggaacccacttataactgttttgtcttcttaaaacgagacattacagggcacatagggacttcaaaatagagaggtgtacaatgccctcagtttcccatgcagtttgttggctgttagggtgcattccagcacttcttcaaccacccaaagctggctggtcagacagagatgtggcctttactgtattacgtgtcaaattaatctcagtagcttttaagacacagtgaggaaagtgtactatgtgttgttgggaaattcctcccctcttaatgttgaaaatgatgtaggcaacaagtggatttttaaaaaatatttaatgtatggtaagtccatgcaatggatactatatagccatttaaaaaccacattttcaaagaaattttaatgacaaagtaatattctcactggatttcaagtaaaaaaagcaggatacaaaactgtataggtagtttgatcccagttctatatacatatatctgtggtgtgtatgtgtacaatttgaataaaaaactgaaatatttcaaggtgaattattagttatctttatatggtaagattctaagacagttttggcttacttattttacccgtacctgaaacatttccatgcaaagcaatagcatctttggcactggaaaaccttcttcaaaaagcatatttcaatgatattacatgctattggcatgtgaccatttctgaagcatttctaaaacaagagaatccctttctgagatgtatgtctactaagaaatgtgtggagaacattttgtagccagaatgtgactgctaatggtannnnnnnnnnnnnnnnnnnnnnnnnnnnnnnnnnnnncttccaatatataatattaagaatatgtaggatgcactaagacactatgcaaaatgtcttattacattctcttattaggtcctaattacacccaatatgatagcnnnnnnnnnnnnnnnnnnnnnnnnnnnnnnnnnnnnnnnnnnnnnnnnnnnntgcactcacctagacaacactatacatagctagtgttctgtccaaagctcctaccctcaacttgtattgccagtcataagactgagcctggctcactctctctacagaaatcactttggtgcttacagtctaaaagtaagccaa

SEQ ID NO: 182796 - DNA, 1636 bp, Homo Sapiens
tctctttcattaggtaaattgctttgaatgacttctttcatgttttactgttatatacctttatattttatctctcaagcatttgttaatacgccacaagctatcctatatgtgctttttttatacttagcaatgaacacaaaatgcattcattaacaaataattataccaaatcaacagcctcttctaaaattaaaggaaaggggtctgaaaatgttgcttgtgactaagcaggttacgtcacacatggaatttagattctgttccaaatctgaggacagaagcacacaccttagcaggaccccttattccaatcacaaaaagcagaaccagtcccaggagtgtctgtgtttgaactgtgcttgatctgggatactttcaaactgaatcagaggtaactcatctgaattatcaaacaaaactaattatataatcataatctcctaagataaaagtatgggttttcccttaatacatgaacttttaagatcaggcctcttacttccccagttggatttttgcatactcagacataaggtcaccaccctgtctttggaatgacattttgtgtttttgtcctatgactcacccatgcttcttgctgttccttccattctggacacaaatgaaggctcacaatttgccctaaggcatgtttcaaaagcagctttacagtgattcactgccctttggtccttcagagtatcaaagcacatctttaaatcatgagcaaaaaaaatgagcacatctttaaatcatgagacttcaacaaaatgcagtcataccattaattaactcataattcacaagaatcattgctcaactttcatttttacttagcagtcattacttcccacaagaaatgtttttaagagtctgaactaagagtgaggcactgtgataaatccaagaggtcgtttcctaacatctagggtttaagtcactgtcatggccactttatgagcagaaattccattttggcaaaaatacttgttaacatggtacattttctttgaattgcattagttttgaattttaattctaatctattaataagctcattttcattttattgttataaaaaaagtgaaagcccaagaaatttacccgattttatatgcagacagatgtaaatgaaatctcatacaatcaacttgtttctcctaaaagatgtgaaatatttaagacataactatccatctgaatttccacattttataggtaatctcaaaattgagattaatccaaaatcatgagtctcttagtgaaagcatcaagaacaagtttcttgactctaacatagaggacttttaactacattgtctcttcctaaccgctacaaaaatgtgagaccctcataactaacttatcaaacattagatactctgtaaatatatccgatttttttaaaagactcctatgattcaaaaggatgaataaattaatgaaactttttacagacttctgtattgacaattctgtagtgaagataagtagcaaatattttccatcagtctaaacagaagaggcaagcagagggaaacttcagcttttgagggaaagtgttgatgcgagaatgtaagcagttcactctcatacaaacaacggctttgtctgccatggaagctagtgccaa

SEQ ID NO: 182797 - DNA, 1281 bp, Homo Sapiens
ttggagacagtaacgaaaaatgctggcactgggattctctcccttcccagacctacctgctggtatttcctgggaccttgaccctgccccaccccctcagccgtgcccatctctgcagactcccagatcacatctgggctgatgggctggcccaggcctgtccctcccttcttgcccccagttctgggctccacctctgccctcttctgtgctgtcccattagggaagtcccttggcctgtctatttttcagttcccaattagaagtctagaacctgacaactccaggagttcttgggaggaccagtacaacgttctaaaaagcctgagacgccttacaaaaagcaagtatcatttggagtacaattcctaatctgttcatgtcctgctgaaggagggaaggagggagaggaaggcaggggagttgatgcattcatataacaaacactgctgggtgtctgggtgcccagagcaaagctgggccaggccttcaccagatcaagccccacagaccagctggtgcccatgcgctgctggtggtttggggcctcctgttcctcctctagctgggagtaatcacagttgtctgacctgattccaacttaaggtccccactctcttgccccatcaagaatccctgattatttacttttccctagaaaatctggggaaattcccacattttaattttgcagcagaatcttttgagcagcttttggaaccacagtgtttgccaagataagagtttgagaatccagcagccctgggtgcctggctgaatttggtttcctgcatgtgctgggtgtgggcggggccacgcacaggccctgcatgggaggactcctcaccccaggcctgtggtgctgcagacaaccgtctcctgtctacactgcgacccagccacaagctgtggggtctcagtggcctgggggaaagcagctccactctcctgcccttcctggctgcccctttgggttccagccggggtcacgtccagcctccactgggaaaccagtgactgaggcctggacccagaggtggaccaggcatctcctggccacctgtgacctgggaagaagcgagtcagtggcccgttcaacctgctctgcagctgctataaatagcctccctgtttctagaggaggtaagaagtgtttatcttctaaaaaccagacgtttcctgatgctctgagcgttactcagtgctacagatgagatgcacacgtccccactatgttctgtcttgagaaggggacaagagaaagaggaaagagcactgtac

SEQ ID NO: 182798 - DNA, 1137 bp, Homo Sapiens
ccacacgtcataagtggcttccttggtgggcatcgctgctctagctgatggccagagatgactgattgctctatttagccacagagctaggatgtaagtcctagtggggctggctcatttgtgagtggagatttaagacatggatactctaatgcacattagaaaatttaatatattgcatgggattacaggtgtgagccactgtgcccagcctgttacctcatttaaaacaaattttgcacatctgaacagcctaaaattgtaatgtgataagtggggtaggagtggggtgggcgtagtgggattttgaatcaatgaaggcccttgttcttgtggcatccttttgcagtgattccctgccaggcaaggcagtaaacctgggattgcctgcccaggactgtaatcacattgatgtcccagcgccatggagtatgtaatgaatgaactgccagcagaactactcactaagaactactccctgtttgtgaggattgtacctgttgagagaagttgcaaaaagaattagtcaaaagaattagtcaaaatttgtcctctgacctaggtctgaaggacatttaacacattgattgttctcttcatccagcctttgagccctatgagttagtgcccttagcctttgagtcccacaggtatggaggagctacctgtggggacctgagccatcactattcctgcttcaagttacactggtgcctctcactagcactgctctgaaaagccagctggaaaaatcaatgcatttgagtacataaattctttggctccaaagaaatgccatagcaatattgcttttaattcagttttgtttagatgttagaattggtatttgttcttgctttttggttgcgatggagttatatactaagttacttatactaaggcattagtagtctcatatctgaggagcaattgtatttttagttcagctaaattaatgcctctttttaaatactaacttgtactacttttgtggctgtgaatggtatcttttattgaactgaggcagcttttaaaagacttgcctgatcatttagagcactcccattgaggttaaattagacttgaatctgtaatgattctcgtaactgttcctggtgtgtgtccagcacaatgttg

SEQ ID NO: 182799 - DNA, 1230 bp, Homo Sapiens
  misc_feature (85)..(93): n is a, c, g, or t
  misc_feature (296)..(485): n is a, c, g, or t
tgagccaccatgcccagcctgtgctaagttcttaacgtgcattttatcattttttgttcacactaccctgatgatggccccatannnnnnnnnaccaccttccccttgcttactattttccaacatatcaaagtttacatttacaaaattgtattacttatcagaataaaaaattgcatagcttcttctgtcattagcggtacctgtaaggataaatacttcaggtctttatttgagttggtttttatgtgatcatatgcagtataagagaatatcggtaggctgggtgcagtggnnnnnnnnnnnnnnnnnnnnnnnnnnnnnnnnnnnnnnnnnnnnnnnnnnnnnnnnnnnnnnnnnnnnnnnnnnnnnnnnnnnnnnnnnnnnnnnnnnnnnnnnnnnnnnnnnnnnnnnnnnnnnnnnnnnnnnnnnnnnnnnnnnnnnnnnnnnnnnnnnnnnnnnnnnnnnnnnnnnnnnnnnnnnnncccaactcacttaaaggcatcaaaaaacttaataaagggataaatatgctacattcaagatactctattgtaaataggtaaaaattttcctcatttacttatgaagtcattttttaaaaacttgctcaaaatgattctaaatgttaatgggaaaaataagcacatgagactagccaggcaaatgctagacaaacagtaatgatgaggttttggggctgtggattttctattttacacatttccatattttcaagtatgtattttgtaattagagtaacaagaaatgaaacatcagcaggaggtgtaattaatagtgatctatccactaaaaagactgaggtggaaaggaaggatataaagattacattactctgaagaagaaatattactattgactatacagaaatattatcaaggaatactgattatcaaggaatattacaaacaagtgtatgccaacaatttgataacatgggtgaaatcaacaaacatctacaaagacacaaactactaaggctgaagaagaaatgcaaaaatctgaatagacttatgaaaagtgaggagatcaacaaacttctggaaattcacaaactaccagggctgattgaagaagaaatggaaaaatctgactaggtctataaaagtaaagagattgggattagtaatttaaaacacttctcacaaagaaaatgaaaagcccaggcctagaggccatcactggtgaactctacccaacattaaagaa

SEQ ID NO: 182800 - DNA, 1682 bp, Homo Sapiens
ttggcccttttatcatgcttctctgagattttcacagaacaaccctgcaatttgattttgtttgataattttgctttttggcttttcagtgaggactctattttccattggaactgactcctttggggataataagctttcacttaaaagaacattccattagatagttctaacttcaatgaacctaaaagtggcttcttaatttgaataatctggataacttttgcaaatgggtcaaaacagcacaagtatcaacaatcacgtatgtactgagtaatatttgccctccagttagcaaagtcaagaaatgtctaactctggcacacagcactggttttaactactctttagttcatctttgccttccaaattggttgaaaatggcaagcttagaatggaatgcatattaataacagaaccacttaatgttttaaaatattcataccttgagattctttttgagagaaaaaagaaatcttaacatccaattctagttgttttggcttttcacatatgctagacatgaaaaaggcagttacaaaagtgaaatccgattggaagtcagtggtgtccgccattgagccgtgctaaatgtcgtgtcacaaaaggagtttgtgaaaacaggatgagtagaaaatgttatactgttgtttctatcgtggcaccgctttcttataaattccatttgctttttgtcatctgaactgttacaaccatgggaaacctcagtccatatttttaaaagcactatatacttacaggaaaaaccgacttatgccttcattgaaaaaatgttgaagttaatatcccaaatgtttaatgagcatgttttagaatatttacagctaaagtctgtcactttagggatttgacaaaacttgagactgcctgccaccgaagagggaccaggcagaatcttctcagccttgtaaccagcgttaaaaaaatataaggggcttgatgagatcctagatctgctccttttctcctaggtgcctgggtaactcctggggaaagcatcatattaagtccttttcaagcaaggtgtgtgattttgaccaatgaattgagctgatatgtgattttgaccaatgaattgtgcatctatttaaaaattaccaagtgtatcttgactcttgagtggacagtcaaggcaaagtttacttaggaaatgtaaagtatggagtgttttaaaaaattcaaattgagtttattcactgttggaggaattgaattctattgcctccctcatttccattatgttcattgttacaattgtgctgctctgttctcattgtgatgcttagttctcgtgtagaactgagtgctacattgtgattagaaactggagttgtgcttgagtcagtcctggaaaacaggacccatttttaagaagaacggaacataccactttggcattctggctgaccctaatttctgcagagttccttggtgttaaaatcatttgaggtcatagttgctgcttatggtttatatacacaccatctgctgctctaagttcacatcctctcaaagcatgcaagtgcttgaaatttaaatatttcccagatctaaacaacttgtgactacctaagaaatgcttgaacaaataagaaacagcactgtggaataaaatataccattgtgaacatatctgatgctgcatgaatgtaaagttcctt

SEQ ID NO: 182801 - DNA, 1468 bp, Homo Sapiens
  misc_feature (302)..(379): n is a, c, g, or t
  misc_feature (1217)..(1251): n is a, c, g, or t
tttttcagaccaataacaaatattaaagtgtctcaattttttcctggacttttttctgttataaagtgcatttattttttgttgtcaaagtaatgttgttaccctagtgtaacgtctgtgtgacataagtaaatttcttccccaccttaactctggttatctttaggaaacgggatgtctgtggtcaaaagctccccatcatgacaccaaaccagctaagagtggtgggaaccaagatggcagctcacttgacctctgaagaacctctaacttcattataatctaatttccatgctaaatgnnnnnnnnnnnnnnnnnnnnnnnnnnnnnnnnnnnnnnnnnnnnnnnnnnnnnnnnnnnnnnnnnnnnnnnnnnnnnngacaaaaactctggttctgagaagttatctacctaattcccagaaaagacatgaatacttttccccttgcttttaattccccaaccccttcattaaagatgctccatatctgtgacttcctggctctcatggggaatgtcctatatttgtgatttcttggctgtcatagggggatgccctatccctcatgggctgagaagttgatttgtgagccaggctcccacatctcagttctatgggcatcaaataaagcctgcactgctagatgcacactttcaattttgtgtattggctttgtggcaccaaataggaaaatactccattttaggggggattagccttgtcagtaatgtcataaagggaaaaatttaatgtttatagtaacacaacactaacacagctattttaatttttgtatgtaatcttccatgctctgcctactttgagacatctttttacataattataatcacagagtacattagcagttctttttgtcattttcccacactgttagtctctattatttattaatatattctaccagtttgagaatttgcttaataatattccagacgttcaggttagaccttcaagtttccagattgactgtggtggtggtcactatagacaatatttctatggaattaaaaaattctttatagttatttctttggaatgagattatcaaggcaaagattcttgctattaattagccaggtatagtgatgtataactgtggtcccagctactccagaggctgaggtgggaggaccgcttgagcccaggaggtctagcctgtaagtgagcctgggtgacacagtgagaccctatctcnnnnnnnnnnnnnnnnnnnnnnnnnnnnnnnnnnnccagaccgttgctatgaaatattattttttaacctatgtcaagggtgtagtaagtttggaagcaagtgaaaattagagaccaatgtaatgtgaagccagcagtgtctcttttgaatagaataaaactccctgccctaaccttcacaccagaccagtgttcaggcaccgcccatacacatacgtgtgctatgccaatgactggctgcagggaagccaa

SEQ ID NO: 182802 - DNA, 362 bp, Homo Sapiens
ttgggggtataatggttgccatggaactggggcttgtttgatgacctggggctgggtgggcttctgagagcctttatagctgattgccttttgggagaggggaggtgggagccccaccctgtctcatgagtcaccccaaaggtgcatgggcaggcaggtgctggggaatcggctactccccagagcttggcgtggccatccctgtggcccctctgggagtctggagcccattccctcacactggtactcactgcagctggggacatctgcactaggaagacaggacacggcatggaagctggcctctgcccagaagccatgacattctggtcaccagcctgatgctataaaacgagtgtcac

SEQ ID NO: 182803 - DNA, 1611 bp, Homo Sapiens
ttggtaagaggagactattttgactcttgaagcgggagtactgggagaatcataactatttcatgacagaaccgatttttaatatactctacccttgagatgattgtgggaaaggtatttggttactgcaggagaaactgtaaactctctgtgaagataaggaccatgtctgttttgctcatcatgcggttcgtggtacctagcacttgtatgcttttagtgagtgatcataatggaattctaattgttgaattctcatagagagaattagtgattaaatgccagtgaagtattaaggggatgttcaacatcttcaacatcttttttctccacatatttatttacataagaaatgcccatagagtgtgtggtatcagctatcataagaattgtgttaatcatttgagaatgtcaaattttggagttggttattttagaagtgggaattggagtaagcccatattaacagaatccacaaagggattaccttcaaaaggttttctggaaaataatgtaataatgaactaaggatacagggcagaagaatatttaggaaataatttaccatataatagttaacattcatgtatacacttagtaaatgtttgtggttcacttaccttggaacaggctctctgataggcccattaggctgtaagtataaaaggcaagaacagtgatcaatttacttttaatattagttgaatatgtatttgtgtaaatatttatacatattatgcatatttatataaaatgaatgatggtagaaagtttgtgcttggtggtaaagacacacaaacacataattttaatgttttggaaaattcagtaccagaggcctaccatgaattttaacatgtatcttaccccttggttctgggaatcagatcctttgagttgtatcttttgtcatttatttttagaatgctatgtaatattttgttatctatgaaatagtggcactaaagatatatttcaagtttttaaaaatgagcttattttgcaactgcaaccacgaaagagtaatgaaaatctttttatttgaagaagtcatattagaaaacaagttggaaaacattttgaagaaggtattaattttttagccgtggcaataatgtagaataaaagaacagttttcagctttctgctaattttccaaaaattgtaataaaagaattattccctttttttctctgttacataacaaaataaaactttagaataatatggctctactttaggagtattttaattgggcttctgataagtatccttttatataagaaatttcctgttatttaaaatttataacagctttggctgctaaattttatcaaaactttttgggacatatattgatacaaccatatggttttcctgcttacttaataatttacagaatatcaccaattcctgttaaactactcttatatttctgggctaaccactgcttgtcatagtgtgtttactcttttaattttcaacttgctttgacttgccgagattttgtttaggattattttaaatgtattcaaaagtatggttgccctttagatctttggggggtgctgtcttgacagttttagtagtagagcaactttttatttttaa

SEQ ID NO: 182804 - DNA, 886 bp, Homo Sapiens
ttgggtcttggcttcccgggggagggctgttctcccaggcactgagattgcccatgggccttctcgttgcagggaggcggctgggatagaggccagtcccaaacacctgagcctcactgaggggaaggcctgggcttggagatggggtgcgcaggagtggctggctttgccttgttctattaggcgagtgattttcagagacaaaggtccaagttaggagacgtaattactcagtgctttgaagggacatccaaggtgctcactcttagccatagccgttggtttcctggatgctgactgtgaagattctaaagtgcttcctagggtgggcggtggtggcaggaggccttggacggagtccaggccagacccagcctcctgtttaataggctgagcccaagcgtccctcagatgcgaatccaacagccttggtgagttgtaagatttcatggaaactttccctgacttctgtctcccccttgctccccattacctgggaaaggcagctttgtgggccatgtgtcccggaagggcctgggctggctgtggcccagtgctcaggaccagccatcttggccctcacagcgccctgcccagttggtgtaatatttgtcttcaagccattgttggagcaggcaggcaaagggggctttctgaggatccaacgtgtgccagccactgggatacaaagacaggcctggttcctagctgtggggctgggaagggtatctgacatcaatggtggcacctggcagaggacacacagacaacagcggcagcatgggctgcagtaaatgttgcagaagcacctaaaggttgagcagaaaggaggtaggaaacctggacatggcctgccagcagctgaaaagcccccctgaaatcctgg

SEQ ID NO: 182805 - DNA, 1627 bp, Homo Sapiens
caatttataataataataaccaggaattaattaaatgtggaacttctttctgtgacaaaaacaaagaggagcaaacttctttacgtacagaatgcattatctttctgatcttagcctctagtacttagattttgatgaccttcagacacttttccaaaaccatatgatatgatacacatactccaagaaataaaggaaagataaatagaaaactctacaaggagaatgcagatttcttccctcgccaaccgtagtgctgtagtaattgtggcagatactggggccatcctcctctaacttcaattccacactccacaaatgactagttgtgagatcctaggcatgttagtaaacctttctctgtgccttggtttcctcacctgtaaaatgaagaaagcaatggtaacaatttcacaagattgtctgaggaagaaattagttaacatatataaaatacttagaagagtacctggcacatggttggcttcccagctgggctagctgagatcattactattacatcaatggcagccatggttgccaggccctctcctaccccaactgtccctgctattcctgttatatttccagtaagtttaaagaactagatttttccatgagtacagttagtcctggataagaatacccagacaaccaaatggtaaatactgtagcctgggcgggggatggtaattctggttttaaacttttatgggttatatatgccaaaaaaatcatttactacaggtaggcaaataaatactgagttctcactgactaaggccaggcaacggtttactgctgcagagaactacacagaaatctacctttccactcacaaaagcattctgtccttcccgtctctctccatttccactacaatgccgagtgaagctgttcagtgttgaacatgtactcaataagcaacacagaccagaatggtaagtgtcctgtgcatgccatgtgctcactgagtttcattatcagcaatgttgtttttccacccactcaaccaaggtttctgaaatttaacacacaaaacaatgggtaattgcaaggaatgccacatcttttccatgggctctgtccgcagttcatgcagcgaatactagactttgccagaaggtactattactgtcaacttatagaaagtgactaaactgacaacaacaaaaaaacccactttattttcaccctttcatatacaataggtttgtaaccctaaaactaagagacagtttataaagtaatcaaaactccttcatatgtatcaattagccttttcttaagggattatccaggtggaataaaactctgtcacccatttaataacacattataaatgtattctatgcttttatttttgtctgtgcatgtatgtatacatgcacagaaatggaccatgagttggaaactcagagttctattttgctcaggagaaataaaaaatattctcacaattctatttgccaaggcagcctggtttatttatgaaaacttggccacaaatggtcagaataaaggcatttcaatggggctgtctctttattcctttttctctgctcttttctcactctccttaagaagcgtctccggtgcatgcttggtttctaaaggtctgatccaa

SEQ ID NO: 182806 - DNA, 1667 bp, Homo Sapiens
ttggctgatctttaattccaagatcgtactaaaaagcattggtctaagattgtggttatgtggttatggccatttcaagtctccccagccaaccgggggccaccataacattggtggacatgtgttccgcttggcttttctacacactggatggagtgaagaacagaaagggattgcttcagattccttaatcttggttttgctgtgatggcagactataggaatcatcagtaaatgaaagagggtgggagggaagggaatgaagcttcatgaattactctttgtcctcccagatctgatgatgatcccccttgtaacttgaaccatttccatctagcttctcagggcagcaaggagcttgttaacatcaccagctgaccatgtgtctccttttctcaactccatttccaacttcgtgctgaagaaaaacgagaacctagcgtgcattctgtgaagaaacaggaagatggttgggaagttggatgatgcatgaaaaatataataggtgaaaagaggacagaggtggttaactcactggcgccggcgttattttggtgcgtccattgccgacaatggatgtcgttccgggaaaatccctactcctggcgagaaaggattaagtgagctactttttctatacctatatacacaggaccactgccttgactccacaaggcttacacattttgactcctaaagtagacctcaaccagaaacatcacctagcacattgccacttgtgagcatgtattcattttcatgtgaaaatttactaggctacattttcagcagggatatgtgcatatatttctgtttgcagaagaaattgttgcatatcacccttcatgctgaaaatataccctagacttcatagggcaaaacagctggttaccagtggtgactaagtgtaacttgactggaatatcttcattcatttggatcataagaagaggaggtaaggttcctgtgaacttggcaatttcatttgccattaaacaccgagagattgtaatggttagtgattccagagcctctcttataaacacttagattataggatgtgcatttctccttagaatgaagtctgggtatttccatttgcatctggatttagatgatttagggacaaaattacctacatgtgataagttgaactcttcctaatgactattcttattcttctcttatttcatctttatctcaagacattatctttaattcagcaaatcaagtatttccctagaaagctatgtattaaaactctctatgaaaagttaaaataaaacatagagttgcctaaactgagaagttttgagtcactgtttggaatttcactccctcgctaatattgtatgtgaaatctgctgtgcaacatttgaaaatgaaattatgtttcctggatttctgtgataatttttgaattcttactagagtaagattattctgtatccataaggattaatattacttatcctttaacaaaattagaattgcccctaaagaatgctgttttagctacagcaacattgaaatttttaaataaatgtctcgtttggtagaaacaaaaatggtctaaaatttattggtccattttttaaccaaatactttcatctaaatcaagggttggccaaatctgccccactgtctgtttttgtaaataaaattt

SEQ ID NO: 182807 - DNA, 1473 bp, Homo Sapiens
  misc_feature (271)..(279): n is a, c, g, or t
  misc_feature (853)..(918): n is a, c, g, or t
ttggaggtgatctgcccaccctggcctccccaaagtgccaggattccaggcatgagccaccacgcccggcctgtattacaatttaaccaatggcagaagtgcgggttggggaggattccctggatgagtgtgaaatagaaaatgctgaggtgttgtggatgtgtttttttctttcttttggacttcatgtgtatatgtttttaggcaaatcatgcataatccaaagacttcaggcctgaatatgtcctgtaagtgttatcattttaaaagnnnnnnnnnaagtgaagaaactaacattttaataagaattttgggatctgtgaaagtctgtgtcctttgagtgtgtgcacaaatataaaatgtgtacaactgtactaaataatttcacaaatttagttttgaagtttagtttcttgaagtaatactaagtaacttctgtaaataaaacttctgggtttttagaatacgattgtatatttgctcaacaagcagtgagtgtttattatgtactaggcaccttgctagccatttcaggctttcttcagcatctgtggttgttctctggccaactatccttttctttttagtcatttaatatttgtgcccttgagggctctctcattattcttttgtctgtttatcccctcttgatattgtccctgagtggtaacacctgctctgttgactacatttacattcatataccaatgatatccatagctttaataagttgactgctccgtggttccctgtggatgtcatgtaagtaccaaaaataacaagtcttcgaagtgttgcctacctcctcatggtgtcatcattcaccagtttcagagtgtgggtgatagctctnnnnnnnnnnnnnnnnnnnnnnnnnnnnnnnnnnnnnnnnnnnnnnnnnnnnnnnnnnnnnnnnnnaaccagaggacttttctgcttttgtttttcttttaggaggtaataaaaccgtgaatttatttaaatgctaatgtgtaggatttacttgagacaggaaaattggatgggagagtaaaggagtgtgatgatttgagtttcttgagatgacaggagttagtgagatttagaacatagattgggcttttttatataataaggaataatttctttgtataggaaagaataggggttaattatagaaataggtgtgtctctttaatatttatacttagaatttggggtaatacttggctagtggcttttggttggttgttaagtaggaaggtcatttgagattggcatgagaaagagaaaatgagagagaaacttcgggggagtaaagagggtttaaaataagttattttaaaagtaagatattgaaataatccccttgtcacttaaaggtctttaactgggccactggatgggcttttagggttttataaaactcttatactttgtatacagaagtttatttctgttttctgtttctcagaacatttgctcattcataac

SEQ ID NO: 182808 - DNA, 187 bp, Homo Sapiens
ggaaatcttatctaaaaagtagcaagtgctggaaaaagggcctggggggcgggggtggttcttgtcgaagcccccaggctcctgtctcagggatgaatgtggcgtctcattgggattcttctcttgcccgaaagggctgcttttgaggactatcaatactggggagtgggggtgaagccggacctca

SEQ ID NO: 182809 - DNA, 1024 bp, Homo Sapiens
ttgggcatccccctgtatatgtgtgcttctgtatagatgatccttgtattgaacactctattttctcccatttttttctttcagggacaattcaagctttcgaaatacaaaaatcacattgtgagagtacacaagctggcaataatccttttctgtatgtgtgtgtttgtccgaaatggatgggaggcctccagccagtccttccattgctcactgaagggacgtccctgagccgtgcgctctccttttgcactcattcctggaggacggattccgctagacaccctccagcatcgctgactttataaagcggaaaaacggaaaacgtgactttgtaatagacaaacattgttttttaatggggttccatgggggggcgttcagcctttctgtttgctgtgtgctgtccagatgcctcttgggcgtcctgttgttctcttcccgtgttgtacgaagggtaccgtggccacgtgtacatgccagagctgttgatgagagttaccagtattatgaatgtctgtgcatccaggaaaagtgttctgttggagagtcccaaaatagctgtaaatgctctcttctagctctgccattaaattattgggacattttgtttctttctctcccctcctccaagcccaccactttctgaagctgtgttactgatgtgatgactgtccaggattttgtatcatcccctgccttatgccctccggtctcctctcctgtgggactctcccttcttagcacagctgcacttagaattgtaatccagtggctctcactggtttcactgaggcagcttagagggaatgccttagtaaactgaactggagcagaatctagtttgatttaggagctagattataatctagggttccaagtacagaatttggagctaagactgtgactgaaatcattttcccatattaagcagaccctggtgtgtcaggcctgtttcccataatgagcagagccctgtgtgcaattctgtttctggcatgtcccctcattgaaggaagggaaa

SEQ ID NO: 182810 - DNA, 901 bp, Homo Sapiens
ttggcaaagtgttgggattacaggcgtgagccaccactgcacctagccttgtgacttttattctatgtcctgtgtctgggtcctatgtcctgaattttccctcaaattctgagtcacactttatgttacgttaatatgtcctgggctctaccctgctctggttttatatttctggtgctatattctgggtcttgcccctcatcctgtgcttatcaagttgtctaggcctcaccagtgtccctactgtaggaaatgtggtcctcttaacagctctgctctgtttcagtaactctctgtcctggtatggtggggaatcctacatccagagcatggagccaggggctaagtgctttgcagtccgctctctgggctgggtagaggtacctgaagaggacctggcaccggggaagagcagtattgcagtcaataactgtatccagcagctggcccagacccgcagccggagccagcctccagatggtgcctggggtgagggccagaacatgctgatgatcctgaagaaggatgccatgagcctagtgaatcccctggaccacagtctgatccactgccagcctctggtgcacatccgtgtgtggggcgtggggagctccaagggccggtgaggatgcctacatcccccaagcaagagctacttctccctcccggctgcaggctgtgatccccactgatgctgatccccagtacttgaacccctggacacagatcctctgatgtggacccaggactgcttcccctgcctggtccagccctggttggggaaggtgggcccagctcagcaggacagtttggggagagtccgagaggctgggctgattcccttctgtgctcccacatgcttccggaacagtgacagttgagtgaaaaccaggtatcctga

SEQ ID NO: 182811 - DNA, 1398 bp, Homo Sapiens
  misc_feature (449)..(476): n is a, c, g, or t
ttggctcatttgaatctgcaacagctgggggtggggaggagtagtcacaagattaccagttggcaggtaagatgcccaggaactggagggtaacccccttgcctaaggccacacagctggtgggagcccacattttaacccattgtgtcttatcagccctagtaaagtaagaagatccattgtaagacattatgaagaccttcaattgttatcagtagcatcttaatgagaagcagaatagtttaagtgttaaggtttgcctgggtttcaattggaggtttattacttagtgatcaaattactgaccttttctatgtctcagcttcctcttctatcatgaaggcacactttgtacagttgatgtgaaaactaaacaagtttattcagtaaaggtctctcaacaaatgttagttttgattcctgagaaggtcaagatttagacagggcgnnnnnnnnnnnnnnnnnnnnnnnnnnnnattttctctttaaaacacatgaaagtgccaaaggagagaatgacaagaaatttaaagacctaaattggctttattgtgattctagaattgagcaacacttcgttccacaaaacaaacagaataggttttccagtgagctgagcagaggaggttggctttataaacaggactgaagaaaccagaagcaacaaagtgtgtactcattacatttagagagaacactagaaaaataactgattagttaacatccggttactttaggctgcctttttttgtgctaaggattaaagccgagagaacttcatgatcataccagttgacaatttaatcctgcttatttgagaaattgactctctcttgatttctcaggaagtcagatgacaacttagttttgtcgatggctgttgtaaaacctcggttcttgtctccttagtttaaaagaaattaaacaagagacacacagcaaaggagatgcagcatggagcgatttgttgcaaaagaggcaggatattctgaaagtgacgtgcagaatagacagtacactctgagacaggattcagggcgggctgctcgtgaggatgggacagcattgacttactggggagactcccttgatgacagccttacacggttattcataaggaggcaggaagaggcgctagcagtaagcatgttctgggtggtcttcggggtgcacatgtgcagcagctgtacctgcttgcttgtatgttacatgtctcattaacatctgaaatctccacccgggagtgtgttttttactattataatgagcaaaggttcagtctgaggacaggtaaaatcaaaatgtgcaccctcttacgggggaatttcttactggagctagtttggcttgagtgaactggactacagtgtgaatgctggcgcttatcgtgttgaccct

SEQ ID NO: 182812 - DNA, 1253 bp, Homo Sapiens
  misc_feature (392)..(513): n is a, c, g, or t
ttgggtgtgggtctttctttttcttaggactgtgttttgttaccataaggcgtttcactctcttctgtgatctcttcgtattttctgctctctgtccgagattgtaacaatgtgaaatccagagagagtgctgatggagtttgcaatctgtctttctacttacaagtaatttgaaatttataatattctgttttctagtaatactgaagccctgtcactgttttatttctcttcttgtgattatgcatatgttttggagattatttggggaaatttagctataggctgccgtctttatcctatggtaaccaaaaattcccaaaatttagatgtttgtgtactaaaaaataaggaatcctgggaggttgcataacctaatgctgagaataaannnnnnnnnnnnnnnnnnnnnnnnnnnnnnnnnnnnnnnnnnnnnnnnnnnnnnnnnnnnnnnnnnnnnnnnnnnnnnnnnnnnnnnnnnnnnnnnnnnnnnnnnnnnnnnnnnnnnnnnnntttataaggattattttgaaggttgtgtaaggacttaatagataacctggcatggtaagtacccacttatactgttattatcattctcatcattgtttttaatattatcaccaccaacaatatctgcatttaaaaattgcagaatttaaattgtaattgatcttggttgaggctagtgctcaatagttgtaaataatgagatatagaaagttgaaatggaggggtggaatagtaagtagtaaccattttgtgtcacaaatatttttgagagtgtaataaaaactcttctctgtcctctcctctgtgtacaagaactcttcttttacataggatttcaaaagattaattaggcaaacttgaagtttagtgataaaattaagattactaatgtttaaagaataagaagagaaagaaaacagggctcgtgaaaagatctttgtcacatataagaaattgctgaaataatagatctaaaattcagttttccaatatttcctttaaaatgttctgttttgagatacataacttttaagtgtaattgaaaacattatctctaagtgtattgtgttattattaattgcagtttttatttacaactttcaacacaaactgatagcttatcatttttaagatcattttattttcctttatcatagttcagggttttttcatagtagttttcattaacaaactttttaaatttaaaaaaatctgtttatttgtaaatatgtctgactggc

SEQ ID NO: 182813 - DNA, 874 bp, Homo Sapiens
ttggccaaggagctttccagggcacatgtcataaaattagagccaactgcagagctgtaagggaacttttagagatgaacttcttcagcctccatattttacagaaggaaactgaatcccagaaggagaaattgccgttctcaaggctccctggatgggtaataacacagatatgagtaggtcacataaagtatatcttttttaaaaaaaagaaattcaattatgtcttatttggggggtatatttcccagaagatatttttctggcatgtggtctgtaaacacagcatgattcatattttttatgtttcatgctactcattttgtttaattaccaacaaacatggggactttggctttttgacttatttgcaacaagcatgaaattgttaaatttaccttttatcaattgtaatcatcctatgccaacatattatcataaattcatagaaatatttttaaaaataaataacagacattgaaatccaattcttagataatactcccagaacagccaatggtaaatgccctatacttgagtcttacttagatgctgtggtaatgcaccattttagaagatgaatgatactgctatttctcttcagggaaacaataatggataaagaaatgtaactgccgggcagcaaagcttctaagtgaaacctgtagtagcagtagtagtagggagaaaaatgtgtagtcatcaagtgaaaataggaaaggatctatgatttatgatgtcttaatagaccctaaattgttctttaattacaagagtggcagtctctgaagtcatttgtgagcttgtatgacttttgtatttagcaatgttgcatgctcacataaattgaaaattaaaagtaacacattttttc

SEQ ID NO: 182814 - DNA, 2116 bp, Homo Sapiens
ttggctcttccttcttcattttcaaatccttaaacatgcgtttcttatcaataaaaggactgttgtaatgggtactgcaagttcaacacatttttgagagtgccttacttttctaagtagtttcccaatttaggatacgcattgggtgtgttgaggtttctaaacagcttttcatactgttgtgttaatttactacagtttcacagtgtctttaattggcctttatgtacagttttttgatgtgatgcagaagtaggatgaagtaaataccatttctttttttaattagccctactgccaataaagggaaaataagagatgctcatcgacgaattatgcttttaaatcatcctgacaaaggtaagtagtcattaaattctcgttgatgttgttggtgtgaccaatagttattaatgggataattttatctcaaattcctggctattagaaaggtaacacttaaatctgtaagtcctgtctcctaggctggagccatatatttttggtgtcttaaaagaaattaagtgaaaactttacttacagaatgagcagatgtaagtgctactattactatgttttgtgggtttttctggcctacatttattataattaaaacgttaaatttcgtaaaactaaaatgtaatttttccttatccattttagataccttgaaacggagattacctagatagaaacttatgggatttatttattcgtttgtgatagacttctatgcagccttggctgtgttgaaggaaagcaagaatttctttgaataccaaaaaatagaccacagaattcatgttctagtgtttgtatccttttacttatacaggagagggctttcattaataaaaagggttttgacattttaaacagggttataattgtttgatatctacttcacagtatcttttatgaaatttagcttgttttatatggagggcttctgactcagtaggtcggcagtggagccccataaatatgcatttatactaaatttcctgttatttcttgctggtcttaggaccatactttgagaatcactcctccagcagattcgtaggaaagcagctgtagatgacattgtgaagggacagtagataacaggaaaagaaaaactggacagaaaaaggatgtaaagcaaactgggatctttccagtaaacagctcagaagcctctgagaatatcatggtattaaaataacatggtataattgatgttcatttatgacctgtaatcatgaataggctaacaccagttcaaaggcatatacatatatatctaatatatatgatagaaatcctatttctatcagtttaagctttctaaaaaggtgttatttttgtagaaatatctcccacgtaaattacttcatttctcattggtcacatatattaccatatatttggtcatccagttgcagtgtcagggttattttttaaaaattaaaacactgtttctgctaaatctccctcagataagcattggagtccttgaaacaagagtagctttttaccaagcagaaattgagaatccatattgtaactgttcttttttctttcttcctataggaggatctccttatatagcagccaaaatcaatgaagctaaagatttactagaaggtcaagctaaaaaatgaagtaaatgtatgatgaattttaagttcgtattagtttatgtatatgagtactaagtttttataataaaatgcctcagagctacaattttaaaaaatgatttagcacaagctaaatctcaaagccttggtataattttcttgtttaaatttggggattttaaatcagattatagtttagaatatttgcgtattaattatgggcaagcacacaccttctgaatagaaatattgttcattactcatttagcagataatttgggacctatgtctacttttcaaggcaaagtgaagatgacagtccttgctctcagggagcccccactttaatgggagactgataaactggtaattagactgtgataaatagtatgatggaaattagcttaaagctgttttaagtagggactcttcttattctgtggaaaggctgttccaggtacaggcactggcctggccaacttggatacttg

SEQ ID NO: 182815 - DNA, 692 bp, Homo Sapiens
ttggtgtagataatactctcactaacttgtaaataggataagttatgagattttttggtattagaatttgtaataataatgacttttagattttatttgaaaaagctacttggaaagcagtaaatagaactatagtgatatatatagatacatagatatatacttttttctgagaatgtataatatataattgtcaaagatttttggaagtctttcaaaatatacttaataccattttgagaacataccttctaatttatttccataaggctgaagaacttttatttacaaaatgtaagactagataatgtatgaatcagtgttactaggacttatcagtacttaaaatagcaacttggcattctttattttgtttcctggttgttttatttggagggataataaatgtctaagttatttccattaaaattttgaaatgtttgtatactttatgtgtgccattttaaagtatatgcaagttctaagcaataatctgcatgttatacaaggttgacatattttgtcctgaaatttttagttaacatttcaagaatgataaaatgaacaccctgtaaattacccttctccccctcccctccatgaaaaccttgggattttcttgtgctagaacactaccacaatgtggtgcaaagctttgtattttgtggaaaaaaacaataaaatcacaatta

SEQ ID NO: 182816 - DNA, 1057 bp, Homo Sapiens
ttggctcaaagcatcgggagatgactcatattatcttaacatgctttcttttattgaaggtggagggcgggtggtggtagaatgtgattctacagaaatggcccacgtcttcagaatgttctcctgacactttttattttggggcaaatgtgctcagtttttgttctcattctatctttgagttctggtacccagcagaattctcacatgtgcttattttgaaattaaaccaatgcaaaagtttttaccctgaggtgttgctaattcatgaacctattctcttgacagtttttccctccaatataacctatatcttattaaatgtcttttcttcttctagattgtttccaatagtagctcaattttagctttgttcaggctccaaattagaaaaacgctgagattagccaaatatttgaacactgtaaggtattaatcagtttaatctgaaaaaaaaggtataagaacacttcctacagttccagaagagtgagctgtcctggctgagggttatttcataagcacctacatgtatggacactaatggtgagtcatcaccagaggaagatgaaaaatctggactctgtatttgtgttgatgccacatttcagggcaaaagttttgcatccagaccatgcactctagcatcctaagtccatggctgctgtggcagtggctcttttcacaccaaaaatggagggagaaaaccagctaactcctgggctctctgactgcagtcaggccaaggaccagggaacctgcatctgttcactagggtgaggatttaaagcatcttctgggttttcagatcctaccaagaaaagcttcagaggcagaccttgagtctctgtgaaccccatcctgtattttaatgactgggctcctcagcagatctacagacttctagttcttttcgggtggtggtgactcttgacatttattgtccaggtctggtctgcagcacttaggatgcctctagcctatggagatggagttacacatcatgcatgttgactgtacatgctacaccacttctccagacttgacctctatcaaa

SEQ ID NO: 182817 - DNA, 1392 bp, Homo Sapiens
tttgtacaaaaaagttggatttgaaactcctttctcaactttgaatagagactgatttccaaagtgagatttaagtgactaagtttcaagtttccgatacatttttccttttacttagataacatttcagcccccttcctttctgatcttacttttttattaatttaaattgttactgattacgtgacactttgtgctggtctaagaatagtccagagtcacatattccctggtgaatgagcatattttcggatgaaaacggaatcacatcttcaatccccatttcattttcacctcctccatgtggcttgtacctgtttggaagaaagctcctgaaggataattgccacttattctaatctttctcacactcatttaatttggatccctggctaaagttgttatttacttttgtgattatacttagtctatgacattcataatttgggaaaattctcaggtttgagaattttggcggcttgggatttcttttagtttcttatagttttaaggatatgtaagacaggtgtaagaaactgccaaggggaggaaccatagatatcaggaaaaactagaaaagatgccagacttaccattaatgaatgatgagacaatagtaactttgttaagtgagattgtatatgtgaaagtggtatagaaactaaacaaacattaggtgtttttattattttactcacatgttaatatttgttttggtgctttcataggctaaaaagctgggaaataacagatttaagtggtcaggaattttgttataaatatagaatgatgattatatgaaatcttttcctgtgaaagtcaaatttaagtaaaatctttatcaccatctgcaacatttgtctgcagcctggcttaccaggttatcataaagaacatttattttacagatacattaaagaaagtcaaaaccctgattatgtgtaaacaattttacataaggaaatatatgaattttaattatatttttctaaaatccgtactcagcatgaaattaatacatcttaacccctccctgtgacttcattattatttttaatgtaactttagaagaacccagtagagagagcagcgtgctaagtgtgtttctttcttttccagacaactttgaatggagaggagcaaattagtcttttggtttaattctgtctcagtttgcttatctaaagaaaggaaaacagagtggctacacttgtttagaaccatatgcatactccagagaaagatgctctattaatccaaaaaaatacagccacttgaaaccagccaaagcgaaagtgtaagggacttcatggaaaggaggcagttcaccaaagtattgaggggttttatattttaaactccgccagtgaattgacgtgttatgtcacttac

SEQ ID NO: 182818 - DNA, 1336 bp, Homo Sapiens
  misc_feature (90)..(134): n is a, c, g, or t
  misc_feature (393)..(592): n is a, c, g, or t
ttggctattttgtcctaacaattacaaatatattttttatttcagattgtatatattcctaccagatggagataattacagctttaaaannnnnnnnnnnnnnnnnnnnnnnnnnnnnnnnnnnnnnnnnnnnnatggacacataataactgtacatatatatggggtagaatgtgatgttttaatacatgtactcaatgtgtaatgatcaaatcagggtaatttgcataatgatttttctgtagggagaaaattcaaaatctactcttctggctattttcaaatatataatatgttattgttaactatactcatcctactatgcaataggacaccagaacttattcctgggttctacatccgttaaggcaaccaaggattggaaatattggnnnnnnnnnnnnnnnnnnnnnnnnnnnnnnnnnnnnnnnnnnnnnnnnnnnnnnnnnnnnnnnnnnnnnnnnnnnnnnnnnnnnnnnnnnnnnnnnnnnnnnnnnnnnnnnnnnnnnnnnnnnnnnnnnnnnnnnnnnnnnnnnnnnnnnnnnnnnnnnnnnnnnnnnnnnnnnnnnnnnnnnnnnnnnnnnnnnnnnnntttgttaccctcaggagatcctgaaactagtcctccatggatactgagggctgactgtatattcctatcctcacggaactttcattgtaatgagggaagactgactataaacaaaatatatgtaataggtggtggtaagtaccgtggagaagtaacaaatggggcaaagtgagttatacagctccattcttagaaaccttggagtacttttcttagtttatactcgtggtggtttccttttgtctcctttattacatgggactctgacatgtgcccatagctagggtggcagtaggatctacccgaaaagcgtcctgctgatacaggaccaaagcatcctgttgttctcgagcctataaaaagagctaatggtcttgcttctcttaactgtggcctcctacactgtgttttggatgattggtgatgtcttggatattctgtttctttggaactttgaatatacaacactttactagggaattagcaatggaagcagagcaaagatgtacagaggaaacaatgcataactctgatggaattgaagtcatgaggcagcagagagcttaaattagagctttaaaaatttttattttttagagggaatttaattgggagtaacagcagtaatagttaacggagccagaatgcttgagtcatataattgcaaagcagagttgggagcaacagatgctaaagagtagttgctgtagtttcctctttgggtcgtagagcagttgtcatgtt

SEQ ID NO: 182819 - DNA, 744 bp, Homo Sapiens
ctttgtacaaaaaagttggcttctgttgtgcattgtcaatctatagctctgcatagttatattcaaacagctcagcatgtggaaaacttgacacatgcaaccaaccaagcatggctacttcagaataaaattaacactgagttacaaactgaagtggcaatgttgaaatccatggttctatggttaggagaacaagtacaaagcttacaattgcaacagcaattgcgctgtcattttaatcacactcatatttgtgtaaccaacttagaatataaccaaagtgagtatccgtgggaccttgtggaagcccatttgcagggagctttcacatccaatatcacctttgatattggtgaattacaaaacaaaattcttggtttaaataaactcaagagtttcagccttctttagaagactggactgaaattccagcaacacctgcagagcatcaatccttggacctatctaaagcaccacattaacatcttatatgtaatccttggaatgttgttgttttgtccctgtcttctgttcatagtcttaaatcaggtggaccgccaatcacaaaatgagagctgccaaacctggccttacattctttcaattaatacataaacagaaagggggaaatgtatagagccgaaggcctgtgtgtcatgaccaactcatcattccactgaggctgtatgatcaaaacaaccaaactgtttatcttgaatgcaaaacatggggcaaatctcgctt

SEQ ID NO: 182820 - DNA, 1047 bp, Homo Sapiens
  misc_feature (767)..(788): n is a, c, g, or t
ttggattgaatgtacgatacaaatggtaggccttcatgtgagccagttactacatgaatcttcatttcccacagtggtttgttcattcatcagcgttaggcttggtcctggctccacctttctcctctccgggcactgaccccacctttccgtgtatttactgtaggctattaaatatgatcatgacccgccttgcattttcattcatcacctgtttatgcccaaatttaaaggaagtttgtctcattttgccagaaaaaaattgtaatagtcggcacgctggatttgtagggccagcaaaattgcggcagtgaaactagtttcacttctaaagcccttcatttcccacaaggttaagctctcgaaaccccatttgatccttggttcctatttcgatcctcctttggaatctgaaaatcggtctccatgttgtatgcagattagaagttgccttgtttgttactcttccaacacagggtatcagggagaaagaggccttatctgttcctccatcccccctgttttgacagactgctaagaattcctcaggacttcctttggttggggattttactttcccaaaagtctgatctgatttctttcaggggtagacaagcttgtcctagtgctctgcttcaggtcttatcagaagaaacccaggaatagaaaaggtagatgccttgacttttgtccctgttgtggggactaaagtgttttttgccagaattgtcaaaagctccggttcaaactctgtagagtttcatggnnnnnnnnnnnnnnnnnnnnnngatgcttatcgtcccggagaatgtgtaagtaagttctccagcacggcttaggttttccaaaatggaaagcaaagcttgcagacaacctgttttctctagagacacacaatgattctggccctcagtctgtttccctccccttgtttactctttggtcaccgatcgagtcaggctagaggggtaatacggtgattaaaagaagtaaattctcactgtaaacttggattgattaacagaaacaattaaaccaaacaaaatc

SEQ ID NO: 182821 - DNA, 807 bp, Homo Sapiens
gccaactttgtacaaaaaagttggcccagctgggcattatgagaaaagcaagatgactatgagttttttgattatttatatgaccaaataatctcaaggactattgctaactaacccatgggactcccactaccttcatgaggctcggatgaggtgaaggggccctaaaatcgtgccaactagtcaggaactcagttgtcaataatttctttatttgtgatacaagcaggcgtggggaaagagaaatgaagagacttggaagcttctccgaggccctagagaagacctctgggttccgaacaccagacaccaggagtaaggagggtagttgatgatttcccactctttctccagcccctgctcctctgtttctccccttcacccactgcagcttcctcaggtcctgggtcccgcgccatcatctcttcgaatgacctcccttctattcctgttaataaaggagcatcagctaagtgaatatggtgatttgcatacacttacattgattcagaaattgtgtttaattccacacaagaaaaagaatgtggatctttttcactgggaaaaaaagtcgccatgtatcatcttaatcatgttttcctgggatataatctatacgtgacgcccatttaagccttcattgcatctatgcacgtggtttgctttcctcttgtgtgaaatagtgttggaccacacgggtttgggccacagcccaggaagacacaatcctgaacgtcataatcccaaatgttgaagtcccataagatctaaatctgtacagtctaaatcctgaaatttacaatccct

SEQ ID NO: 182822 - DNA, 938 bp, Homo Sapiens
  misc_feature (218)..(532): n is a, c, g, or t
ttggctcattcaaccccctatttgagccaggcattattttagacacagcagtgaacaaaacaaaaaggcattcttgccttcatggagcttacattcttattgttatttaaatctaaatgttataaaacaagaatttatattctagggttgatcagctagtatttaatcaaaaaggccacactcccatagcagctactctaagctgtagtagctaatannnnnnnnnnnnnnnnnnnnnnnnnnnnnnnnnnnnnnnnnnnnnnnnnnnnnnnnnnnnnnnnnnnnnnnnnnnnnnnnnnnnnnnnnnnnnnnnnnnnnnnnnnnnnnnnnnnnnnnnnnnnnnnnnnnnnnnnnnnnnnnnnnnnnnnnnnnnnnnnnnnnnnnnnnnnnnnnnnnnnnnnnnnnnnnnnnnnnnnnnnnnnnnnnnnnnnnnnnnnnnnnnnnnnnnnnnnnnnnnnnnnnnnnnnnnnnnnnnnnnnnnnnnnnnnnnnnnnnnnnnnnnnnnnnnnnnnnnnnnnnnnnnnnnnnnnnnaatattcctgttagccctaaaggctttacatgaggaatggtagaagtggtcttttgtttaaattagttgcattcagcatatatgaattgtcttaaatattttggggatactcccccgccttttaaacagggcataagatctggtaaactctctgtatatcttcctacctttcaaaatcgttcttagggttagtcaagtctggaatataattgctgactataaagttagcaattatgcttttaaggtgttgtcacatcaacctaaagagaaccatctatggaaggtatggttgaaacatctgtaggaacacagaactgggatttcactgagtttaccaaatcaactgtgtgaactgtttctgcactgcttgctaatggtttcatctaataaaatgtttaacttatat

SEQ ID NO: 182823 - DNA, 836 bp, Homo Sapiens
actttgtacaaaaaagttggcaacaacaaataatagatgtctccgggaaagtatcatatatgtttgaatataatgtgtgtgacacctaaaattatttctactgtatgaagaaaatcagtactttgggagaaacaggtaaaaatgaaaatgtaattcagcatcagtttgagtttcactgtgagcctcagtccaggttttagaaagaaaggtacgtagacacaattctggctttaaatagttcacaatgtggcaaaagaaacttcattaatttcttaagattaatgataaatacagtttctttgggcagattgactctaaatattgagttcaagggggttaattacagtataaaagggtttctagctgttgaaaaggttgggagctactgaattaggcctccagatcctgtggcctacctgttatacctcaaagcctcaattttcagccgcttccttagcctttctcaaccagggctgtgagacagttaagctctaaggaaaattgtttgagtaactaatatcagttctcccaaggactgtatttaggtattctttacctaccatggatgtgttagggccagactctcttggaaggatgcttctcttctgttctcttcccttgccctctccctctctttatgcttctgttttgtgatcccccatttacacacaggaacaacctcaaagttctgggttggaattgggacccaaaaaatgactatagctttatcttctaatatttgtgttgattaatgcttgaaattatatctaataattcatagtcactaaaaagaaaatttgagtgaatattttgatagtagcttatcctcttaaagt

SEQ ID NO: 182824 - DNA, 652 bp, Homo Sapiens
gtacaaaaaagttggcatctcaaaaaaccttataaacgcagatgtgatatatataaaccataagaaattaggtatgttaatgatgtgctcttaatttaattgcagaccaagcccaatgaagtgacattatgtctttgtggcaatgacatattcacaaatccatgtcttaaaactgttatttatatattgttctattgctagtgatttaatgttcagaggttaatgattttagcaatttattccagaacacaaatttaaatgcatcttattgtcattagaatcggttgtacaacttaagtatatagaaaaggatgtacatgtaaaatagattttgtattccgttttttccttaaagaacataaccttctatacttggttttctaccttttgggattgatagagatacaatgaagccaaacctaaaattaaatcgtctttatttaattgacagtgttaagagaaaaattcactatcattactaaagagctgaaagcttaatacatattctttaggaatagttgctaactaactcataactatttagatttgacttaacagaaagggaggtcttacaatgaaacaggtttatgattaaagatgttacaattaaactattctaaaagacttacaatatgcttcttagctaacgtta

SEQ ID NO: 182825 - DNA, 989 bp, Homo Sapiens
  misc_feature (736)..(760): n is a, c, g, or t
aattaagaaaagtgctagagtgtgttgtgattcactatttatggggagcacaactacatatacataaagtagaatatcttttatatgctctctaatcattcattttatctgaaaatataaggaatagtatactcactgtgagaatgttcattttacatttaaaatttagtatgtatttgagcatttttctgatcatcagcttataccaagctaagaagcacagctttacataatttatttccctccttttccagcatagtttcttacttttcattgctgtagttatgatttttacaagttttttatcagaaatcttctgtgagattattcttcatatatattttttacttatttgattttatatgttcctcctctcacctcacttaaatacatgaagttttatttttagacgtcttagccactcctatgctgcttttcttgttgtgcttctaaatatagtgaccagttttggagctctcccagtttccattctttgtgttcattgaattgatttcatgatctggccatattgtttattggagagagccagaatattttcccttactcagcacatcatgacccctgagttcacaggtcagttgaggtagggaattttaaacatagagtagtaataggacaatgttagactgaaagcatcattgaatggaataactgaaatatatatatacatgtataggaagaccaccctaaggggactatttgccatcccactttnnnnnnnnnnnnnnnnnnnnnnnnngtcttttcatggtctcttgttcattaatcatctaaaatccaagcacagagaattcaattttagatggtctccagagcagaatttgatgtataatcttaattacaaatcatagataattaatattgtttacaaaatcagaatacgattagaggtagggatcctgcacacaccctattttcctcctcattgttctgacccgagagacttattaataattcaaggaacttac

SEQ ID NO: 182826 - DNA, 344 bp, Homo Sapiens
tttgtacaaaaaagttggccagtttaacacatgcttattgtgtgtctgtatttagttctatataattttatcacatgtatgctgatgaccaccaccacagccaagatacaaaacattttcagtgtaaagatttctcatgctacccttttatagccacagctacctccctccctccctgtacttccctaacccttggcagtcactaatctgatctttatgtcttgtcatttcaaaaatgctacataaatggaatcagatttgattgttttcattcagcacaatccctttgagatctatccaaggttttgacatgtatcgagagtttattccttttatattgctga

SEQ ID NO: 182827 - DNA, 1198 bp, Homo Sapiens
tttgtacaaaaaagttggggtgagggcccctcctgggagggaggacacctgtggggaaaattcttgtgttatttatttctccttcgggatagggtgcctgcagcgcttcatgggagggggtgggctgatgctgcgggctcagaagtttcaagggcatctggggagaccagatattcagagaccttctcctagatgtgcctgttccatgtatcagggacacaggttttcccaacagggctggtgtcattggcatgacagacctgccttggctgagcgttcacccgtcttcggagttcagccaccttagcaagtcctgggtttgttcttcagattttgctgctcgcccattgcctggatcgggggctactttgtaaaccaccaggaagactccagtgtttctgcttaatttttagatgtttgttaattgctcttggcctctcattaatcccctgtgggtcatccaggaaacatactcaccactgtctgttctctgagttttcatttccaggcatccgccctgcctggatctcctcacctgccaggaacttcctctccacaagccggccatcccagcaaaagttctaacaccaaaggtctggcaactagcctgccatcttgtgcctggagccgcctgcgtgccacctactcccgaagatgggaaccttgttgccagttgggcagatgcggggcaatcctgtaccaagaccccattttaccacctgctttctcagaccactctggaacccactgtctcagattgtgtcctccaggaagcagaccatgagagggagttggcagggccaaagatttactggggctaactaacactcaggaaagggataggaaggaaacagggctggagagcaggttgagcccgacctgacagtctcgagcagcccaacagggagtgtggagcaagggttgcccactagaggggcctgcattgggtacgggtgatggggtccacatggtacctggcatatagcaggctgtgcaatccatattaactgactggataaattaatgcccagaaaaggtgccctggagaatgggtgtgtgctgaacacaatagggaaagggcccagcatctgccttggcatacgcagaactgtgctgtgccctgcaacacgccacctgagagctgctttgatcttgtgtgtacattagatgactgccaggggcatgaaggggatgtgct

SEQ ID NO: 182828 - DNA, 1201 bp, Homo Sapiens
tttgtacaaaaaagttggatttaatctgcgttggagaagaaaaaaatcaatggtaccattcatctgttaatagttttggaataaccagcctgagagtcaattcacatgtgtacacttgtaaagtataaaagctattttaccattttctttattttggttgaataccaataatttctaatcctggcaatgagggtggcttgggtctccaggagccaccagcagccattctctggaatctatctgaatgtgtcaaagtatgtgtgtagtatccagacagtgggataagagggccctttgccacacattgctgccatctgctatggaaaatgaaaccctatttcatgtgttttcagttctcttcataatgtgcaaaatattttcagtgagttttcagattaatatttgtctcagtcatgtagacaacaacaaaaccgtcctgtgttttgttgttcagatgtgaccccacaggtttacttctgtgctcacaagggaatttctctcttcttgcatgtccagtaccaccttgtaaggataaattcaggtgctttaaatgaacaaataacttagcagaatacactgattcctgaagcctgcccaattccttctgtgctctgacgtagacatggctgtgcattgtcgtaagaagtcgacaccacctatctctatagaaagcagaggggaaaagtgcaggattcagcagcttttcttaacaaattgtaacattttgagttggcttccatatataaacaaggagtagataagtttattttagcattttagcaaaaacacttagtaatttagtatatttccgtgacatttacctttaagactctttttaattacctaattgatcttatccatgatgggttcaacacaaagaacaaatattcagagaacagtcccaattccatttccaaattatgtatacttaaacataacatacctactaaaatattgctggcttctaggggtgacttttggtctgtcactggtaagagtgcatggatacacatggaaagtcagtgttcagaaatcttgattggcattcatgcatgccttccatactatctgtagtccttttctcttgtaataaaatacatgtaacctaacatttgccattataacaattttaagtatataaattccctgacgttaatcaaatgttgtatttgtatctccaaaactttttaaatttccccaa

SEQ ID NO: 182829 - DNA, 583 bp, Homo Sapiens
ctttgtacaaaaaagttggctgagattttctttaaacaagtcttagacatccattctacaactctgatgctggcacattttttatcttggcaaaaggacttaatagaaaaattttagataacaatcaggattcatactcttctcaatagtccttaaatggtttattgaccaaaaagtaaagaagtaacagtccagtcatatcatggaaagaacaaccaaattcatgcatgcacaggcaaagacaaccatatcactatgaccacctggctgacagtaactgcaggacatcaattattgtaagacacttcctgtaatatgtttaattcctctgacataaggatttatgtgaattaggaagtggcccaagggtgaaaagtaatagggaaatagagaaatagaaccgatccaaaggaaagggggaaaaaaacccacaaaaagtgtgatgtcaagcaaagcctattctggagatgactttggttcactcccacgggagagccctagagacaaaaaggttctacagtaggttcaagtcagaggccagagaacccagagtatttatacctctgcaccatcagttattgaa

SEQ ID NO: 182830 - DNA, 954 bp, Homo Sapiens
  misc_feature (492)..(732): n is a, c, g, or t
ctttgtacaaaaaagttggcttggagtacctttatataaaagggcaggagaaggatgtcccagccccaggagaaaaaatgaatttacctttactctgcctttttgttctatctgggcacccagccctttagatgttgccctcccacattgaggatggatcttactccctcaatcaacctactcacacaccagtcttctctggaaacactctcacagatacagtcagaaatcatgctttacccgctttttaagtatcctttaatccggtcaagttgacacctaaaaatcatcacaccatatcatcctgtaattctacttgtggaggtttattagttcccccttatcctaggtttcactttctgagatatcagttacccaaggtcaactgtggcctgtaaaaaaataggtgagtatagtacaataagatattttgagagaaagagagagaccacatttatttatttatttagagatggactctcactgtgtcannnnnnnnnnnnnnnnnnnnnnnnnnnnnnnnnnnnnnnnnnnnnnnnnnnnnnnnnnnnnnnnnnnnnnnnnnnnnnnnnnnnnnnnnnnnnnnnnnnnnnnnnnnnnnnnnnnnnnnnnnnnnnnnnnnnnnnnnnnnnnnnnnnnnnnnnnnnnnnnnnnnnnnnnnnnnnnnnnnnnnnnnnnnnnnnnnnnnnnnnnnnnnnnnnnnnnnnnnnnnnnnnnnnnnnnnnnnnnnnntgagccactgtgcccagccacatttatataatttattaccatatattgttatagttttatttttagttgttgttaatctcttactctgcctaatttataaattaactttaccatggatatacatatataggaaaaaacacactatacggggtttgatactctccctggtttcacacatccatgggagtcttggatcccccccatcagataaggatgacctaa

SEQ ID NO: 182831 - DNA, 789 bp, Homo Sapiens
  misc_feature (78)..(97): n is a, c, g, or t
ttggggctgttcgaggagctgctgctgctgaggcggcggcaactgcattgaggtggtggcggcggagattccacttcnnnnnnnnnnnnnnnnnnnntcagaatagaagcaaagaaggcatgcagctccttctttcctggagctggggcaatagcccaggctggatccctgaacaaaatgtgggctccgatcctcagaggtttttctcaaaaggagagttaatagccaccagagcagggaaggtctgtgatagggttcgggtggcctctgtgatgttcacaagcatcctggcatgtggcaaagaccggcttttcatttgttaaaggagactcctggggcacctgcatctctgagggcaaattacaaccccacatatcctagaggaagatttgtcatccagccacctggaaaaaacactcagcagtgttgaagacacacaaaactacccagaatttctttgggggcttgagtcatcacatttctgagctacttttacggtggggaaactgaggcactgggtgatttgctggaggtcaaagttatggcaggagcaacacaagaatgcataatctgacaaagtctgttttcttgcccatgggcagactctgatcacgttaaaaggggagccagaaccgaggttgttcacccactggcttagaatatgatgcggtgacagtggggacggtaccctggagacacccactgagagtttttctacctgggtaaattacgtccgtttggtgtgaagaggacaggtggactccttagaaggcggcccaaggggctagg

SEQ ID NO: 182832 - DNA, 861 bp, Homo Sapiens
ttggctctgcagcagagagagctattctttctttcgcctgttaatcttccactcttaacctcacttcgtgtgcctgcgtctttgatttccttggcgtgaggcaataaacctcagttcttctgttatataaaggaaagatttcaacagaaacttatgaaagaagacagatcaaaaaaaatcccttatttggaagttaatgtgtgatgccagttctgagcgactacaatggcttttaaaataacttgcataagcccagaagtctatgtaacaactttatgaaatgatccggggtaagataaaagaagcattcaatcaaaatctaagaataaagccaaggttaaattaagctgtgtttaccagaagttatgaattaatgacaaagttttacctcttctccattcagtccaaaccagcctctacgaatcagcccaccatagtctaggtaccagcctcagttctacttacactgttgctgagacagagcctaagagggaactcagttggcaatggttgccaagccaactccagcagctactcgggcaagaattaatagtgaagtctaagcccatgagacccaggtgggcaaaaggtcaggtgcaatcctacatgatagaagaagagagctaagtttgaagagttggggggtagatttcaatatggccagagataagatccaatcctagcaacagtctactacatttagagggatggtgactggggaaagggtaagaagcaactgtcatcctcaaggactaccatcagactttatttattattacaaacgaatgcctccagtcatgatggaccaatgcaagcatcgattatctgaagtgatgccaaagtgttcttatgctattgccc

SEQ ID NO: 182833 - DNA, 1604 bp, Homo Sapiens
ccacccacccagcacgagtagagagatatgaagctcttgacatattcaacgcattccccatgcccctcggatgctgaggttaaagcagccccaatcgatcacagcccagagagtcagctccacactggagcacaatgcacgtgggttggtagaagtccactacctggttgataaccggctggaaaaggtgcttgtaacctgagagagggccaaagatgggcactctggtcatcaatgccatcccgcaggggcacgttcagacagtagtagcggccactctctgccccgacttcatacatgtcacctgtgccagggaagaagtaatttccgtatttgtggaaggacaccgtcatgacccggtcagtgaggtagaaagcttcttgaaccccgtcaccatggtggatgtcaatgtcaatgtagagcacccgagggtggtacttgagcagctccaggatgccaatcacaatgtcgttgacatagcagaagccagaggcctatggcaagacagtggtctcataaagagaagagcaattcccctcccagctgccccccaccatcatcctaaacacctaccctaggatggccactgtctttcccatcacctcctcactcacctcaaacttcttggcatggtgcagaccaccagcccagttaatggcaatatcacagatctgaaagacaaacacctaagtcacagtccttcctgcccacccctcaagctgggagcccaggatcagggttaaatcccgagtccagggatccagaggaaaggaagaacaggactcgggactatgtcaccttgttgttcagctgggttgctccttgcagagatgcgcgtgtgtaacgcgagcagaactcaaagagcccgggaaacactgggctgcagggaagaggaacaagttggaaccctcctgcctctgtctgggcccttcccatatctccctccccatcctagattcctccaatctccatttttcaagaaccttctctccctctcctacacacgtgggctatctgcaaatttattcaacaaatattttggaccaaaccatgtaccaagccctgtgcaaggcactggatgggaagtaaagaagcacttaactgtcagggagtttgtatcctagctgcggaaagaagcaagcagcttccaggtactcaagtacaatgtaaaaaggaaatcagttgaaagaaaacatgagctctgtttttcttagtcttctcagtgtaacaaattttagcataatgttcaataatatttttcagtcacatattttaaagaaagaactgtatacctacatatgtgaaacagtgatgagataacccacgaaaagcctgtagcacagtatacagtatccgctcagcctttaataaatgtcagctataattattaccattgttattctttataaaaagtaaaggcttgaagccagacacaaaagcctacttactgtatgactccatttatgtaacattctggaaaaggtaaaatacaaggacagacatcttatcagtagttggctggatctaggttgcagagaagttattaactacaaaagggtgagtgacctttgttgggtagtggaaatttcctgtaccttgatacc

SEQ ID NO: 182834 - DNA, 1070 bp, Homo Sapiens
ctttgtacaaaaaagttgggccagcttcctcgttacacaagaccctggatgggaatttgctatcactggttggctgcgtggcaccaggcagctcgttgggctcacttgcctcgtgctataccactccggagtgttcatttattcatgcagcctaaaaagtgtagtgggcatcgagatttgcttggtgctctgggagaagactaacatcaataaaagacgcagtccctattcattaggaatttacagactgcttggaagaggcgacccgcaaagcagagtctaaggaacgatgcggccacgagagtgtttggaattagggtgaagggaagctttccagcgcctaccacatcgcacatcaaaccatctgcaaagatctgaaagcatttttgtagtattttgatttttatagctttcattgtaacgggatttaacctgtaacatcttttcatcagagaactgcagattacacaaatgaaaatatcataaatccccatttgtactttctgtactttgtaccaaatgtacttaactgtatgctaaatatagtattgaatatgtatcagtgcaaacgttaagagccttttgcaaatagatttatgaacatggatacttattttgtttacttttatattacatgtactgtttatacaaaacatgcattaaaacgtctgtaatgttatttcagtgtgtgatggatgagtggttgctttaaatcactaggtttttgattggtgctagagtagctggtgttgcttaacgtggcattttttttcctgtccacactttccacccttggtacaggtatttttgataaagctgtggaatggaaaggtatgtttttcatggggtgttcaagaatctgttaccttaaatttttttaaagaggtttcctttctgggattccttttgtgtctgggcttaagcagacttagtttaatttaacaagtaacatttttagaggcagtatttgagtataaaagtttgacgtgacacaagtttctgactttacttttccccattccctttattaaagatagtacgaaggattttacgcatttgggtgggggggt

SEQ ID NO: 182835 - DNA, 1463 bp, Homo Sapiens
  misc_feature (206)..(217): n is a, c, g, or t
ttggtgtttctttaatgaaacactttggattgtcagtgctgaagtgaaaagaatgtgctgtacattcggcaaatagaaaatacatgaaattcttccaaattagcatcagacattctggtagaaaaaagccagttgaatgttatgtgtgttttctaaggtatgactgaaatgtttttaggaaatgtcaatcacttgactagcctttnnnnnnnnnnnngaaaggtcagccttttatgactgttttgaacatcagaactcttaatccatgtcagagtcatgtgttagaggaaggatacttaaaagcatggaaggactcttaaatgtatgtatgtaattctgtgattttattgttcatcactgaagtctttgaatacttggatgctaggggatatagaggcactgagagataggtgtcctccaaggatctattctggatctttctctcccttctttaacccttttctcttatctcccttttctttctcctgggtagttctgtagcttccactgtcacctccagtgtgttttcccagctcttaccttcatctggagaccagtcttgagttttcatcctttgggcagctatcttccaccagtatctacaattcagtctgcccaaagcacatcttcttcctatgctactctctttctgtgcttatgtgaaaccaccattttctctctggcaacttagcagccaagagaaatggctgagtcttcaaggatgaatgtgacgtggtacccaaggtcatttgatgtttctacccttaacacctgtttgtcacccttcttgcacttgagcaaaactaaactgctggtccctgtacttcccatttttcccatttatttctttcccaatagttccaccaattagaaatgtcctaattcttcccactcccttattcgtcagatacatttttaagtttaggctcaaatgccacctccccagagtttcctctgatacctctttgcagctagaaatgatctgtctttctgggaactcccatagcttcatactcatatctatctatactgcttatggcacttctcactgtctactgtaccttttaactctttatatatgtctcctccgatgcgagtgtaagctccctgagattagttaacgaatcatttaagttcccgtattagatctgtcgcagtgccttgaatatacaagcattcattcagtagatatatgaatgaatggattaatgggtgatttcttatattcagatgattcttaaccagtaagggtcctgagcagcagtgcatattaatgttaactcaaaacttaatggcaaatttataaataaacctgaaacctcttacatagccaaatacaaatgtatcagtctacctaggaaagatggtttaggtacttgctcataacagttatatgtttatgatttacaaaatgatttactgttcataattgtgctttgaaatgaaatttatcaaatttcttt

SEQ ID NO: 182836 - DNA, 870 bp, Homo Sapiens
ttggcttcctctggggtttttgggaggaggtttcctctaaatcattgcctagatcttctgtctcatgaatttttctttatctccatctttaatgcttatcttctgagatgacaagcatttattgtttcaactgtcccattcttcccagcctcacgattgtttcatctgagttttatattaagcaaatcttggcagtgtagaaagatggcagatgaatactaatcaaatggtaattttaagagcattttcccaataccaagtctttacttctgggtgattaatgtcagaattgttatctggtagtatgtcatttcataagctgttaagaaacttagttgttagcttcagcctttggacactggggctataatgaagttagaaatggaagatgttaaaactgcagacctaaaattagagttcacttcagctgctgttacgttcagagaataagagcaaccataacttacatcaagccaatttaaattagactaatttaaattgtctaattaaattgtctctagatgagagcccaatctcatctagaagtgaagaaatctctctattgacagttattagtataagaggttctaatacccagtgtaaggcagaaatatacattggagttagtctgtctgaggtatgcagaacaaatggcagtatcatgaagtggtatgtaggaagttaatattgccaatctcagtaacttccaagaataggaagcctggaaatgtattaacagctttattaacaaagtactaggactaatagcaacaaaatcaaggagttgcaaccataagaaggatgagtgtccaaggacaaccagttaagtattattttaagtattattttatcctcttcctttttagccaa

SEQ ID NO: 182837 - DNA, 117 bp, Homo Sapiens
tttgtacaaaaaagttggataaccagacagaagcagcttgaagattctttcaaacagccagtctggaccaacaaagctctggaatgttgctaccacaaagtaacttcaaatagccaa

SEQ ID NO: 182838 - DNA, 1316 bp, Homo Sapiens
gggtctttcggagggacttcctgctgcaggctggagtgtctttattcctggcggagaccgcacattccactgctgaggctgtgggggcggtttatcaggcagtgataaacataagatgtcatttccttgactccggccttcaattttctctttggctgacgacggagtccgtggtgtcccgatgtaactgacccctgctccaaacgtgacatcactgatgctctctgcataaagaggagacaccactgagtgaaagccgcgtggtctatcggaggtctctgttctagttgtccgtgggacgtaggcagggtgtccacatcagtgtcccagcggcggccctcagacctccactggaccctgtcccagggcctggcagtgttgagggcccctcctggggatgctcctttccgtctctctgacccccttctctgacccgcagccctcaggcactcggctggcccctgggcctcactgttcacgcctctggcttccctcccgccgtcttccatcattgcccctgtcccggtgaccgccctgtcccacttactacacctcctactgtggctcacccagattccctgaggacacttcaactccttgcctctgcacctccacgcgtgcctgctggtttccagccagtgactggagcatgcgcgctggaaatatggcaccgtgagcagctcctccacatggaatcagcagccaagtcctgtcccttctacctccagtcgccgcctcatcctgtcccgtcgtgccacactgggagcggctcagtccacctcccccctcgcccttgattgttcatggcacctacccgcaatgaaccccctccagtttgccctcaggaacaggagaacacagttgagcagattccaccgcagcttgggtgtgaattctggctcagtgtctcaccagctgtgtgagctgctctgagaccctcaggtttcttcatctcttaagtgggtataaaaacatagctacctcattggggggctgccaggactacatgaggttatccacgttgagtgcttagcatcgtgctggctgcaagggcagtgctcaagagatgttagcagccactgtcatttattagcagtatcatccctgcatcactggagttatgtttcatcaagaagctggtaaatttactgccctgcttcaagacacctcaatcgctgtgttcctaggagagcctgaagtccaccctcagtctcagctggtcccaagctgcctttacagactcacctgttaggctcaggtgcacgcgtgcacaaacacgtccaccctcctgcgtcctcttcctcagcaggccccaa

SEQ ID NO: 182839 - DNA, 1170 bp, Homo Sapiens
  misc_feature (59)..(71): n is a, c, g, or t
tttgtacaaaaaagttggagttgtcccggcaatacagtagacggcgcttctggctatannnnnnnnnnnnngttaaatccacgatccagtcctagatcctgcagaccctgcattgcatttgccatgtctctttattcttctataatctagaaacattcttcagcgttttttttctttcattacatgaagagtcaagaccagtggttttgtggaatgcatgataatctgggttcttaaaaatcatttcttcttgattagatttcccattgtcttgaattgactcagtcagcctttcctcaccgctactccaggttcactaatgatctccctgttgcccaaccaatggttatttgttagttcacatttcagttaccctctcagaagcctttggcacagctaatcacttctttcttgaagcactttcgtccctcagcttctgggatatactttctcttctccatctgctccttctcagtctcctttgttgcttccccttcatcatacagacctcagtaaattttcccctgggcaccgctttagctgcatcctaggaattttgatgtgtggtgtttttgtttttcttcatactggggcttttttgattccctgattggtaacccttggagcaagcactcctgtggccatggagactctagataggatcagtacagagggcttgctgcagtcattttaagggaatctctgccaaatagtgctaagaactgtttaaagattgcacaaaatctcaagtaggtgcatatgagaactttttttaagaggagggggtgttgggaacacataggttttgaaagaagtcctccaggttattctgactgccattttgacttattttatagagtgagtctcgatttcagttttgggtctccttgacctttagcatcttcttctgtctcagtttcctgaagagtggttttattccttacacagatgtttattaggcttgttggatgtgctaggctgtgtaattggtgttaagcaggactgagatcatcatgcaaacaactacttatatgatgagcttttggcttctcttcctgtagcctagctactggcttctgcccttactgagggcacattactggggagtgggttctttcttttctaggtgtggagccggagcccttttgaatttggagaccacctgactga

SEQ ID NO: 182840 - DNA, 1339 bp, Homo Sapiens
ttggcaggtgtgagccaccgcggccagccaatataatcattttatggcttctcttgttgttttaccttatttccaaaacagtgtatgctcattttagaaaaaatagagaatactgacatgagaagaacatagaggaacactaataattgtatatctgtttttctaggtcttttaaaatgaacatacatacattgtttttcaacaaaaatgagagtatatgctatgtactgttgtataactcaccttaatttacttaaggaattctagattgggtttagatttgtttcagctaatgccctgttggtagacatttaggttgtttgaactttcactattagctagtagcataaagcagaaataatagactgaaataaattacaaataaaaaggcaaaaatgtggggacactttcatttacaattttttaaagagggacaaaaatgttttaaaatgcacaaaagattgtaaatacacatactcacaacagtatacaaaaaattacctgtattcagagaatgactggtttactgtttctacaaaaagccatgctgactagaagcttgcttttgtccagcttgtgcttggtcaaacaataataggcctaaccagctggagccatgtgagagttgagggaaaggcagggtgataaggcacatgattgaggatctggaagatttttcatcaaacaatcttaaaatccatgggcaaacacaattgtttccaacagggaacttttaatgaaaagggcatgggtgggagactattatttactgaagtacttactgttctgtgccaagtatttatgctagttgctttgcatgccatcttttataattttctggcctgcattatatgatatccttgtgttcatgaggattacgtaaagggacttttctatgatattatgtctggtaaatggtacagctgacttttgaatccacactgcctgccttcagaacccccgttcttcccactggactatgatggctccttttggatagccagaagaggaaatatcttcttttgattcaccgtaagaatgtttatatgggtctctacgaagtaagtttagggcttgctctgaacttactctggcctggccctgctcaccttccaagccggcccacatgcacatacaggagaaggaaaaaaggacactggtgctaacatagaatagatactcaaaaattatttaccaataattaaattaactgattgtgtctattttttaaaatatcataacccaggctttgaaaattgaagtgatttgcccaaagtcacagagctaaaaagtaaaaaagctggaatttaaacctacgtctgcctataaatgaatcgcc

SEQ ID NO: 182841 - DNA, 958 bp, Homo Sapiens
taacattccagcgtgcatcaaggtggccctgctgtgagcaccccccagtctgtgctggggctcctgcccaccctttgctccaaccagcctgaggatgaggcacagggaggcagggcccatcactcaggaggccatgggagaaacagtctccgggaggtgctgcacctggggacccagaaaagtaggactttttctcctaggacccgcatcgaggcaggggacctcattcctagtgcccaccataggcaaccctctgcccactctgaaaagaggggcttgccgctggggagggattaggggttggtccctgccatcctggtttatttattttcagctcaagaattaattaggtttaaatatatacagatatgcctcaacttaccatggggttacttcctgataaacccatcataaatgaaaatatcctaagtcacaaattcatttaataccccaacagaccaattgtaaagttgaaacatggtttaagttgaaccactgttaagttggggacagtctgtactgtggaggtaggagatggggtagggggaggagggaacctagaagccatgctgaaggcccctggtccccagtccccatgggtggcttcatttctcccagccccctgggcctaccctgagcttgggctaacatcctaggaggcggggagtgggaaggaacaggacaattaaataagataccatttattttttaaaaaattaaaaaataatgccaacattatttcatgcatccgcaggcctgccccctgcctcccaccagcctcccagggctgggcccccctcctcccctggctgtcctgtgtaataaagggaaaaacaatgagcaggctcagtcaggcccaggggagggaacgcagacccagggagagaatcaagacgctacagcaactcagcctcgcatcatggcaaacccaagcacactggtagaaaacattcgccaa

SEQ ID NO: 182842 - DNA, 1644 bp, Homo Sapiens
  misc_feature (63)..(72): n is a, c, g, or t
ttgggttaagctaaatatatgttggttctttttattttggaatcctttaagcatcttaaacannnnnnnnnngaagagaagttacaaataacatttctatcaggtagtacttgtatgaaaccacctttcttattctataattttgatttttcaattttatatacttaatatactcactgtcttactatcagaaagttattttgaccaagatttttattatcttcatagattcagaaagagatgctaattctgtaccaatgtcttcctggttactattctcttccctctaatatatactggccatttgtaaaaccattgtgttgttgggatcacttagttatactatacgcagatagagcatctcaactctgtcatagtgtttgctgaacagttttcagtgtcatgcacctttggctgctaattgttcctgacgtgcactcttccgagttggtaaaggcacagtgtgttcatgccagacttctaagagaaacaccagcctcttaaatcagaagcctacacacaacccccttaacaatccaaagaagcttgatggtgtgcaaagaagcatcctgccagccttgtcattgttctgttctatgctaatcctgctgtgttgtctaaaagatggagggaagaggacatcagtgtctgatagtgaaatcatcagcaggaaagtgaagctctttccttggttacagataagacttggtttacactattggccagtatctgctaaacatatgaagacttaactattcagtgttgcctaggcattcgcctgcacaacattttgaggttagaacatagaatattttcagaaatactgttgtagtttgtgagtgttgttcattagttacacattagctatagagtggatgcatgaagccccatgacaccagtaaacttctcttaccagtaggtaaaccaaacaccattctgtcattagcagccctcttaaatgttgcctctccgtatcctgttgcatttttgtgtgcattgtgtttctactgatctctcttaggtttttacggaatcaaaggaaactaatttttccttaatagcaagaaagatgaagaggtaaagggcattgaagcagaaatgtatagtttggggtacgattagaaaactcgtaaggaaaacagaagtcctaatttcaaactgactgctcttcgttaagtgctcttaaggagagtctagtaacagtaacactttctggccatttctagtttagattctcttcgttactgaaacttttgagaaatattacctgtggattaattttgcacaatgttctattctcataatgacttacaaattaaactaggtttttattgaactacctcacactaattttctatgctttcccaagtaagctgttgccctgttagatctttactgagtgaattataaatgtgtgttaaatactttctagccaatgttgacacaataccagtaagtatgtaaagtatataccttacatcagtaagagacacgtgtaaaatctttgactgtatgtcttgcaaaattgtgctcgttgacattattactgtttttgtaagtagaaacctgctcgtgatatcggtccatttacattttaccaaaggataaatcttagtaaaaattttacgaaaaataattactttt

SEQ ID NO: 182843 - DNA, 1191 bp, Homo Sapiens
  misc_feature (623)..(651): n is a, c, g, or t
ttggcattattctaccatttggaaactttcagttctgttacaggctactcttaaatttttggcttgcatgcttcattaaaatcttaaatcaatatctctactctcttcccaaatcatacattttgaaattcacctcctttgacaaagccaggatcctcatgaaagagaagattctgatgtgaagtcagccctgcactttcagcctttccagcgtgcaggttgatagaatcccacactttttagcggtcgaagggaacttaagatgtagcagttatttcagagttgtgaagcagagaccaaaaatagtttgaagctgaattttaagcctcttttggccagatcaaagaaacccaaactcctaaaaataccaaattagctttttaagcatagtttctatctttagttgaaaatgtgtgcagtgtatacttctggaacctgcttaaatgtatccattgaaatgaagatgtaccttgaaaaaagaggcgcctgatctgcagtaataattaagtaactttctctgcccttgactcttgccccaacgcgtatcaggattccacggtcccctttctccttcctttttcaattctgaaaccatccttgtcttcttgccggagttagcaccnnnnnnnnnnnnnnnnnnnnnnnnnnnnngttactcttgtagtttacatgtcataaatgaaaatggatattccctcccagggcataatctgaaatatttgtatttgggtttcaaatgtgtgataagatgctctctgtggcaaatcggcctttctaattgctgtgcttgttaaaattcaaattaggctttattctcttagcaaacgttgactgacagttgcagaaagtggcccaaaatggcactgagtgatgggtggccaggaagcctgcggtaggaaattcacaacagacctttcatagagaaacggctggccttgactttgagtccttccatcccaggtgctttaaagacagagccgcctgacccttccttagcttggcccgggggtgcgttggagggggctgttcccacctgcagttcctaaaggacaaactgtctgatacaggcttcatgtggggctggccaaaccccaccgaggtttgcacacaccccaggattgcagaacctgagctcgaggagtgggacatgacctccccacgcctctgctgagtatcccagaccttcccatg

SEQ ID NO: 182844 - DNA, 978 bp, Homo Sapiens
cccactttgtacaaaaaagttgggataaagttccagttaaaatacatccttaaaaaaagtttttcctatgcattgcctatgctttaaatcaacaaactcttcatttctaaactatgatctcatatttttctaatttctttgccaaaaataattgccatgttttgtcatagaacatgaaattcatttaccttgatttttaagaacagaccagtgtagaaatgttccttttgacttatagcagtataaaagtttaatgtacagtgaaagagactatgaacagacatagatttatcttattccttgagcgctaaaaactttaataaaaaaaactgcactaattttttacagcaatgcactaaagtctgagatttctcagaacatttatttatatataaaaataaaataccattatttaaattgcctttgggattagccccttccctttccttataaacacaggtagcaggaactgtgctgctcatttttctgttagtagtgtgtacttcatgccaggacattgggtattttctttaaagtgaatatagaatctcaagatatacgtagcttcatcattgacatttcccagagccaatagtcagcggatcggtcttgtgaacaccactgccagctcctgtgtctacatctcagaggagcccatgtgctctgcttctctccaccagagcaagctctgctgggcgtgcttctgggaagaaaacaattttctttaagaagaagatgaatgtccaggaatttaaagaaaggatcgattgccttttatttatgagtttctagctcttgaagttattcacatgcagttcagttagtcaagtaaaattttttttcaaataaaagtatccaagtggtgcagttattattatatccctctttaataattttgctttttatttttcccctcttctttttctgttacttgaattttatttcctgtaatttatagtgtgtagctgtaaattgcaa

SEQ ID NO: 182845 - DNA, 515 bp, Homo Sapiens
taataataatatttaccttcatatggtagaattaatatttttctgtttcagacgcctcatgttctttgttgataaatcaatagattgagagtatgtagaagttctgagacgaaatctttctatttgcaggttcctgttgtcactatgataaagagtgctggggcatctgttttgtgctaaagctaactagaagtgtcgctgctctgagcaacaggcaggaagtacttctgtccttaaaaccaaaaatagatgctctttctcattatcatagctcaaatgatcatcttttttaatgagatgggcacatcccttgtggttttcacagatttaatgaccagattatttaatgcagagcttggggaagaacagctctggtaagaaagatgatggaaattttactggaagcaaaaataacaactttattccttcttttttctttctgctaatgttttcaacctcttattcctttgtttgtttgtttagagatggtcttgctctgtcacccaggctgaagt

SEQ ID NO: 182846 - DNA, 671 bp, Homo Sapiens
aaaaaagttgggttaacagaccaatagcaatgaagaatggatcattccagtttttaattaattaggggaaatttaattaattggggaaagtgtctcaagcattctctttagaaaatattcctaaagagctgtatttagaagcaaaagaagaggataatatgtgttttatttacttgatgtaacattaaattgcaatggcagatgagctgctttttgtcataaatttatgggctgggctaaacttgcaactggccttggtgactgtatttcctttcatttgtatcttcaagagctaaaatgtaaggctttatcaatttatgaataaagtgatgataaattcttgtagctcactgcttaatggcagtcataagcctacttctctcttttccacagctttctaacccagggaaccacggatccctatggacccatgactatagcattttgtggatcagatttttaagtgggccaggcattcaaataaattaacagatacttaggaacatgtgaagttattatttaggttagataccttattcaaaaatttatccaaattattgtttagattaaaaaatttttcatagacacaactgagtaatattaagctggtgcaaaagtaattggcttctgttatttattagtattgctcagaggaaaccaataaaagccaa

SEQ ID NO: 182847 - DNA, 1054 bp, Homo Sapiens
  misc_feature (589)..(675): n is a, c, g, or t
cagagggctttttaagatgaggggaagtaatggtttgaaaacaagtgtgggtagcaaagaggatctcaaactcctcttgattctgagagggtcaaattttagtcaagagcgaatgagggttggatgaagaaatgagcaaaatgtaggaatggaaccctggaaaacattgacatttaaggagcaagtagaaggaggagggaagattggtctgaaaggtttatgaaagccaaaagaaaatgtttcaatgagaatgagacagggaggtctagtacagtaagtgctgaagaatgcacactgaatttggcacttccgtcactagtggcttcaatgaagacatttcagtagagctgtgagggtagaagccagattgtgctgggataaggacagtcagttgtgtgatgtgctaacagttggaagagaataagtaatacaaactacacatttttcctcttcatttataaaacagaataattcttccctcgagatatatcagagattctgcaaagaaacttaagaactctataatttttcttgattagttttatttttgttttattcattccttcagcaaatactaaagtatctaccnnnnnnnnnnnnnnnnnnnnnnnnnnnnnnnnnnnnnnnnnnnnnnnnnnnnnnnnnnnnnnnnnnnnnnnnnnnnnnnnnnnnnnnctaaatttgaaccatttaattaagaagttgtcaacttctggatggtctctaaagctgagagactgcatgagattaccaatggagtgtggagaagagaggagtactaaggactgagacttgagggcaccccaacatgaagggtttgaggatggggaagagccagcccaaggaactgaaaaggaggcaccagtgaagtggagaatgtggtgtcctggaagttatgttcaaacagaaaggagtcaacagctgtgccaaaagctgagaggttagcggactcagcaacatgaaggtcactggtacctttggcaagagctgttttgagggagtgggttcaagataggctgggcacagtggctcatcaattgtaacaaatacccaa

SEQ ID NO: 182848 - DNA, 1033 bp, Homo Sapiens
  misc_feature (349)..(374): n is a, c, g, or t
  misc_feature (398)..(416): n is a, c, g, or t
ttggctttcagctgagtcctctgaggttctgctgttgagtcctgggtggctgatggaatgattgaggaggtctggtcaccctcaagcgccgtcatcgccttgtttccatgggcttctgtcacacaaaatgaagaacagaaatgttaggacttaagagaatgtttggaattcacacctctttgcagtcctttcaaggctgctgctctgtgctgtgtcccatgcatgtgaaaatagagctgtgatggctgctgggacgcttgcaaagatcatgtgtgagaattgagcacaagaccacaaattattactgcttgatgcgcttgttaaaactctatctgccaggaaaccaaannnnnnnnnnnnnnnnnnnnnnnnnngcaacagagcgaaacactgtctcnnnnnnnnnnnnnnnnnnngtaacagaaaaaagagtgaaatatattagctatcttttattctgagccaaaacttgacagatgtgggaaatcttcatatagtgtatgaaaatttcattgtacagggaaattattttcctctgtgtcttttcttttactataaagtgattcagaattttactgttactataaaattatgcaaagtattgtgacaaaactgcatcaatttgttgactattaaagtgctccttgaacattatatttcctgggtcttttctgtgtgtggagtcagcaaactgttttttgctacctggactttgtcttcttttacagctctggattcttaaaagtaccacataggtagcaaacctgtgaagggtatgagattttaccctacttgcaggctaataaagtgagcacaccacatgggttcatggatcctggcagaagttatgagactcataggtcagagacaaaggacagtttattatagcaatagcagtggccagattatcagcatttacactggttccctgagccccagccccaagaagagggccaggtgagacctgcacacgcagtgggctgcattagaagaggaacccccatgcttcgggaccctggtatttgataatggg

SEQ ID NO: 182849 - DNA, 1321 bp, Homo Sapiens
  misc_feature (279)..(359): n is a, c, g, or t
  misc_feature (669)..(899): n is a, c, g, or t
ctttgtacaaaaaagttggccctgtctcaaaacaacaaaaaagtagcagctaacatcaactgaccttttaccaggtgcctattgataccatagtttaatttcttataactgtttcttatttcacttaccaactctgtcttcagttactcccagatttttactgtgtgtgtacagatgaccttttgtttagattgaattgtctccccagaagtaagattactgtgagtcatggtgaatggacattctcattacccttgatgtaaattgacagggttttgnnnnnnnnnnnnnnnnnnnnnnnnnnnnnnnnnnnnnnnnnnnnnnnnnnnnnnnnnnnnnnnnnnnnnnnnnnnnnnnnnatggcagtatggtgagaccctgtctctattattttaaaaaattgacaggctttaccctggaaggcttatacacaatttaaacacccctcatagtataaaaaagtgcccatttcactgcacctttgccagcacagggtattataatttagtaagtcattttttgtttgattattttacatagacaaaagaactcatattactttacttgtcacatttcaacatctttcctcagcttattagctctatttcttttctgtctgtaaatggttattgttgttttgttctttgagacagggtcttgctctgtcannnnnnnnnnnnnnnnnnnnnnnnnnnnnnnnnnnnnnnnnnnnnnnnnnnnnnnnnnnnnnnnnnnnnnnnnnnnnnnnnnnnnnnnnnnnnnnnnnnnnnnnnnnnnnnnnnnnnnnnnnnnnnnnnnnnnnnnnnnnnnnnnnnnnnnnnnnnnnnnnnnnnnnnnnnnnnnnnnnnnnnnnnnnnnnnnnnnnnnnnnnnnnnnnnnnnnnnnnnnnnnnnnnnnnnatgagccaccgtgcctggcctgggctagtcctatattctctagagttctctttactttgtgctagtcaatctctcattatgctgttcacctgttataatgaataattctctgtattaaattttaccactttaaacttttgagtggtttatgcttcctgattggactctgactaatatgttaggaagggtcccaggagataaacccacacagatgggatttgggcagtgctgagctctttgccagtgggaaatgggatgctggtgatttccagtaggtgacctcacagtgactcaagctaccacttactgttgattgtgacgaaatgccagctgaggcacatgccttgggagctaagtggttgctgcacttgaccactgtgaagactggtgtgggaagaagggtcgtttctgatgcacttgag

SEQ ID NO: 182850 - DNA, 1640 bp, Homo Sapiens
  misc_feature (676)..(715): n is a, c, g, or t
ttggggttggcagacagcagggcctgggccggcggggctctgcggtgcccattcgagtctctccagggcttccctctgtggctgtccctcgcctgccccctttccttgcctacccttccctggacggggttgttgtcaggtgacggcttcagcaacccagccatgcttggtgtggagtggttcgagttcctccgcgggcccccaccccccacccagataagaagcttaagtcctccttctgcaggggagaatcggatgcaatgaaactaagacctgtggtcgttaacgcggttcaaagccgaccccaactgggacacggctcagcttagaagtgaggaaggcctgggacgctggaaacaaggggtcacacgtgcgtgtgcctggccttcgcaggtggatgtgtgcgccgagctggggaaggggccagggagccgcgagactgcggtcccccgcgagagagaagtatgggcctggccagggttcgaactccgttccttcgctgccttccttttatttttcttcctcatcttccttcctctctcccttggttccatcattaaatctttaagggattaattcacaactctgtagtaggtaggggccctgggaccacttgacgggcctttgcaggcagttctgtacagagtcctaacccgtaacgggcctcaaccccggnnnnnnnnnnnnnnnnnnnnnnnnnnnnnnnnnnnnnnnnaaaagcaacgcataaacatacccagggctttcacttattttattgaagcaaacaaacaaaaacagccactgggtttgtcttttcccctactcctgcctgagcgccgccgggtttctgagctgctccgggcgcggacctagctcacccgcagccggatgtcggagccggagctgctccccacccggcctcgcccgcgggcgacaaaaccgtccctctggccacgggagagcatcgccttgccaaaatcaactcgcattttcatgtattcaaatgagaaagactgagaagggcgatttcccctgctgggcagtcgacagcgttggaaggaagaagtgccccctagggcctcgcggaaacgggaacaaacctccctcgaggcccccggaaccgatatggcgaccccgcccagacctgggtccccgcggccgcgcgcgtctcccgccgttgtggcccccgagttactgacttttgttcacaccggtcagcgcctgttggaggacgtgctcagccccagccggtccctcctcatccagccgatccccctcctggggagcgcggtctctgctctgtgctgctgaaaggatcctcgggctttcccgctctactttaaaacccctagggctaggggcctaggggagggactggcaatgcacgcttcacacaaagaggtggaaaattagagggaaacgtgacacctcttaggtatccgttagagcagaaaggacctgagcagctgaggtcctactgcgtgccacagacttggcagggtgcttggagatcctggcgtttccccacctgctgctcctgtgtgcaagagctgggaggctggaaacctgggcgagggtaatcaagacctccattcctctccatcagcagaagcccgcgttaatgcagagcagtgatggaagccgaggggcttggaaaa

SEQ ID NO: 182851 - DNA, 1388 bp, Homo Sapiens
  misc_feature (305)..(357): n is a, c, g, or t
  misc_feature (630)..(638): n is a, c, g, or t
atcggcatgagccactgcgccctgccttctttgttaattttatatgtttcggttatgtaaatatataactgaaagggtaaatatatataaatacatatttactgcacatttatattgatatatatttctctgcttgtatctatctatatacacactttataaataaatgagtcaagatttttaaaacaaaataccaaatttttcagtatcatttgaaatttttcaaaattacttttttaaaatttctgcatattcattcagtgaagttgaatgatccagtgggcactctgtattccttcataaannnnnnnnnnnnnnnnnnnnnnnnnnnnnnnnnnnnnnnnnnnnnnnnnnnnntttctggggttaatttccttaaaataaaaaggcaactgtcaagactaaagctataataatttttatgaatcttagaaaatgttgaatttttagtgattccagaaattgatctctatcgatgaaactgctttctcaaatacgtcagcaatgggattcaggctttgcttacaatgtgaaggaagttcttagtctcatttgcacaaagaaggaaggagggctaaagataaaaagaactcatagtcttttccatagttttgggtcatgttcactgtnnnnnnnnntcacaagatgccatttttacacagcctttttaatctacacatacggcaagctaataattccaaaaaaataatttctttcctttgtagccatttaaaactaacagctagaaatatttcttcttccaattattaaaaataagctgtttctgagtcggtgctgactacatttactgattgaagcagccaactccaaatataccatcttttagtattgacacttaaaataaaacttctccccagaaaaagagttctataaatgatggctgtagaaataggcactgtccaggcagttgttttgtggaagtagtgttgttattttctggtgttttccaagtcatctcagatggtgcgtgaaaatgagatgccaaagaaggcttaaaaaagataccctgcaccagcttcagaatgtaagcaaatctttcattccagcgcttaaaagttttgagaaagctaatctaaagttaaatgtttactagcatctctccgattatattttagaaactactgcacaaaaataaaacaaatttcttattttctctgggttgaaaagtgcacataaaatggaaaatgctttttataccactatttccagcagggattttattttcatttgtcatttgccagcctggggtatgttgggagaaggaacaattgatttttgaaaaggtgcatttgtgtgaaaaccaaaaattgtgttcaacaaatactactactaacccatatgtggatatatgtgttttatacatgagt

SEQ ID NO: 182852 - DNA, 866 bp, Homo Sapiens
  misc_feature (213)..(237): n is a, c, g, or t
ttggctgtgatttttctcttgcctgtgggggtggacccacagctaggagtgctgtgtgtgcagttggtgctgagtgggctgtctgtgtcgaccgctcccaggccagctttcagggaacccctccttccatctcatgttgcccttcctccctccaaagagcctggcatggtgggcccgccccctgggtttggagggcttgatcattctgtctcnnnnnnnnnnnnnnnnnnnnnnnnngacaaatgagaaacaaaagctaattagccttgggtgtctgcttagccccgtggttggagcaggagctcttgacttccggtcttggaactctcgccaatagtgtgtggaattgcactctcacacctgctgggagaccttgcttttcaagggggtgtacagctcctcaccccagaaaaatttgagatctactggtttggagggaaatgggagataagaatcttatgacttaaggaaaacttattttttgttatcaaattatagtgttccccattgaaaatttcctttaaaactgtaaagatctttaggaagtagagagtggaagccgatgctgttctgttcccgagggtcacctgcagctgttcccgagggtcacctccagctgttcccgagagtcacctccagctgttcccgagggtcacctccagctggttgggtgcatgttcttacacaagattgtaagagacgatctatgctgttctgcctgtattacttgggaggcctttggctcaaatgatggaaaactctgccccaaactcactaatgaataaagaaatggatcatctcatggatgagggcgtccagaggacaagggtggccctggggcagtggttgggttgctgctgtcatcc

SEQ ID NO: 182853 - DNA, 1645 bp, Homo Sapiens
actttgtacaaaaaagttgggtaaaaagaggtcttttgataatctgaagggaaaagtgtgccccatatatcttgtacacacttttaatgcatgacttttagtatagagatgaaataaaatgcaaaatatataattctggagatctcagcagctagttaaaatatttagagaagctgctttatgaagacttagagaatccttgatctcccccacatttcctatcactccattgaaacatggatctttaatattaatacatacatagttttaactaataaacaggttaatcactgagttttatgaactcgattcttgatatttggctattggttttaagcataggatatcagtattatttgtatacagcgttatataaaatctaaccaacttcaatataagaatagtacttgattttaaatgttaatatgcaaatattaacagtatactacatcatattttatgtgttcatatattgatctttttacttaacaaaaagcctgttagaaatataacccactgatgacccgagtccaattagctgaaaaccttctgtagaaaggtgattgtatgaaaaattcaatcaacattaaaaaagggaagtggggagggaatacaaacttgaacaaaatattcttaaatgaagttgcatctctttttaaaattaagatatcattcatgcaccatacggtttatcctattaaggtgtaaacttcaatgtttttaatcatattcactaagttgtgcaacatcaccactccctaacttcagaacactttcatcacctccaaaagaaaccccataccatttgcaatcactcctcctcctccttcccccagcatccggcaaccactaatctactttctgtccctatgaatttgcctatcctggacatttcatatagtcaaacaacatgtggccttttgtgtctggcttctctaagtaagcataatgtttttaaagctcatccatgttgtagcataaatcagtacattgttttcatgtttaaataatattccattgcatgtatatgccacattttatttgtccatttatcatttgatggacatttgggttttttccaccttttgattataataatgctgctgtgaacatttatgtaaaagttttttgtatgggtgtatgttttcacatctctcttaaaaacaattagtctgacaaatcaaatcaaatcatttatgtttatttacgtagaacctcttgcaatcctgtttggagagtgcaacttacgatcttagtttaattgatcaattaggagacctctgaataaagactaactccccaatacatccataagaatttttctatgagcctgtcatttagatgtgataagcaatcaatttcatgaagactgtttcagtcttgtagaaattgagttgccatcacatagaggatttcttgtcctctgcattgtttaaaggacaactacaaatcatgctggataagagtactcattcaatcttttagattcaatgaagtagcattttaaatatgtaagttattttatatattgtctgtcttttaaaattggactttgcttcttgaaaaaagtttgtcaaatcaccaaaccatatgactgtccattcattgtagcctatgttttctattattaagaaataattcatac

SEQ ID NO: 182854 - DNA, 1418 bp, Homo Sapiens
  misc_feature (50)..(64): n is a, c, g, or t
  misc_feature (339)..(348): n is a, c, g, or t
ttggcgaatagattatctcttggtctagttttattgattacttcttgacnnnnnnnnnnnnnnngtttatctcacaatttttgtcacccactgtaaaaaactgagataaattatatttattctctgaaatgggaacacctattcttctgtcaggtcattggtttgtgtttctaaaatatactaaactaatgtgttatgaagctaaggcagataggtgataaatttgtaaagcaattgaaggaaaaactcagtaagtcaaaacacattttaaaagagacacgtttaaagttttttttatataaatggaatcgtgcattatgtgaccttttgggattggcnnnnnnnnnncactcagtgtaatacctttgaaatctctccaacttgcatgtatcggtagttctttcctttttatagctgataagtattacagtggtagagatgtggcacagtttgtttaaccattcacctattttaggacattttggttgtttccagtttttggctattacaaacaaagctatgaacaatcatgtactgatttttgtgtggacataagttttcattttcctgggataaatacctaggagtacaattgcttgcccttataggaggtatatatttaattcttaaagaaactgaacaactgttttcccaagtgatcatactgttttacattcccaccagaaaaagtggatctttcaaaccacaaatgtttgaaagagccactttctccacatccttgccagcatttggtattgtcattactttttatttttgctagtctggtaggtatgtggtggtgtctcattgtggccttaatttccatttctctaaagattggtgatgtttaacatctttttatttgcttagttgctatcccctttgtatatcttctttggtgaatgtctctatcttttgtctattgaaaagaacatgctttcttttcatatgtgcatggaaccttcaccagaataaaccatatccttggtcataaaacaaatttcagtaaattgagaagcatttcctgttcttttttcctgaaaaagtttgtgtagaatttgtgtactctctactgactcctggtatttgtctggtttcagagggtgggagggttttctgcctttcccccaagtggcagcttgcagttttgctttgtatgaagaatagttctaggatatgagtagctaatcatttccttcattcctgtaccataagaaaaactctctcaggtaatctaatctgtcctcatctttctctagagttctcgatgcgcatttgggttgtttgtggggtttactattgcaaacagtgttaccatgaatattcttgtgcaagacttttggtatccgtgtgtgagagtttctctagggcatgttactagaagaggaatttctcaaagtatacctgtgttcttgcgg

SEQ ID NO: 182855 - DNA, 864 bp, Homo Sapiens
  misc_feature (739)..(750): n is a, c, g, or t
ttggctggggcttctctcactgctgttgacttgttgcattcagcttttgggattagttgcagcttgcaacagtggactgacagcctgactctacttccctcacttttctcccagcacacacagcttagtaaggtaggtggattattaaaacgtagctgtccccagaaaggtattaggcttttctagtctgctcattgaataatcaggacaaaaggggtagaagattatgtaaacacattttgaaatttttaaaaattcagggtttcatcctttattagtttgctaaggataccataacaaagtaccacaaactgagtgacttacacaatagaaacttattttcctgcagttctggaggctgaaagtccaggacaaggtgtcgacagctttagattcttctgaggcctctctgcttggcttgcagatggctgccttcttactgtgtccttgtatggtccctctgtctgggtgtctgtgtcctaatcttctcttttaataaggataccactcaggttggattagggcccatcctaacaatcccattttaacttagttacctcttcagggcctatcttcaaatatactcacattttgaggtacaggtagatggttagggcttcagcatgaatttttgtggggacataattcaaccctccacacataattaccaatttctgaatgtctttctggttaagttgcataaaaacgtttatctacttgaactctaggatgatagttnnnnnnnnnnnntgttggccaggcatgagccaccacacctagactaggtggtggtaactttgatcacatggctaaggtggtgtgtgccaggtttctccactgtaaattaggattttccctttgaaa

SEQ ID NO: 182856 - DNA, 557 bp, Homo Sapiens
tggctacatctcaacttaaaaaagccccaatttttcattcgattcaacagaactctgccattctaaacatttctaaacctttactctcaatttctgtacttaaattgttacagaccagttcaaatagtttatagacactagccagaggcccacattttgagtggcacttgtctattgcatctagatttgtttagattatctcatactctaatacaattatcattatttaatcaaaaagtctgaattctgcttctttaattcactcaacaaatatttattgagttttaggtcctgttctgggtacctaggatacagagatgagtaagacatggtatgatattaagggtggtgagttcttggcacagaaatgaaatacagatgaatccataaacagtatatgacatgtaagtgcctaatacaagatggtgatagagatgctcctccacttaggatgaggttacgtcccaataaacccactgaacactgaaaatgaatttaaaacaccaaacctgcccgaacaccataacatagcatagcctaccttaaatatgctcaga

SEQ ID NO: 182857 - DNA, 1162 bp, Homo Sapiens
gtggcccttctctccggaaccaggaactgtagtatctcctgctgcctgcagacaagcttgatttcccactgccccaaagacttccaaaaacccatctgctcttccacgtgacagatggcaaaggagagaggtctccatgctgttcttctgcctgaagccacgccagaaccaccaaagggaaccagaaggggaactccgtccccatctctcaggaaataaggccagagctagaaccccccagttactagtcaggcctcactagagaaacagaaccaacaggatggagggagatgcagagatttgttttaaggaactggctcataggattttgggggctggcaagtctaacatcttgagggcaggccagcatcctggagacccagggaagagctggggatgcaggctggaggcagaatttcctcctcctcaagggagttcagccttttcctcttatagtcctcatctgatcggatgaggcccactgacgttatgaaggataaactgttctacttcaagtctacgggcttacatgttagttacacagcgccatctagaccagtgtttgcttgacgaaaatcaacttggcctggccaagttgtcagataaaagtacccgttgcacccagccacggtagctatgaaaagggctaccaggggtggtaacagctgggtcagacgaagataaggaaggtcagagtggacccctgccagggttccaggcagagtccaaagtcctccatagtaggattcacagcctgggaagaagcccctctctggctacaacctgtgacaccagggccacaggaggagatgcagcgatgggccattcctagtgagacacagacacagggctggctggagaagaaaccttttgagctgtggggctgtcttcctagaagctgccaacccctggaaccactaagaggtcaaggctgaagtgtgccacttccacagtctgctaaggagtgcctccccctgagtcagggacaattcttgctctacttttcaggatccttgggcacactgctggcccgagacatttacttcccatttaaaattaattaatcaaaataccagggtcgattgatatttgcaataacaacaaaaattactctgaactcttgcttatgtaaactttagggataaaaactgtagtaacacac

SEQ ID NO: 182858 - DNA, 1032 bp, Homo Sapiens
  misc_feature (121)..(171): n is a, c, g, or t
ttgggaattaacggcctagaattatctatctctgtatttatctatccacccatctatcatcatcatcacctcatctccctcctttctctctctctaaatatatacatgcgggtatgttgannnnnnnnnnnnnnnnnnnnnnnnnnnnnnnnnnnnnnnnnnnnnnnnnnnattccaggcagatgtgtgcatatatacccaaactttcctgatgaccttgaaattaaatgggtcatgtgaagctaaagattatagaaccccttgattcctttataaacagtatttctaagataagatcaacactaatctttcaaattagttgactgtgtatagaacaacttgtttatttaaagtcatctagtctaatgcaatcaaggagtaaattataaataaccagttagcataaatggaaagaaaatagttccttttctttgaattcatttcatgtttaatttttcttgcgcacatatagaaatgaatagaaatattcccatttcaatatgcaaattcagccactatatagtttgtttctttttggtagctaataataataaatttttaagtaagatctgattttgaaatatgaaaagaagtttatcctttcctgttttaataccacctgatacccgtttaacttactgtgtttgattcttggggacatttatgttcaaggttctgtcaaagcaatctattattcttgtttttacctgatggatcatggagaaaaataatggattcagttatgagaaacagtaatagatttttttaactgccataaatttctctccctgtattaaataaaaggatcaggaaaagataagttgaatttttcctacaatgagccagctcttcataaatttacctcccataaattgtagcaaagcactttttcatataatgttttatttcatgtaattctgttacttggagatggtgggtgaggggatgggaagtactcatttccatgtcgtatttccaaatcctcttttgacagaaacccaagatttggcaataataaaattcaatggtccc

SEQ ID NO: 182859 - DNA, 1300 bp, Homo Sapiens
  misc_feature (882)..(893): n is a, c, g, or t
tagtttatgcttttgcactaaactgaatagtataactcccaagttatattaaactgaagccttcattgtgatcaatagcttggatcagtttagagcgtagagtttctttttctgtatattttggaagatccagaagattaaaacaagtatgggaaactgggagatactcctcaccacctcctgtggactggatgactagtttcagactcttcataccaagaataggaatgcgatcactacctgtcaaaaataacagaaactgtttcttcttttccaatggtaattcgtgaaatacttcccaaaaaatttttatcgtaggatgttctgcccaatattcccctttgtattctgtattctaaaaacaacataatcttttattagtattaagggacacactggctaatatattagcacataaagctaacatggtccagtagtttgcaacttgtgcaattcaatggattgcccactgttttctggacatttacaatttgaagctattagttccaggagaaaaagaagaaatacgtaagaatcaccagaaatctttcctagcacttcaaagaacatgataggatcatactatcatcttcaaaagtaaataaagagaaactagataaaataatgttataggaccatcaaaagtctgacatggaattatctgtgataatcagaaaattccctttctctgtattcatgaacagaagtcaaaccattacaatttatctctccttttaaaaatatggtactaagcaacactaaaaattttctgaggtagtttccaagatggccaccagtgagcactgcctcctggtattcatgcccgtgtgtataaggatactgtgaatatgaggaatgtatgacttctgagactaaatcatnnnnnnnnnnnncctctatggcttcagcctttcttctggatcactcactctgggggaaaccagttgtcatttcatgaggatattcaaacatccctatatggagagaagtactcatggtgctatactgaggcctcctgccaacagtcatgtgagtaagccaccttggaagtgaatctctatccttaatcatgcttttagatgcctatagcaccagccaatattctgactgcaacttcatgagggaaccctgagcccaaactactcagctaagccactcctgaattcctgacccacagaaactatgaaacaagagtttcattgttattttgaagccaataagttttggggtaatttgctgcaataggactaaaatatctcccctgtcaaaaatattagtactggccgggcgcggtggctca

SEQ ID NO: 182860 - DNA, 748 bp, Homo Sapiens
  misc_feature (359)..(613): n is a, c, g, or t
ttgggtaaatcctttccacctctggctgaaggagtggtgcagtcaatgacttggccctttttctacagcacatttagagtttgggctctggctccctcagtaagtgctttattaactcagtgtgtcaaaatgaaaacagagccctccttccccagtagctcagtgccacagaccttcagccccacacagctgtagctatccttaccctgagtccatctaccttaaatctgtacctctgacacccagccagtctgtcataatcattatcccagttataaccttgaccaaaggggaagagagacacttgggggatatctaggggatgagtgctagaaactatatttatttttgagacagannnnnnnnnnnnnnnnnnnnnnnnnnnnnnnnnnnnnnnnnnnnnnnnnnnnnnnnnnnnnnnnnnnnnnnnnnnnnnnnnnnnnnnnnnnnnnnnnnnnnnnnnnnnnnnnnnnnnnnnnnnnnnnnnnnnnnnnnnnnnnnnnnnnnnnnnnnnnnnnnnnnnnnnnnnnnnnnnnnnnnnnnnnnnnnnnnnnnnnnnnnnnnnnnnnnnnnnnnnnnnnnnnnnnnnnnnnnnnnnnnnnnnnnnnnnnnntgagccaccacacccggccaaaactgtttattcttgagaagttccatcttcatttctgccaccagttggaacttcccgaggaaggaaggaggcctgaggttttgcacaatctgtttcagagcctgtttagactca

SEQ ID NO: 182861 - DNA, 1291 bp, Homo Sapiens
ttgggttctggttcccgccggcgaggattgttaaaatgagtcttcggaagcaaacccctagtgacttcttaaagcaaatcatcggacgaccagttgtggtaaaattaaattctggagtggattatcgaggggtcctggcttgcctggatggctacatgaatatagccctggagcagacagaagaatatgtaaatggacaactgaagaataagtatggggatgcatttatccgaggaaacaatggtaacatttcttcgccctacagtacagcattcaaaataagcctttctatttataatccagatcaccaaagaggtttctagataatttaaaagtccacttttaggcttgattattttaaaatgcttatatgtcagatcttcagtttgaccagttattttgtagatgcttcatggaattttgaaaccaaaattctctccttcccttcctttagtgatgaggaactgagggacattgttctccttacctggaaccctgctttctcgaatatagtgtagtatatctccccaacacatattcctgcttcttgtagcctggaagttggagctgtaagaatgggcaccgtttccctgctgtctttgatttgcataatttggcagttcgtcctatttgtcccttctctattaaacattcagatgctttctatgcagatttgcatccttcggtttggcaaaaatggcaaaatagaaaaagttactcagtttttaacaactaataaattgctatgatttttatagttatttttaagtacctagtttaaaaatgaaaattataataaagtcatatttgtatttttggtggggagggaaagatatcagaattatgagaattaccccactttttggttccatctcccagaaactctgggattcttgagttcagattttttgttgatttctttaattctggatgtcttcaaccccctaaatagttggatctctttgctataaactaaacttcctgacttttataataagagtctgtcccctatgcttacaggaccttatttcttcatatcatatttttacatacattatttcctggctttctagtcctttctattatagaattatttatcctatttttcatatccttatttgacctcctctttttcctaagaaatgttatgatcttgtctcacctcaagacagctaatggcagcagtcactggcaagttgggttctgtgcgtgttgatagggtagatcctttaacgtgcacactacccctagacttggggggcaggtttggggggcggctgtactggcattc

SEQ ID NO: 182862 - DNA, 539 bp, Homo Sapiens
ggtaacaggcatgagccaccacgcctgtcctggaatgtggggatttctgagtactaaactaaagccatgctgataactaagcatagtgaaagtagacatcacaattaaggtagatccttaccaagttttccatgctaaaatgaatcaattttataattgctgtaagacctaaatttatatagagcaaagtaattcagtagcatttaccagaacaggtttgccattaggtagttcctgtgacaaatgtttaccaaatctcaaagagcttgtataggaatgtcatttccttgcctagaatttctgaatatatgggcacacttatatatatagccttaaaaatattaataagggcatttaataacttgattcattaccttgatcccattaactattttccttgatagatcttatgttcctcaagtggggattctcttgccacagaatttggagagagaatatagtttatttgagtattaattatgtttaatctcttctttattcctacagcttaaaattggaattatatctattaattttga

SEQ ID NO: 182863 - DNA, 1302 bp, Homo Sapiens
  misc_feature (1193)..(1220): n is a, c, g, or t
cccttataatagccaactttgtacaaaaaagttggtgaaaactggctaaaaataccaaatcaatatactgctaatggtactttgaagagtatgcaaaactggaaggccaggaggaggcaaataatatgtctttccgatggtgtctcccaagtgttggtgctttgggtttttataagttgtgaaaaggaagatgcacatttcttcattctccatggtgtgcatggaaatgtgtttgagtgtggatgtaaaagaaatcgagtaataaagaattagctggcttgtgaaatagtgcagtgttggatgcttcaagaggtataatcctattttattagcacaaacttgctagctaattagagtttatctttttagaaaggacaccgtataggttcgtaaaaaatatttacaggaagcaaaatagatctattactactttaccgactttaccccctttctttaatttgtataatttttgtactatatatcgatgtgtaaatgtttagagtcttcattatgaaaatatcaataaatatttcattagtttacatttaactctggtataaaatgaaacttttaaaaataagtgaaatggatgatttcccagtggaagtatgtcaacagtcttaagatcattgccagatttcataaaatatttaagtatttgaaaaagaaacaaaatgtcttcatactttagggaaacgaataccctgtataccttctgtacaaatgtttgtgttttcattgttacactttggggttttacttttgcaatgtgacccatgttgggcatttttatataatcaacaactaaatcttttgccaaatgcatgcttgccttttattttctaatatatgataataacgagcaaaactggttagattttgcatgaaatggttctgaaaggtaagaggaaaacagactttggaggttgtttagttttgaatttctgacagagataaagtagtttaaaatctctcgtacactgataactcaagcttttcattttctcatacagttgtacagatttaactgggaccatcagttttaaactgttgtcaagctaactaataatcatctgctttaagacgcaagattctgaattaaactttatataggtatagatacatctgttgtttctttgtatttcaggaaaggtgatagtagttttatttgatactgataaatattgaattgnnnnnnnnnnnnnnnnnnnnnnnnnnnncaatggagtagtataggactgtgctttgtcctttttatgaatgaaaaaattagtataaagtaataaatgtcttatgttaccc

SEQ ID NO: 182864 - DNA, 881 bp, Homo Sapiens
  misc_feature (454)..(462): n is a, c, g, or t
ttgggaattttgttaatgcattaaattctatgttttgtgaaggcctgaaacaggcaaatttgtgatcagtagtctctctggagagataaaggaaaaagagaatctgtacattcatttctccttcctaaaatacgatgatctatgtcttcttgactacttagctttgagtttgatatagaaagagtataaaaaatatgtgcagaatttgggagtgagagtactagaaattcctttaataaatctgttagtatgaatccaagcaattgaagagaaaccgctcttcaaccatctgtagaacacttccccggtatcactacaaagaactttcttccagctatcatgggagaaccaggtgtagctcccgcttcatgtgtaaaataatgatgccctcatgccaagcctgaaattcacattaagaaaatgcccagtaactttacagagcaaaattttaaannnnnnnnnatacattgcaccctttatctctaatggctaaaatctttgaacaactactaagtaactgattacaaataaattaccgagaaagcaagattacgcatggtaagcggagagaattttcactgtagtgtcatcccctcacaggcttgtgtcataggtgctgtgccaggcagggtgatcgcagtgtaaatagccattgaatgattgcgattcccagcatccatctaaaaagcaatactctgataatttggataaagcaacttcctgcttcttataaatgcgcagtcaggtgtcccaatttataaatcaacccagtttacttgagcttgtgaataggcctggacactgatttgttaagcgctagatgtggtaaatgccatgaaaattggccactttgtaaatagaagtagtgttcacatccattt

SEQ ID NO: 182865 - DNA, 948 bp, Homo Sapiens
  misc_feature (288)..(302): n is a, c, g, or t
  misc_feature (544)..(579): n is a, c, g, or t
ttggcaattttcccatagataacaccaataaattgagggctgcagagaccacttaagtggttctcttaacagtagtctagacatgacgtaatgagatttggcttaggagtgacaatggtaaggaagttaaaggattcaggaaccaaataccagttattgagaagaaagaatggcctcaaaacatcacttctcaaggaagccttgataccctcacccttactacactgtatcctccatttgaatgttgtcaagagctcttctcacaattgtaaataataattgtgtaannnnnnnnnnnnnnncctactttaggttgctccttgagggcaggacagttcttatggctttatccgttgcgtaagcacagagaggtctgcgaggtcaaaactattgtcatgatagcaagatgcctgtctttttcatttattctcacggtgtgcagaggctacatgatgtgtgatgacatcctcattgatgttaatgaatggtgctatacttgaattttctaaggtgtcattaggtaggtttaggtatgcatacttgnnnnnnnnnnnnnnnnnnnnnnnnnnnnnnnnnnnnagaaatcaactcattttttaggttatgccttcagtaatctttgcaacctcaatattgtgtaatggttactttaaaatactgtagttttctttgtgcctaagtataaacataagtacattttgttgttttgtttgcaatagtggtttaaatattttcccaaaatatccaaatttaaaaattctacaactttagaatttaataaatttattctaaaatatttatatattttttcatttaagaatggatcgggcttaaaaagactgcttctcatttacttactggctataccatctgtatactaataaaaaacaagatttgatttgggagggactgactcaaactaacgaaaatatgaaacctgtctttctg

SEQ ID NO: 182866 - DNA, 1208 bp, Homo Sapiens
  misc_feature (167)..(220): n is a, c, g, or t
gatgtttagtgtcatgcacactataaatccctttggtgtttttcagcttaactctcttgacaatagaaagtgcttttaagtatgagttattgcttctttacttaaaaaaagtactacgagacaaattctcctgtgtatactactgattataataaatatagcattgnnnnnnnnnnnnnnnnnnnnnnnnnnnnnnnnnnnnnnnnnnnnnnnnnnnnnnctcacttcagtggagaaataaaaacaaaaacaaaaccttactcattttttggtgtaaaagtagatcactaatgaattgtttgatttttatccattatagtaaataccttttaatttctattagcaacaaacgtagaaacagttctcctattgcaaaatcagtaatattttcataaagtagtctgtagaccttaggaaggactattatgatcagttagtgatagctcatgttagaaccttgacaaattgtgaattggggaatgttcctgggcagtcagtaatatagcaatggaaaagaaagaaaagatcaggtaaagttgggctctttgcctgcctttaatttgcgttctaaaaaatggggatgatagtttttcagagtgtactcacatatgattcatatgattctgtttccctcattgtgtgtaagcaaaggcattgcacaatgaaataattgctgatattaaattcaggattcttatttatgtagtatacctttttacaacattcaatgtaatccttttagccaaattttttcttaaaaatttcaaatcttatatatcaatatatacttgtataactgctctaagtatacacacacatagatatggtttattataggatatatgttgatatcttataaaattttgatttggaatatagtttatatgatatattctgtatgagagccaaagttattgacattgttttatgaagatgtctttaaaagcaaggtccccttgttttgtttccagtgtaacgtgattttaagctatatatttggtgtattgaaatactggaatatgtttatctgcgtatatccaatcagttcactcatttctctttgtgccatcatctctcatattcttaaatacccctatcttagtagcctagacagttatttaactttctttatagaaaatataattaattatatcagcaattcatatctcagtttcaaaggtaatataagaactttatatttgactttt

SEQ ID NO: 182867 - DNA, 1035 bp, Homo Sapiens
  misc_feature (920)..(930): n is a, c, g, or t
agaatacatttcatttataaaatacctgcactagagtaaaataaatttactcaattatgaacaaataaaatccagaactaagttacattttccatttttccttcaagaagaaaatctcattttttgttttatttcaccatctattttatagcactcataaaacaggaatttcatctagtaagcaaacatgttattgattaaaatgattaatagtgttaatatggagctacccactattaaaaatataaatgttttaattctgtctgtaccattcagattaaaaccaatcagttgattagttattgtaaactggagcaatttagtattacctatgtgtttgttcagtactctgctgaacactgaaatataaaataggaaccttaaagatctaactgggaattaatattcataaaatataagtacaaagtaaaatataattatagttcttatctattggtgctaactatatggattgtattgactcaggagatcagtaaatcttgaaaaaagatgttatagtgaatatgaagtacatttgtgttgaattaaatataaagcctgaaataggccaaagatgaaattactgtcaagatattttctttcttttttaaaataaattttattctttatatttgaggtttataacatgatgttataggatacatagatatatatagatcaactttcttatttcagaatggtcaaaagcaagattcagagatttgtttcaaaaaatatttgcttcaaagtagttcagtgagtggtagataaagtgagggtataaatgaaatgagactggtaatgaattaattgttgaagctagacagtggatatatgggggcatcattatgctattatctccacttgtggatatgttttaaattatccataattaaaactttaaaaaaagaaagaaaagnnnnnnnnnnnaaatttcaaacaagattcagagatgttgagtggctttcccaagatacattgatatccttgctaatccttaaattctaggaaggattaaaagaaaggaggacaagt

SEQ ID NO: 182868 - DNA, 902 bp, Homo Sapiens
  misc_feature (135)..(180): n is a, c, g, or t
ttggcttaaatattataatcaaagtattttccgtgtgggttgggttatagcaacacactataatgttctctatccaaaggcatatctgcaagtttgtctcagatttctcttctttcaaaaggccatgtttaaaannnnnnnnnnnnnnnnnnnnnnnnnnnnnnnnnnnnnnnnnnnnnncatttatatgtggtgagaaaaactcatttttttcctaatctcttttgccagtgaggcaaactactttgtaaatggttgcagaagtgtgtcagaggtttttgaagtgatgtgggctatttgggaaggggggcatgatgataagagagcgttatggggaaggttggagtgtatttgaaatggcgggggctgtcggctcctgttctctcccaggctccccgggctcttgctctgtgggtttccatccaggctttcctggatcctcaacgaggggcactgaacaagcctctgctaccggcccctcccatcatcatttaagcaatcagagcttctcctccttcccacaaaacaccagcaacttcagccagagttcctcctcacgtcccccgcagctgcgtccgcacctcttttgccatggccagacccttgcgagtgagccgtgctcgctcattttctccacttcttcaccgcctgtccacggggctggaattggccttggcaggtcaccagtgacctcccgcagccagacctggagggggaggcgtccgcccccgtcctagcctacctccttcccactgcccctaccttctggcgaggaccacttcactctctttccccggcctctgggccatgctcctcctttctctcctttgacgtctccttgggctcgtcccccttcgctgacccctcaaatagtggcttcttcaggacttggccccagcccc

SEQ ID NO: 182869 - DNA, 473 bp, Homo Sapiens
  misc_feature (316)..(365): n is a, c, g, or t
ttgggtttttgtcatttgcaccagcttctttctccaggaaagatcaaaacgatgcactgcaagtgtgattggtccagatagctgccttatccaactgcctcctttggaccacttcatcatgggacagcttgatgcaatctacttgacaagaccctggaaccccacacccctcatggaaccagtgtccacctcccagtcacagtgtgaccccagggaactcttgcctgcttgctttaaacccaccacttaaaagtctccacagaaaacctgtttgaatagtacccttgacccaataagggcattggcccctgggtgnnnnnnnnnnnnnnnnnnnnnnnnnnnnnnnnnnnnnnnnnnnnnnnnnngctccctgacctctgcgtgtggactccaggcatgccatatacccctcaggacctgaagcaaaagaatgaattaaagataacctaagataatgaactgacaacctactc

SEQ ID NO: 182870 - DNA, 820 bp, Homo Sapiens
ttggcttcatatcagcactgatgtagatggtcttatcctcattttataaatgaagaaatgaaggcttacatagtatgattggtgaaaggcacaaggctgaatggcaccaccaaatgtgctattgtgcctgtgtccctggctctaggaatactcctagacctgcctcaaagctgccgtctagttcttgaggcactttgtgatcagtaggttaatccttctgacttaacccaaaagctttggggctccactttcttttcctctctgaagactgacacagctcccagataacccctccccactttgaggacttgatgctgtagatggttttaatgaagccatggccttctctggcaatactgtaggccatcggtgctcggaacttgctcaaatctatagcaaagcagagagaagctcaacagcagcaacttcaagccctaatagcagaaaagaaaatgcagctagaaaggtaagaagtcatgatgtaaagcaagttctttacacagctgaatttccactcttccttctggaatgatcacttcttgtccttattcttcatcattgttttcccaggaatagcatctcacttgtcatcctgatttgaagattttaaaaaataaaattacatttgatgggaaggaaatagaaaacttgttaatatcaaaccacctctagtagtttgagcatgaaagggtccacgaagttggctggctctctgaaagaagactttcctagggctggagatttctcatgggtggctctgggtagggctttgcctctttctttcttcattctgaactcacaccatttcttgaaatcattt

SEQ ID NO: 182871 - DNA, 1380 bp, Homo Sapiens
  misc_feature (445)..(523): n is a, c, g, or t
gtaacatcttttacatattgtattttagaacaaagctttgagaagacaaagcaacacatcagcagtttaaccaattgtcttttctctttaacaggctggtctacattagattagatataaaagtctcaggtacactttgtgctcgatcttagccaaatggctgagaaccagccaggtacatttatatcagtgacaaaagaaaacactatcctttaataaaattacataaaataggaaacatctcttactttacgagcaaccatggtacttcttcctatggtgaaaactgatgttatctcgcttaattattcatcccagcacctggccttgctcccttttccacctctagctatgttaacactagagtccaataatttgctgataaagaatcttaactgcagtatctaacagatcttagtgattaagcatatgatttaccctttgnnnnnnnnnnnnnnnnnnnnnnnnnnnnnnnnnnnnnnnnnnnnnnnnnnnnnnnnnnnnnnnnnnnnnnnnnnnnnnncacctgtccttcctgtccacatgtctcaccagaaaaacagcaatagtgaaaagtcaactctgtttttaatgggccactttgtatattttaactgttaaaataatccaagaggatattagtcatatacgaagatcctttagatataatgtgtaggaccagcgttaatttaatcaaccaagtctcctctcattgaattattaattcataattacaaagatgacattacagtaaattaagaaatactgtaatttcattctctcccaaaaagtatacacttaagtttggtgattcactgttatattttcaactagtaaatcaatgtgctaattctggggcttaggtatattgcatatactggaatgatattcactttaaatgttttgagatgtataatgtaatacagatcctacgtgtttttaaaggttcacatcaatttcaagcttttaaaaatgtatgtacacaagaaagcttcttttgcaatttatatgtttataaatgtttccattagctaagatatattttggaatgtgatcaaacaatattgaatgtcaagtcctaacagcagggctggtctaaggaattccctctaagctaaatctggtacttctcatatgtggctactgctcttttaaactactgtgtccctaaagggctaaaaggaagaaaatcctaactcaacaagtgaaggtagcaaggcatagtatttgaatggctacctttcattttaactctacttcctaaattcaaaattggatttgggtttgtttcaagttgttcacaatttactaacgaaatgtgcatctctcattcttcccccaaaagaaagaagtcatccactccaggtacatataagccaa

SEQ ID NO: 182872 - DNA, 1704 bp, Homo Sapiens
  misc_feature (1237)..(1379): n is a, c, g, or t
ttggggcacaatttaatgcataattgggattggatccatttactgtactgtggtacagtaaagagaatgtgttcttattgaacagcagatttgtatacaaatacggaataatgcaactacattataaattgtatacgaacaaaataaattgggtcactctgagcttactattaaaacattgaaaatttattaatgaacacaggctatcttgatgaggatctctgcttatgaaacacatactaatgaaattattagtgacacattggaagctagaaaattgctgttggggccattgctataaatcattgtttccatgttaagacttctgttctaattcattcattcaacaaacatttgttgagggccagatactgtgctggtcaactggggatactgtcctgaacaatatgcacacagttcttgcccctgcagagcttaaagaccattaaaggatacagaaaattaagcaattatcctatagtaggattcgtggtgtgatggggaaaatacaaggtactgtatttgggagtcatgtaactccagttttgggtgagagagggtctggggaagaactgttccagataaaaagatgtgtaaccaagatagcatagcacattctgacaactaaagcaatttactctaacttaagcatgaagtacaaaagtatagttcatttattgagggaatgttaagctattaaaatgatactttttggtacttttaaaaaaatgaatacttaaacaccgttttaaaattttgtgttaagagctcctaataagaacttggtaaacatgttgacaatttaactcacagtctaaactttaaaagtagtagttacccttttatttctgtgccatgagacaaattcttctgcagttttatagttgtacaagatgttttgactcactctcaattgccatattcttaaagaaaccctgaaaagctgctcaagctggtcagttttctgtaaaaccaagtaaatgaaattttctctcccctcagaaaggaagttctacagcctagagtaccatctattgtgttttataagtccagatttaggctttgaaagatcataccaaaacttcagatcgacttaaacagcaactatgaattaggtttatgggaaatgtagtaatacaggggaaagaatatcggtaatggagtgaaatggtcctgggttcaaatccagtcttcctcacatattgtgctctttaagcttcaaatgagatgtataacnnnnnnnnnnnnnnnnnnnnnnnnnnnnnnnnnnnnnnnnnnnnnnnnnnnnnnnnnnnnnnnnnnnnnnnnnnnnnnnnnnnnnnnnnnnnnnnnnnnnnnnnnnnnnnnnnnnnnnnnnnnnnnnnnnnnnnnnnnnnnnntccccttgttagcccctgtagcatcctgacctaccaagtctataggccttgcatatcactgtgcaccagagatacctcttttacatctgggctctgttttctctctatcaatcctatcctccaccctctttaaatcagaccccaggtttaaccttcccacagtcagtataaatcatttttcagaactttcagctttccatcaagtgaaagttgattttagttacccagtaatgtacagaaaccttcaataatgttaagcttcaaaggcttctggtacgtttgtctaccacagaaccaccacaatatatatgcttgttcttagttt

SEQ ID NO: 182873 - DNA, 1035 bp, Homo Sapiens
  misc_feature (861)..(869): n is a, c, g, or t
aacagaacaacatttttttgatgtggattttaaaatgcctccccttctttcaacattaagtcccttctacatgccaggcactgtatgtgtgaaatagtcccaactctcaatgagtgtaggcagatacacaaacaaaggcttaaggaggtcagttttctgagaccatactgctggacagtatatgaacctgggatacaaacccacctctatttgacctcaaatttgatgctggggtggttttaattttattctgggaatttcagtcattcaaccataaaaaggtgaaaagtctctgtcagatgtgcgtgtagtggtctgtataataaagactgaaggaagcaaccaaaccaattaagagactttctctaaaggcagagtaatgctaagggcagtggcagtgacaaaagtggaggaaaaaatctgtgatcatttgggagacagaataggaagtgcttggtcatgagatgtgaaagaagaggggaagtagaaggaaaacagagctgctcaggctctgctggggaagactgggtatgtagcagtgccttcctcctggccgagaatgtaggaagagaaataggtaaggaggaaaagatagttttttactctcagtgtcacattaaaatggaactctctggtcaaaagttgaatataaatctctgtaggctaagtccatttgtgacatcccaacatatgttttcaaaaataacatactaaatcaagccattaagtgtaactggggaaatttcctaaaatttacatgctaaaaaatcaccatttttcatttattagtttcatggagcaactttgaatctatggttacagcaagtgagacaccctgtataaaataaaactaatacatgnnnnnnnnncatttaaaattctattgttctcagagaatggagaaagcaattgaagccatgggcgtggaggtgactgccttgagaagttgtgtatagtaaggagaactgggaagaaagaagacctggagaatagggtgatttacacggcattaagtgaagcttgcaaaagtgccaa

SEQ ID NO: 182874 - DNA, 1236 bp, Homo Sapiens
ttggcaaaccctggtccagccacacccttggccacgtctcagagctgcctggatagagtatttttcagatccccaagggctggtgcctttttgcttaatggtccctgcctcactgattgtttccctcttgcattctgctataagtagcaaggagaagccaggtggcaccttccacactgcttggaaatctcagcttgatgtccaggctcatcagctgcaggtcccacttcgcacccaacagcagagcagcagccagccaagctctctgctgcctcctccggttcccagtagcacggtcatttccatctgagacctcactggaagcacctgttgggtcggcattgctgccgacatccagtctgtgatgctgtgtgcattctccaagacggcggcagctctcctcttccagccatttccaggcttgtcttcatgcctttctaccagcagtcgtgcaggcctcaccagttcttccagcctctccccatcacccacttccaaagctgctgccacagttcttggtgttaggttttggcagcacccctcctggcccttcctggtaccaaaatctgttcgtttactgtggctgctgtaacaaagtgtcacaaactgggtggcttaaaaaacagaaatagattgtcttagttttggaggctggaagtccaagatgaaagtactggcagccccgttccctctgaaccctcttagagacctccgttgccccccagcttctggtgtttgccacagcccttggtgtttcttggcttgtggccgcgttgctccaggtggtctctgtcttcgtgtggccccctccccgcctgcctgtgtcttcctgtctttccttttcttagaaggaccccggtcagttgggttaggatgcacctcagttacatctgcatcaaccctgtttgcaaatatggccacatttccaagcactgggggtcaggaggcccctgtagccttttcgggacacaccttatgatgctggccccattgcccttccatggtggctgagcaggtggggaccccacccagtcctgtgctctcgctgctcacctgcctgccagggtggggtggggcaggtggctctgggagcccctttctcactggtaccaggtggcagagcccacggggcctgagcgccctgcagccgagctgcccgtgctgaccctggcccctctttaggccatgcgggaccctcaattaggaagcacaccctgggcccggatgaaccatgga

SEQ ID NO: 182875 - DNA, 1441 bp, Homo Sapiens
  misc_feature (205)..(251): n is a, c, g, or t
  misc_feature (262)..(286): n is a, c, g, or t
  misc_feature (538)..(600): n is a, c, g, or t
ttgggcatattgttagtacttgccaaatttggttatgattccacctccattttccaaatgctcttcacatccagttcatctgaggtggcatcacctagtaggtgaaagatgggaataccaaatatcaagcatggatagtcaccatctggatagtaattagggatggatgtaaactgcaaacttaaatacaccatcttttgttttnnnnnnnnnnnnnnnnnnnnnnnnnnnnnnnnnnnnnnnnnnnnnnntgctgtctccnnnnnnnnnnnnnnnnnnnnnnnnngaatgttttaattctttagttccctgtctgagattcactggtaagaagaaagttaaagaatctcctttgactttttttgatatagatatttaaattctattactttatagtaaggttggggtttattttctttgctttataatagaagagcattgattattctctttgctttataatagaataccatttaaataggagttccctgagtgtgtttacaatcatttgatctggctaaactattttaatgttaannnnnnnnnnnnnnnnnnnnnnnnnnnnnnnnnnnnnnnnnnnnnnnnnnnnnnnnnnnnnnntcacctgctttttcactatgtagagaccattgtctactatttctcaattctgtgttacatctgtatgttaataactgtaggattagggactgagtactgtttttaacctgcttttaaaaaatttacatctacattttttcccatctaaatagtgaggaagagtatcagaattttgtaggcttgtggtgatggttaaattagataatattaatgttgggtacttaacataatatatggctcttaatactctccagatttcagatatagtctgttttaccattactgcctttttatcaaacctattctcaaaaaagtgagaaaagtgctgagattacaggcgtgagccaccatgcccggcctcatggttctttcttaataataaattagaagaagtagaatttttagggtcaaaaagtatccattttaaagctttcaatgtaattgcctgtttatcttctagaaagtttgacctagttgtattttagagtgtcattttcttgaactttatcatcattaaagttttaaatttggaacactggcaatttgataagtatattaggattcttcttattgcaagtagcaaaatacaactcaatctagtttaagaggggaaaatgtagtcattggctaacacaatctaattttggtttaagagacaaatctagagtctcaaatgatctcagagtgtaataatccctgacttttgtcttgatattacttggcttgtatacctttgctctatttgcatgctggccttactctgccactgacaggctgtctgtatggtgtggaagaggacggctagcatccccatacctgcatccatacagttttgtaatat

SEQ ID NO: 182876 - DNA, 1047 bp, Homo Sapiens
ttggcagatgttgataaaagcaatttttttctaataagctgtcattctataattgcccatcacagtctttagtgaacacatagaaagcctatacagttttggtcctgaatagtctcttgtgactaggatgattgaggtgttaattcctcttccttataaaaaggcttggaatcaaaaatattttaaaaggccgtggtttcgtttcagacatcaaccatctaaaacgggattttaaagcgatattttacaagaatgaaaggcacaattgttgatctgtattttttacacttcagtttctaaatcatgaatcgttgccttccacaggaaccctcccttatacattacttgagtgttgtgtagtttttcttcagccaggtatttctctgcctagagaggggaagagaaatgtgttctccaggactgatcccctttgtagattttgtacctgaagagttacctggcagggcaccacccttggctaggcccaggtgtatgtttctttcttgcctggcatggaccccgaggcaggtgatgtggggcctggcgcacctccccgctttggcagctgtggcctccctggccagtgcccttgcaggaggccggccggcagcctgatgacccgcactctttagtcactgacgtcagattatttttataacgttccctgacagttcagagtcccttcgaattgcacttttctggtttcgcttatttaattaaaagagatgagtgtaagtataaaaaatgaaggtgaaataaccattggaattgtatttggttacttaatactgttccacaacatcttgggacgtctgttttcctttggagagtgaggccttgttattattcttttctgataaagaaaacattttatttcctttgggcttgcattagctctttcctagcaacccattatcccagctcagtacctttcaaacagaaaactagagtctggggttttgttgtgatctgaatttgtaagttattaatgtgaaagggggagcaggaagctcccccttttgcacaaggggggaattgtttgcacaa

SEQ ID NO: 182877 - DNA, 535 bp, Homo Sapiens
gatcacctttaaaaaaggcatggtttcataaaatacaacccggctacatataaattctagcggaagattttatggcacctcttaaaggccaggtagaagagaggcaaccgaaagttactcagtagaacagtacagtcctcatttcttcaaggcagacagccttaaccacctagaggctgatggcctggggagtacttttcaagttctgaagcagatttgtcaaagtagccaaaatggcatttccctcctgaagattcttcactacctcgattcttatgaaatagtctaaggaagttctaaagaaataagacaagtgaattctattttcgttaccagagaaatacaatcgtactagacggggctgtaatctggtaactgtatgtattttagttcttcagtccctgggaaggagacaggagaaggtgggagggaggaaggggccagctgaaatggaaacagatccctgatccggggcggtcagtggaacccttcttggtgtgcgagagcctgtgcatttcagaggcagcaaaaaagt

SEQ ID NO: 182878 - DNA, 1111 bp, Homo Sapiens
tgcacccgtgatttgggcaaaattaatgattatctgtttagtcctctttatacatctctcattataacttattatgctgtaatgtaattatttgtgtgtctctttccaaacaaaccatgagattcttatcaggacatatacctaccccacccctgcccagtgcctgttattattcctagtacaccgcaggagtaatgtatataaaattgctctactgaattgcctggataaactcagcctttaagcctaagaatgaatggatcctggagccctaagatttcccaattcatgacaaatccttcctggggtctagaacattaggctgtactagaaattcagtaaatatttgtacttgagagcttaagtatttctttgtgccaaaccagcaatgcaactgtatatctttagagcttccactaaaggaatcagttttttgcaagtccaaacacaacagttctttatcctcctcctctacataaattggaaaatagactgagaattccaatcagctgaaaccttcccagagaagaggacttggttgtttactacagttcaaaccattgctatctaaatttcaatgttggtggcatattttttcttttggcagctcattctgacttagggcggatgcatcatgcaccgcaatcagagagcaggagttggagtcaaaagaagagaatgagtcccagacactgtcatgccttattttttcaggtgaacttggacaagtcatttaatctctctgaacttcaattttcagctgggaaagaggaaaaatgctacctgtcccaccaggctactacaggatcaaatgagaagtattccttactgcattgctctctgaccttaagaatttgaccttctctgtagaagtccatatacaaaggctagaacagagaaacgacagagcagtaaggttcgaatcagacaacctgagattagtcccagcttaccactcaattatgtgatagagcaaggcatttaattctctgaacttcagattgtccaatctataaaatggggataatcccacctgccctacttaccttatagaatcattatgaagctttaaaaaatgagataatatagatgaaagcaatttatttgtaca

SEQ ID NO: 182879 - DNA, 1383 bp, Homo Sapiens
taaatcaaaataatttttattggttgtagaatgttgtagtacataaagcaaaaatgtgtctgcaggatactccaaatttaccaacttcaaacaaaataatgcacagtgaagaattagaaaattatcaaccttactcaatacatggaagtattccttaatcttcatcattttcattaaacaaaataatattttggatgagttcaacatttctatcctatgctttatgtttagtgccttccctgaattggaaaaaatgaggtgttttatttaaatttaacactggtctaagggagatatagaattaaactaaacaagaatcggttatcacaacctcacaacatatatcaaagtattgagattgttggtttactgactgtcacttttcactggatattaaatatcctgagggctacaactgtattttttaacctgtcccagtacctcaacaaaattttcactgaatgtatgaataaattatgttaacaaaaagttaacaataaaagtataatgaagatccctttaattaattttaaaatctgaaaggaaaactggagtcacaaaacatatgttcaaatcttaattcatcacaaattttgtgatttttgacctccacctcaatgaagctcagttttctcagctgaataaaagggataatgcctgtgtatttcagagtagctgtaaaggtaaaatgaggcaatgtacatgaaagtcctttggaaataccaaacaaatgttatttgctatcatgctaccacatatacatgtaggaaatatatgtattaaataagaatatttttaagatgcaatgtgataacttacattaaatatatatacaatttttcccaaatgaaaaccaacctaattcctctctttaactgacaaacacactcaaaactgctcatccaaaaaaagtcccttccttgaagatgtagtccccagctttttctcttctctagtaaatgctgtcagaaaagagttgacacctatgcatcttcttcctaatgcactgaaagctgactcaatgaccactgcctatagaacagtttcaatatgtttaatccattgatttcttttaaattatcactttattttatccctgaagatttctttttgagtactttccacacctatcctggcttcttcaaaacaactaccctttttttcttacttctgtgactataaggttgtattattggatctccttttttctcatcctaatttctgcctagatgatcaaacctgctccaatagaatcaggtatcatctctgtattgtaagctttgaaatatttgtctctgtctcaggtttcctcctaatttctaggtctatatttctaattattaaccaaagatttctatctggatgcccttcattctatgccaa

SEQ ID NO: 182880 - DNA, 1340 bp, Homo Sapiens
ggaggggatgttcagggactctgcagatttgtgtccagcccttgcagagagctttgtcctatgacatcagttaccacacaggttcatactcgactggcacagaaagggttaattttgaccatacagcagctaacccagggcaaaagtgagagaaactgaagcacagctggtatatgggtttaaagtactctccctttaaccctgccaggaggctgagagtccctaaaaaatacagaaggggacactgcctgcctactccagttattccctggggccctgggccactagggagcaggaggacggggaggccacaggccaccctttgtctcctctttgtgggtgaggctcagaggattgggtccatgttctcctggtctgaggctgcctcatcatcatctggggactcctggatcagagccagagaagcccagtcatgggtttgtgctgttccccaggaccataacctgggggccagcatctctttccttttgccctcacccctaaaggagccagcagagggcttttctgcccccaccccaggtcccactgggccggcgctccctctgtcctagctcccaccctgcccgtggccacagcccaccactggatgactccctcttaccagactgaggctcctgccccgccgcagggtggcatagaagtgcagcacacgggggtcacagcgaaccgccatggggtcaaagtccagcacacgtaggccctgcaggctgcgggcccgagaaagggccacataggcctggccactggcaaacacacggcccagagaaatctccacacaatccagggtcatggccctgggggatgcagggacagagatggagtcagctcagccttaagtcccttgccccgaaaagcctgaccctttaccagccctgctactgcccctggatctcctcgtccagtccagagagtctctagacagagggagagcatgacagcaggtggctgtctgagtaggagggggaccgggagacagatccaggtaagagttgagggatggagtgaaaggaaagcactcaggctctgggtcagacaggcgtggagctgaatccaggctgccactcactaactgtgtgacatgggacacatgagccctggtttctttctgtgcaaaataggattattcattatataaaaactttatacttgatacagtggttgtatacaatttatacaattttacgtatctagtggtggcttagaaaatggtggggcaggagatggcagaggggaagtgaatgtatccaggaaagggagaggaggtggacttggaaattcactaaagaaaagtttattctgggctgggtgtggtggctcat

SEQ ID NO: 182881 - DNA, 1401 bp, Homo Sapiens
  misc_feature (747)..(819): n is a, c, g, or t
tacaaaaaagttggctcttagtcccaagattagttctccttggcaaaatttatgctggcacaccacgcttctttcctttagattttattgtacagtttttagaacagcaggtttgtactttgaactgggatgtgggcttcgtaatacagacaatgaatgaaattggagtaccattgcctagactactagaagtttatgatcagttgttcaaatcacgggatccattctggaacagaatgaagaagccactgcaccttttggattgtatacatgtattattgataagatatgttgagaatcccagccaagttttaaattgttatatgagaagatttacaaatctctgcctggatgctgtttgtggttaccttgttgagctccagtctatgagctcgtcagtagcagtacaagccatcactgggaattttaaatctcttcaagctaaattagaacggcttcattaattactgtgatatactttcatccgttttatgatctgtaaaataaaaactcagctgggtccagatatcaggtgttctaaatctaagaatgtaagaacaatcttaatagaaatatgtttttaataagtggctaatatctacaaatagtacctttgctaaatgaattcttttttatgactattttgttttttagtaattgggtgaaaaaacaactgaaatgagattatttattattttaacataaggattaaaaaaatttagaaactcttattttgaattgtactgnnnnnnnnnnnnnnnnnnnnnnnnnnnnnnnnnnnnnnnnnnnnnnnnnnnnnnnnnnnnnnnnnnnnnnnnntgagccaatgtgcctggcctattcccttctctctttatgctaccacaaataattaccttctgtttattgtaagtgatgcatgtctaacaatttgtacaatacattttgaatatatttttccttccattattgtcttttcccaagaccatagggttgccttctctacatttgttctcttagaattcagctcccttttccctataatcttctaatgtagaatatttaatagaatgccagaacgtcactcagtgggtactactacctcttatttttcaacttttcagtttcttaagtttagcgttttttgaatatgtaaagtgaatgtatgcgatacattaattcgttttataaatttaaaattctgtcatgtctacttaaaaggaaggccttgtctgaatgttgtaatttatgtgtgactccagttctgctagagataagaacttcatttttgttttaagcacatttacatactagcaatatgttgttatatatactcagctcacaacattgaaaagtacatgttttaaaagggctgtaggcttccatggttagatggtctgttagagtcagaaatctgaacac

SEQ ID NO: 182882 - DNA, 1241 bp, Homo Sapiens
tacaaaaaagttggctattgcatctctcattagagccatctgccctgctctgtaaagcccgtttgatgttcaggatctcttgtttgcatggccaagtgttggtgacccttgaccatgttctgccctcacagtgagcacaatgctaataccttctctaatgtatcgtccatttcatttttccttgaatggagctacagaccagctggacaaaagacctcccacccttactgcttcctcctgtcttgcatgacaggaaaatccacctgcttgcaggaaagtgtgtcatataaccatctttgtgcttcccactcaggcttcaagaccatagcatgtttaacccatgacaccccagaaatgggtgggaaccaacctgagagttacaattaaagctgtggatcttaagacaaggttttattacagtccagtttctgtaaattaatcctgccacttgggaagaacataggtagaacttaagatggtggaatgacatgcccagttaaattgtcgatgtttacaaacttcaagcttttgaggatgggatcaaagtggtttataaaggtaaaatctctagggttaagtgagtttatgtgtcagatggacctcaaagattggaagtgaggggaattttttattcaggaaacaggatagggaaatggtccttttccaaaagaactgtgtatacataggtcattctaagctgttattcctgaaatgaccctgaccgtaggatgtctgtattgcaccattcaggaggcatttgacaagatcagctgtggggcccatcagctgttttgtgtatttgggtacaaaacccttctgatgatggcttgtttttatagataaagacacccacacatcacttggggtccccacgctgtctatagtggcttctactgccagctccgtggcgctcattctcctcctcgtggtgctgtttgtgctgctgcagccaaagctgaagtctttccatcatagcaggcgtgaccagggggtatctggggaccaggtctccatcatggtggatggagtccaggttgcactaccatcatacgaggaggctgtatatggcagttctggtcactgtgtgccacctgctgaccccagagtacagattgtgctgtcagaagggtctgggcccagtgggaggagcgtgccaagggagcaacagctgccggaccaaggggcctgctcctctgcaatggagaagatgaaccccaggccagtctggactatgtgaagcc

SEQ ID NO: 182883 - DNA, 675 bp, Homo Sapiens
ttgggcttgtagaaatatgatttttaaaaaaagttgggcatgagctactgtgcccagccaaagagtaaagcctttgcagagatgttgttttgtttttaactatagaatatctcaaacttatacaaaaatacatagaataatataatgaactctcaggtacacgtcacttagtttcaatgataatcaactagtgtcaaatattgttgcctcaaaatccccacccactttgctctgtgccccacttctatgtaattatgagtcaaatctcaggcatcatttctgagatgggctggtttagttgaagagcaatcttattctgactggtaatatgaaaatggtcactgtggtaaaagacttgcattttttcagattacagttcccttgtggttaggctgcactatcccagtacaatttcacttgttcttaggtgcatgtgatatctgctgttaattaagggattgtttataggagaataagagcaagtctgaagaccccaggaaaggtgtgcaggccagattatcaccttaaactttagagagctggcctggatttggctggatatgacccatactgggccatgggaggcccttacaaccacagaataaggagacctttattctaaaactgaagaacccagaagtgcatgccatggcatgcaaataccgttacatcaga

SEQ ID NO: 182884 - DNA, 1453 bp, Homo Sapiens
ttggcaaaagtacaaggggatcaaagagaatactgatcactaaaaggagtgagtggcccaaaactcttttactctcccatggttattgcgaccttacctttgtcttatatttgctaatacctgactgttgaaaaagattaaaattttccccagttttctttggggaaactctttggtgctcttggtatgtaattgagtttgcagattcttagtctaacccagagttgatctttcttgattatagtggccccatctttcatatccctaggttgaggatctcaataagaacctttctgcattttcttagctacttatatgattacttgggttggctgttttgaaagttctttacactgagaaaatgtgagtatgtcctaaactatgaataattcaaaaatctgactaaaagatccagtaataccctactgtcctgaacatttcctttatattatatatgaaaactgttttctgaacagtgtaggaatggagaggtttgtgttttgttacaggcttattcatttacttttacctatgtagtacctccatttttatttcataagttgtcttggggaatgcttctctttgtcctactcccccaaccccacaaagatctagcagaagaggaaagtcccagtacattggtactcctggatgcagaggtccttcccgccctcagcagaagtcctgagcaatgcatggatgcctgaatgtgggcccacgacctcccacctcatgcagctcttaccttccaggcagcctctatcttgcccacagtgcacgacagtgcaggaactctcctggagctgagccaccgctgggatggccgcagttgaactggttttttgtgccttttacctgttcccttgatcatgagttttagctcagataaccaggtattttgaagacgtgattgtccttggccctgccccatcccttccctttaaagttttaaatttttttcatgtcttttctttggccagaatttctctatcccctgcatgccttcctcggttaccataaatctgcattatcctaggaaagatgaagcccacagattgtacgatttcagagtacttcctgggcccctgtgtgatccgacagaggcctggtcatcaagttggacttccctatgtgaaaccataaactaacctgaggaagatactgaggggagaggggctgtgtaacggtgactgcctctaggccagccttctgccaggcagagaacaggaagctggcatgcagggtgtctggcactggtaaaatgacaccatgtttgtaaagtgcattgtccctggcttttggtgggccgtgcaggagttcctgcctgaattatagtctttccatctcatatcttcatgtggagccctcaagctttagacaagtcttttatctccgttttcagtggctcccattatcttgagacctcataatgctgctttccttaaatttgttt

SEQ ID NO: 182885 - DNA, 411 bp, Homo Sapiens
atagtcttgctaccagcaccttaatctcccacatccaagttaaaattcatccaacactcaatctcccagctatcctgactgctcctatacaggtatctctcccactatatatatatcaagtgctattagtggctattatttgttgggttacacaaagccagaaatcatctacatctactctcttttcttctggttttgaatagcaaaatgcaacagggagatgttctcagatagagggagaacaacaaaaagaagggtccatgctgaacaaacttgtttgctttgaaatcggaagttctagaggaggtattctgacagtggccaggaaaacctcctgcccgcagaattttgtctaatccaccccagacagagttatccaacagcctggtatggtgcagaccagggctctcg

SEQ ID NO: 182886 - DNA, 282 bp, Homo Sapiens
tttgtacaaaaaagttggctgaaacaggcacctgtgtccattttacagaagaaggaactaaggcctggaaggcaagtccttgcctgagactaaacagaatcccagcaacataggacgaggctggaattcccacacctggactaatgcacagccagtgtttcaacgtcgccaacccagaaatgttttctctccctgtcatgctaattttcagccctttctgggtgacttgttcatcatccaaatatattatttatgttttgtttgactaaaggcaattatatt

SEQ ID NO: 182887 - DNA, 1381 bp, Homo Sapiens
ttggcaaggaaaggaattttgaatgtgttgagcactgtgccatgttcataccattgattggcagaaggaacccttttttgatttcttaaaattcaggagtttgaagtgagtaatatctgaattggtgttagaactgttggtggtttattgtattacaagatatttcaaattcctttttttgtttacatttttaaactattgatgcacttgaatatgtttatgcagttgtgaaaaaatagtgtaaagaaagcagtacaaattatcttgagtttatataagatgattcaagatttgtgccggacaaggagaaaaagaaaatttgttgatatctttgggtgaggatggagaggtccaagaaaccattttgcaaatgttttatattactaacaagacaatctaaacctaaataaacatctttttcagagaaaagacactagagaaagatttaatttgtgatatttcaagctagattataaactgtgatctttgtgaatgaattaattcattccagaattaaattttggtctttgtattttgattccttttactttagtgaggattttgtagagaagatgaaatttcacctctataataatagaagttaggagtgaggtctcacaaacatgggctgtcttctagatttgggatataccatcagagacaataaataactgaaatttggaaactggataaaagagtctgctagttaggaccacttgactaagagtgggtatagaagaaacctaaggaagaaaagttagatttgagacaacatattggagtatgttgaaattaaaggtgaataaagtagtggaaattcgatagaatttaaaaggagacattgtagtgggagatggtagaggtgattagatataatatgtatatttatttgaaaaatagatatataagaatgaaagttgtatgtagtaccaacaagtaccattcgtattatgattcacaatttacagagtattttcatatataaaaatcttgtgcaataggttgttttttcattttatagaaggagcagaggctaaaggaagttgaggttaagtgatttggaagttacaaaaactagtaagagctcaaactagcaataaaattatagtatgtttttcccttgccttcactgtaatgcttaatggttgtgtagtcttatacgtgactcctgacttcaaggatcctggtctgtacctctttaggtcaacacgttttgagtgaactggtgttggttatttggaattagatataaagtcatatattctttggtgaggaatggcttcatataggagttcacattcaaaacaagctttgacatttataatagagtgaaaattggtagatcagagttgagctgattggaggaccaaattaaaagact

SEQ ID NO: 182888 - DNA, 903 bp, Homo Sapiens
  misc_feature (548)..(561): n is a, c, g, or t
  misc_feature (584)..(657): n is a, c, g, or t
ttgggacagtctttaaatcttatttttcaaagttatattgaaagttatattagaagaagaagcggcttcctaagcccagtacaaatctgcaagtcttaatgagaaatttgagggccagctgataaaacgttctgactattgtttttgtgtccaaaacagaaattaaaagggtttgacttgggtgttttccccgcttttaggcagttgagcagtcttaggatttgtaggctgacctgaccgttgctttggcatcaggtggctgctttgggatccttacgcaggccctgggcagtgaggaccctgtctctcagcctcatggtgttctgtgttgtaggctgctgcagtacacgttcgtgggggacatatttatggttcccgatgatcctctgggaagaagtggacctcgattagaggagtttcttcagaaggaagtctgtcttaggtatttcctttttcagattgtcttgtattaaaacttctatttcaattctttgtgctttagtgcaagtgctgtctttatagactaaaaatgacattaaaaaaattannnnnnnnnnnnnngagacagggtcttcctctgtcannnnnnnnnnnnnnnnnnnnnnnnnnnnnnnnnnnnnnnnnnnnnnnnnnnnnnnnnnnnnnnnnnnnnnnnnngctagttttccaagctggtggtcacttactggcgaatactacttagttcatcatgtatgtgtgagagctctccctctgaatcacgagtgcctgatggggtcattttgtatgtgtgagtgtctttttacattcactttctaaagtcatttgctttgaacatgttatgcttatattaatttccttactgcttacgaatcactgcctgggggaactgaccattactttctaccttcactgaatggaaaa

SEQ ID NO: 182889 - DNA, 735 bp, Homo Sapiens
ctttgtacaaaaaagttggctaagtttcagactaaaggaaagatcctgggtgatgctggctttttgcttctttcttctgccctcccacctcagcttgtaagcggggatgtgtgtatgtctggggagaggaggtgtagggtgcgtatgtccatggggggaggggcttgtgtgtgcagtcattgtcccaaggtgtttccagtagcgacttctgtccccctatccccaccctggtccccactttgcgcccccgggctccctgcctttggtgcacacaggatcctgcccgccccccttgccagagccagagaagggggttggggccattccaaggaggcaggactgaaaccctcaccagggttactccccaacatccttttgcctgagtcaccctctaagcgctttaaccacgggcagctgcctgttccccagacagtttttggtggggggggtccagggtcccccttgctggtacctccctcacccctctttttgtttttccatctgtgcctgttccttccacagcccaggcacacagaagcccaccttcttccccttaggaggagggatagtcaacacccctgctgtctctctgtcactcacacactgatttatggggtctgagctgggctgttcctgcaggatggacaggacccagcgccctcttctccccacacgctgtaaatagacttccaatcaccaggccagcccccacacaccctcactcattccagggaa

SEQ ID NO: 182890 - DNA, 909 bp, Homo Sapiens
actttgtacaaaaaagttggctgtattaacataaaatctagctggtttatatactgtctacaaaagacacacctaaaacaaaacaacatagataaagatggaaaaatattactgatgctgcattctaagtaatagctttgtattttcccaacttcattaacatgtcagctttgaagagccatttgacccatccactgtgtttttgcctctgtttttaatctcaatcattttgaaaagttctaactggatctttttcaaactgcctggttattcatattttaaacttcttaaaacatattaaagttattttatattctgtttctaattctagtatctgaagtctttatgagtttgattctgctggctttcacttaatgttttgtttccacatgtgccttgtggttttgattaactctcattcctcagatttcatctgtgaaaatcttttcagagagaatttgcaaagatttgtacttgtttctgccattcacttgaggtcactagcaatcctagactactttaaaatcttagcctatgtttttttgggttttaaacctgttcaaggctttgcttgatcctcagggagattattttccctttctaaccaacgccgaagtttaggtgaatcaacttccttgctctccattttttcatgtagtgcctgtttccactctgacacttgaaggggtagctttctggggtcctggctttttagagagggactaaccaccctgatgggccctaggtttcatgtcctgtcaatctcaccctacccgacaggcaaacaggagctcaaggtccattggtacttgacaggtctctgctttatggttttaactcattgtgtatttcttcacttttccagctgtactaaacattccttgaagatagggaccatagaatagacta

SEQ ID NO: 182891 - DNA, 878 bp, Homo Sapiens
cactcacggctcaggtcctagaagagccctgcttgactacataggccaccctcccccatgcacctccatctcagcacttcttcacccagcccttgtgaactgatcgtattattgtgttttctgtctctcccctttagcgcatcagctctgcgagagtggaacatgatcctcatgtgacgtgcttttcctcgtgacacagcctggcacccaagagatcctcactcccaaaactcaacagtaaaagagcaaaccatcaggttagaaaatgtgaaagacatgcacagacatttcaccagagaggacacgtggatggcaaaggcggcgggaagagatgttcgccgtcattagccattctggcaacgcagaggaggaccgctgtgagacaccaccatgtgcctgtccgaacagctagaaccaaagataatgacaactgaaagctggtgaggatgtggagaaacggaatcacccctccattgtcggtggaaagggaaaacgccttagccactctggagaacagtctggcagcttcctataaaaactaggcatgcgctaccacagagcccgaccacggtatttttggccgtttatcctgaagaaacgaaaagttatgttcaagtgaaaacatgtacacaaatgttcatggcagctttacttggaacggccccatactggaagcaacccaatgcccttcaatgggtgaatgattaaacaaactccagtgcatccataccacggaattctggacaagtaaaacaaacaaactgttggcgcacaccacacctgcgtgaacctccagagaattacgctgaatgaaaaagccaacccaaaaggtcacattctgtgtgattctatttatataacattgtaaaatgacccaa

SEQ ID NO: 182892 - DNA, 819 bp, Homo Sapiens
ctttgtacaaaaaagttggaaatggattcgttggatcgaaattagtctatttcttttatttctttatctagaccccctgtactatagctagtctacaaaatatttattatgttcggattacaggtttcttatactgtggaatatgtattggtcatcttcaaagaacacatcattttgttggggagataagactagtagtgtgaggtctccttaatagggatgccctcccttgggttgccaggtaagcatagaaactgagccatctttaaaggtgaatcatcagctcttttttgccacttggtttcacatgccaaggggatagacaatttaggactcatgggcatcctaacccttgagaccccatggcattcctaaagttctctttgtttgctaatacaccacattatcctcaatgctacctctgaaatcacactatcaaatagcccctactatgtaattctgtaactttttttcctgaatgtttaggtctattttggcatgcagggattaagaaaatagctatctgagcatatattttatagttcactaatgaaccctactttgaccctgtgggttaatgaatgaaaagtatctgctattatggtgtggtttcatcttatcaattacatatttttgttgtggaatttgtcacctttgtcttcaccattcttttctcttggacagactgttagcgccgtaactcatgtacttgccttgacttaagtgaccagtctgtccaagagaagagaattacattcatggcaaatgccccgagtcaggcacaacataccatatacataatagtcgtgatgagcttaa

SEQ ID NO: 182893 - DNA, 920 bp, Homo Sapiens
ttggaactaggatttggacattcagttcagggagggatctccaggaaggtttggaagagagaagcaggggtagtgaagtttgggggaaccaaagagctgagttgggggtgaggatgaggggtgttgtggccagctgtgctttcaggccccacagaaggtgccttcttcttccagactgttctcttctgagacgtgaagaggtttgatcttctccaggagagctcaacacaggtgcccatttccttcctttcctcctgatgtgaggtgggcaggccctatctggagggtagacaaggcacctgggcaccaacagctgtcagtgcttcattcccttcttcctggtggtgaatggcaggaaaaatggtccattccccggggatcagcactttctccagacagcacagtgctccaggcaccagaatggctggactagccattcaggagggttctccatgtcctccctggacagcaggctgaagcatatgcctctcacccatggaggggctcctttctcctgtgccctcccttagctaatctcatccatttgtcagaagttggataatgcccccagaggcctgggctctgtccctaaagtgcctttggatttttctccaaacaacacaggtgggaaattgggggaagactatgatgtagtgctaggtgctctctcagtttcaaaggatagaagaatagcagttatttttcttgagctggactcacagtgagtcaagggttttattaccccattttgcagatgaggaacttgaggttcagaggagaaaatgatgacaatgcagttgtcacatgaaatatgaatggctgtgccattgtctgctgaaaggagggacataagtgtgggagactcaacatggaaaactgccccttccctccccctgctccttgcccaccaattcctcctc

SEQ ID NO: 182894 - DNA, 890 bp, Homo Sapiens
gtacaaaaaagttggcaggtgatctgcctaattaatgttcttttctgattgaagtactccttttatcatttctcgtaggacaggtctggtattgatgaaatacctcagcttttgtttggccatccttatttctctttatgtttgaaggatatttttgctggatataatattctagggtaaaggttttttttctttcagcactttaagtatgtcataccactctctcctggcctgtaagttttccggtgaaaagtctgcagtgaggcgtactggagcttcattgtacgtcatttctttttttccccctttggctgcttttaggattctcataatggcattttgcttagtatatttttgttaggattatgactatgaaggaataagggcctgtggtatttcattatgctatcttgctaatatgcttgtataattttatgccttagatttgtaaaggatgctatctagtaagtggaataatttgttgtttttattttttccagttttgtcttcttatcttactgaagacattttgccagagcagggcctgcaagtttcattccaaaaagtgatgctgagaagatatgaaagatgttgtcttgagaaattacgcttaaggaatgactgggaaattgtgggtgagtggaaagggcagaaggcaagttataatggacttgacctatgctcagcaactactcatagcaaaaactttcaatgcaataaatgtgtgaaaggttttagtaaatttgcaaatctaaataaatgtaagataagccatactggagaaaaaccattcaatgcaagaatgtggcaatgtctcttgcatgtctttaataatgactcaacagcagagaatacatattgtagagaacccgtaccaatgtaaaaaatgt

SEQ ID NO: 182895 - DNA, 927 bp, Homo Sapiens
ccaactttgtacaaaaaagttgggaattaacaaaggagcagggagactagaccaggtcccaggatatcttgactccttggggcaggcccagctacagcaagcacagagggaaacataggggaggggcagatagcagatttggtcttgaacttggagggtaggaaatggatgatccccaggatggaagcagcaggaggaagctgtgtctgaggatggcctgggctgcccagaggggcagcctacccctggacccctggggctgttgcacagcgggaatggaaacaaggatcctcccctcagggctgaggggttcagtccctcctcccctctttccccatctgttggagagatgggggtccttgcctccttgcccctttgaatggcccagatgctggtcctgattgagtctctttaagagacttttgctgaactcataagtggtgatcgtgatagcataggaggggatagacttgatgatccaagggaggaagcctgcaaagagccctctgatgcccgacttggcacagatccacctctgagcaaccaggtagagtccgcatccagggatgtcacttccacggcttccatcactccgagtgtggcctggtgttgagtcttcatcacgacaaaggttagggtcagcactgtagccagcatcatggtgatgctgccagctgcaaagctgactcctatggttgtcatgggaccatggagttcctttggcctgagcccattcagccagctcttcactagctcgtaattgaaccagtacagggctgagaaaggcacatttctaagagagtggggccccggcacagccacagtgagcaccaaccactctaagccaccgggagctcaaacacagggtaccagcacatagtataacatatgctaacctgcagctttgtctgcataagctccagggca

SEQ ID NO: 182896 - DNA, 734 bp, Homo Sapiens
actttgtacaaaaaagttggggtgggtagactgttcaacctgttcctgctccggcctccactatagcagatgcgagcaggagtaggagagagggaggtaagagtcagaagcttatgttgtttatgcggggaaacgccatatcgggggcaccgattattaggggaactagtcagttgccaaagcctccgattatgatgggtattactatgaagaagattattacaaatgcatgggctgtgacgataacgttgtagatgtggtcgttacctagaaggttgcctggctggcccagctcggctcgaataaggaggcttagagctgtgcctaggactccagctcatgcgccgaataataggtatagtgttccaatgtctttggacttgcttttgttggttccgcccgtggagacgacgatagtgtttctgtataataaagtgtctgccggctcgcgggccaggatcctctcggtgggatgggcaccacagacaggaggcccctcaggcccgtgcgggccactgtctgctgccgcctgccggggtggcagagtgagttgtctcaggaccccgtcactgcgacgttgacactcctctcccttcccttcctccccaactccccaaacactgtggaaggggagaaggaagtgatccacagcattcaggccacttggggtctagaccatggtggtgccagcctggggggggcagtggccctcagctctgcccgctggagcggtt

SEQ ID NO: 182897 - DNA, 815 bp, Homo Sapiens
ttggatcactcttctgctttgaacattcaatggctccccagtgcctgtagcaggggttttcagactttattttgtagtcccagagtctttttatcacataaaagcaaatgtaaaaacctcaatctataaaacaaatacaagcggagattccctggctaagacaacggtgggggtcctagagtccctctcttcagtccccacttcatgcccccagcttctaggctcccccagaagccccagtgctctgagaagtacagcttaaaaaccactgactgttcgataaagtttagcacagcgttcagggcccccactcatcatggtgactcttccagcctcttctgcctgccagcccatcccacaggctcccccagatgccctggccaggccaggcatgtgcccacttgcaagtctttatccttctcttaggttccctctggcatgcacttttctcctccacctgcccaatcccagacatcctcagagtctagcatctggtgacacttctgtgacactttccctgatccccagccagagggaactgctccccgctcctgagctccctgagcccctttccacacagaacacttagactgttgtattgcccctggttgtgttgggcccatgaccctcactggactgtgagctccttgaggacaggggcacccactttttcatcttggggaatcagagcccacatggtgctgcgtgcgctgttgaggcctctgtgcagcccgggcccatgtctgctgggatggggggaaaggtagggaggtaggtggggaggaggcacggggtctgatggagtataatacaac

SEQ ID NO: 182898 - DNA, 899 bp, Homo Sapiens
ttggatttgttaaaccctctaatggtttttcagtggattcatttggatttcctaggtggaaaatcttactgcatgcaaataacaattttatattatcctttttattatttatatgtctgttttcatttcatggcttgttgtctagctagaaagtccagtgtacttgttggttgtagtagtgacaatggggaatcctttttctattattggttgttaatacaacaccactgttctggtgttttagtcaggattacacatgagtttgtcatagtcatgccaagttactgatatgcaagttagagcactcacagggaaagaacaggaccctgaaacttggaatgagaacacctgctcagattcggatgaaactggcaaatcactttaaagctcccttggcagcggaagtaccctgccctcctgtgtctgaggacaccgcacttcctttgcctgaagatcctgtgataacttcatctgggaggatgccttggaaagggttgctcgctcttcagacctggtacagtcacccctgtgataacttcatctgggagggtgccttcgaaagggttgcttgctcttcagacctggtacagtcacccctgtgataacttcatctgggaggatgcctgggaaaggggtcactcttcagacctggtacagtcaccacccctgtgatgacttcatctgggaggatgcctgggaaagggttgctcgctcttcagacctggtacagtcaccacccctgtgataacttcatctgggagggtgccttggaaagggttgctcttcagacctggtacagtcaccacccctgtgataacttcatctgggagggtgccttggaaagggttgcttgctcttcagaactggtacagtcacccctgtgataacttcatctggga

SEQ ID NO: 182899 - DNA, 651 bp, Homo Sapiens
ggattaaaattaatggatagatacgacagggagtcctactttaaattgaagagaaggcttttctaaggtagtaagagacttttatgaaataaaggcagccagccgtgcaaaaatctgggggataactattctgagcaggaaaacaaactggaatgacccagagaacgtaaagtgtttgcacaaagaagccagtgggaacacagcaaggaaaagaatggtagaaaacaagactggaggaagccagatatagggcttttacaggcagacaaatgtaactattctggactttattctaaatgtgatgggaaaccttgagaatagaagaatgacatggtccaatttatgttttcaaacaatcacctgcctgcttttttcttaataagattattgatcatatcagaagatgatcttctgattgtcaagaagacacttctgtcctgttttcagctacttgtgtgggtttgttttgttttgtcttgcttttgcttacactcttcagtacttctaaattattataggcccttgaagccagaaacctcccctaagttaaagggacagtttattttaagtcttgcaaaagatttttaaaaggtcagattgtggctgggcatggtttaagacttgcaaaagatttttaaaaggtcagattgc

SEQ ID NO: 182900 - DNA, 727 bp, Homo Sapiens
ctttgtacaaaaaagttggctctatcctgccggctcgggagcgggtgactttggaaagtccgagaaggtgtggattcccgttgacgtccctcccgccctgaagtcagggtgatttcatagcgaagttttccgttctgctggaatgttccttttaaagaattctcctggggtggaataaatgtcacccgggatgaaagagtggttctggatgaaccatggaggcctgtttccgcttacatttctagtggttgacttgacccctcttagatctgcctttctgaaagctctgaggctgtcagatggccactgtgcacttgtggacatagttcatccctgcagagatgacgcacctggggctgttgcccgggggctgcccacagccccacaggcccgtgccctccttcagctcagcctagcttggtcgctctccccggcctctctgttttcctgtttctttaatgatgaatcctggcctgtgctgctggctgaggcaggtgggcctgtgtgccctggtcgctcggagtcgccgcccagctgtggggttggtcgtgtggctggtgcagtgtcctccaacagcgtcctcacccggaacattctgcgtgcacagggactgtggcatggggcgtgctggtgatgggagttgagggcagcatggtcacccccacctcacagtacccgctcccacgcagccctgcaaggactggccgcagcccctcctcgctgtcct

SEQ ID NO: 182901 - DNA, 626 bp, Homo Sapiens
  misc_feature (66)..(113): n is a, c, g, or t
gctaggaactgcgttaaggagaaaaacccctgccctaccccgctcgctgtgctcttgtgactggcnnnnnnnnnnnnnnnnnnnnnnnnnnnnnnnnnnnnnnnnnnnnnnnntctgcctagatgctggttttctttgcggcaccgggcacttgtttctaacaaaccccatatccgaggcgggatccccccatatccctcccgtggcccccgcataatgtggggagacgcggagctgcccagattaggctccggagccggggccgcagtcgccgtgaagggacgggacaggaggcccggggtcccggctgccggcccagccccaccctgcgaccgaggggactcgcgtccacgaccccggagtcgccgcgtggaggcccgggtcccgcctcagccggttccggccgattccagcccctctcccagtcgcccggacgccagccccctcacacacaccatttctcggcttccagggtgttccggcgtcctctgcgtggctcccgcgactagtgtaggtcacagtgcaggttacagagcgacagaagctctggtggaggcacctagtccctctcgaagcaagaaagccgagatcctgaccgctgtcggcgcagcactaaaggaatccaa

SEQ ID NO: 182902 - DNA, 925 bp, Homo Sapiens
tacaattatctagcactgctcacagtttacaaagctcttctgtgcccactggcatctcatcagaacctcaggaggatggcaagcaaggaagaattttcaccctgatttcacggaggaagaaacaagggcaccaggagggaggcaccttgctcaggccacatgcatgagaaacaggaagcagcactgtgatgtgatgctgggtgctagctctctaagcatcaggtttcctcctctgtaaaatggggtgaaacagcctaccctgcctcactcctgccctggcccaggactctgcccactgcacctcgctgcttctcagacagttctgggagatccgtcttttcctcctcttcagttcagttcaatgccaagttcagagccactaccctgatcaggaggctatgggaagagggggtcttgcccagggtaccacagctgggatagaacatcctgccacttatcagacccctggtcaggcaggggccacccttcaccctagatgggccccagatcacttaatctgatccacaccacctttgcctgatttctctgcatcattttctggctggttctaagtaatttaatgattcagtcagtgaccctagtcctggtatatacctactgtgtgacaggcacagggaaggcagggcaggggccaaacatttcctgagctcttcctgcgtgtcagacacactgttaggtgctcatcaacagcatctcatgtgagactcccaacatgcctttgaggtgggtatcccctgtgcagccctgggacctgtacaagagggtgggccctggtgagaggtgaaggggtaagacagccagggccaggccaagccactcagaccttgtctaagggaggggcttgaagccagaaagagacatggccagaagtgtgttcaggacagagggacaaggcagaagccaa

SEQ ID NO: 182903 - DNA, 508 bp, Homo Sapiens
ataagccaccgcaacatgccccagttgcttttaaactgttaaatgtgggatttaaagaataatctagttctacccattttatgaatgaagaaaagaaactgggacccagagagaaaaggtgcccggtccaaggttacagagcccgttggactcagaagtgaagctggaacactagccaatgccctcccatccgccaggtgacttctctgcagtcccctttaccatctgcccgggtcctttgggatacggctgactaggggtttgaagaacagcaattggcctttgttatgaatctttttgtggagataaacccagtagaagtatcacggttctgaccatgaaagtgtgttcaactctaatccagcacaattaggattccagatcatttgattctgtgtcgtctaaatatcacagaaagttaaaaacaaattagcctcatggaataatggcttaatatccataatttagttttaatgctagggaggaagggctcctgtgaatgtgttct

SEQ ID NO: 182904 - DNA, 788 bp, Homo Sapiens
ctttgtacaaaaaagttggctttttataagtcagcaaaaaataaagctattttcattttaaaaaatctacattctaggatatgtttcatgcttaggataaattttgcacaagcatatcttcataacaatactcaggtaaaatcctgacgttagtgaaaatcaccaggataaaaggcattttagcagctttttgtttattctttaagtctagccttcaagttaaaacaacagcaacaacaacaacccactacatcacagtctggtttttacctatttggaatgtttttccatggtcaggcctgtgtgccaggccactacagagatgaaagattcagccctgccctcaaggtacttacagtcgagcagaatgtccccagtgggagattctagagtcctgaggactcttagaagtgctcttatcagtagcatcttaattactttacaatggattttaaatggaaaggaagtttacaataatagcaaatgcatattgacagctctttagtgcccggtgctgttctaagtccttatgactaccctgtgaaataagttccaccatgaccccaattttcctgaaaaggagactgaggcatggagagctttagtattttgcccaatgtcacacagctagtaaatggggacccccatgtgaaactactcactgattgtcctactctcttgtggttttatctttttagcagacaccaaatgaggaatgtttgttcctggaaaggctggaggagaccattacaacacctatatattccaagaagcatgcagagaaaatt

SEQ ID NO: 182905 - DNA, 958 bp, Homo Sapiens
cacaaaataatataatcttaaaaactgatatttcccaaataactttaatccccttggaaaactccttcattttattttatagagagatggagagataacaaaagaattctgatcagatatgaatgtcagatcactctggctacagtgtaaaggagattataaagggcaaaactatagcaaactgcacttaaaaagactactacaagagtccagacaaggcataatggacttataacaactaacatcaagaagattttaaatcatcccaaataatttcagaagttttgccaagtttcacattgacaaactaaaactcaagggctgatagggctgtgatagggaaaattaggggagaagagggaaactcgctaatgatgatgagaggcaatagagacaggcagttagaaaatagtatccagagcttacagtaccagacaataagcagtgatccaggcaagcaggtctttagcattgtagaggtcagataagcaggtggtatcccagcaatcacggaaaaacacagtaaggaaacatggcagcaggcaatgcttacagtagatagcagagagctccagctacaagattggagtacaggaatttaaaaataggacattgttaacacagaaaaccaggacagagcagaacagatacagatctgcactcaaataaacctacttttatttatttatttattttcagacaataaggatttatatgtctcacaattccctggccaggaattgggtaaaagctagattaggcagctcttctgctgcactggatgtcatctggcatcatttgggatcattcactcatctacattcagttgatggctgggctgggatggaaagtccaagaaggcatcactttcatgtgtcctcactgaagtactcatccacatggccttctggtctctcatgtaacaagtctgattaccttgagactcccatgctgccaa

SEQ ID NO: 182906 - DNA, 654 bp, Homo Sapiens
ctttgtacaaaaaagttggatttttatttccgttttgaaaaaattttacataaatgattccattctgtatgtatgcttttaccaagattttttcactcaatgttatgacattctgtttttcagagatctatgttgttatgtatagatctagctcatatatttttcttgctgtgtgacaaatgtatgaatttattgctgtgtgacaaatatatgaattcctggattaacgaatatttagattgtttccaaatttttactattttaaatatttctttaaataaggtcactctaggtgatcaattgttctatctatattgtcaagttgtctccaacatggctttatcaatttacagcatggtgtggttctaacctggtactgtctttctggagataatttggcagtgcgtatcaaatacttcataaaaaggcggagttgacatttctgggtcaaaaattataagagttgaccataatggtcatttggccatcattatttataaaactgagaacctggataacagcttctagatgtttaatgataggtaattagttaaataaatggtagtatcttttagttgatgataatgtagtcattgtatatcctaattgtgtttaattgatacattttatattttatcaaaatgagtgatagga

SEQ ID NO: 182907 - DNA, 306 bp, Homo Sapiens
ttggcacaaccagggcccctgagctgaggccaaggagggggccaggagagtggcgggaggggccccaggcagggccagagctgcctgtgtacagcaggggagaggggagaaggggtgggccgggtggtctcagccccagggagagtggagtgcccgcccctcccctcccccaggacggctggcccctgggagagcccctgggggagccagtttcctgtttcacaagggcaagtggttgggacccagaggtgtctgacagttgtgtacttagaccacacaggaagggtttggggtttggggctcctg

SEQ ID NO: 182908 - DNA, 329 bp, Homo Sapiens
ttgtacaaaaaagttggcaagccttctatttctgtacaacttgtaaaattctactttcatgccttatagatgagataaatggcatgatttactgagtgcttactctgtcatggccactatgctaagtgcttttatatagttttttgcaacatacctgagaggtaggagctattccctatatttacaagtgagacgaaattgctcaaattcataaagctaataaatgacggactctgtgttcaaacctggatctttctgactccagggcccataattttaatatactacattgccttccaaaccaagctgtaaaaaatttgggtgacttg

SEQ ID NO: 182909 - DNA, 196 bp, Homo Sapiens
aagaaaaataaattgtttattttctttcctttgcccttctttctgttctcttcaataccggcaggggagtgttacagaaaatattggtgttaaccctggggagggagttcttgtagctttaacccagatccagactcctctttctgcccacatccagaccactgagcttgaaatagagaagggcccacccagtgcc

SEQ ID NO: 182910 - DNA, 169 bp, Homo Sapiens
ctttgtacaaaaaagttggctttgtgttcactatgtgtctggcactgatttatgtttattaatttactacatcctcagaacaattcagtgaagtaggtattactaatattcttactttgagattatgaaaccgaggctcaggtagtttaaataaatttgccatgtcaca

SEQ ID NO: 182911 - DNA, 1451 bp, Homo Sapiens
  misc_feature (229)..(251): n is a, c, g, or t
ttggcatggattggtacctgaaccaaggtggctcttctctgagaaactgacaagttggcagtgaaaggagaatggagcatcaagggaaacacagatgtcctgagagtggcatgaaagagtgaaagagagttggaggggaaagcagcatcttggaccttggtggctttccaggtccctcctagaccacatatactaaaatggcttgaagtaggagtgatggttgctggcnnnnnnnnnnnnnnnnnnnnnnngtggccagaagagtctgaaatatcatctaaccttcagagacctggagcaggatcctgacttttgcagagtcccaagctgattagggaagcagcctggacttaagtctcggccatctgatcccatttttcatcttacattctttcctatatgtaggtttgagagggaagaaacagaaatcttgacatcattaagagtttgggaggagggggttaaagaaataaggaaggactggaaggtaaagaacaaaaaagagaaggctgtggcctcgaagtcatatttttctctttgatattgttacttgatcctgtgtattttctccattctctggcttctgtaacatctattcatatccttccttttggacatctgaactatttctctcttttcagattgaaggataacagttggcatatctagttataatgagccggggtgaaccagacattttgtttgaaaggtgtttggaaggtaaggtcattgtcacaacatgcagcactatgttgctgggcagaaatataatgtgaggcagaataattcagacttgacagacacttgcacagacgtaatcacccagagacaaaagcagatgaaccctttctcgggatgccgtctaatcaaattcaggcacgtgtacagcctgcagcactgcaagggtgaccatttcatcgggcaatgattattaaaattggattcctttttcagaagagggtcaaaattagaattctgcaaagcattatcttcttcccccaatagccatgccattttataagagattgtgttgcctagaaatcctcctgatccttttgttcttcctcacatctaatccgtgttcaagttaacagcaaaaccggctaccagacatacccagagaagcacaagagacaattaacacctacctcttggaacactggtgacgattaataagatattgtgctgcagctgcgtatgtttttatgttttccacaatcaagcttgattaaagctggcttttgtgacatcccctgattccatgtggtgttggtagttttaggcgattggttgtacagctcccttttccccctcagaggcaatcactcctgcagccatttcctgacatatgccagggaggaactgatgtttctctgtggctggtgacctagtgcacagtaaggtcattcctaaaaagctggctgagggagaatttaacctcttcagatcaa

SEQ ID NO: 182912 - DNA, 285 bp, Homo Sapiens
tgcactccagaaatctttctaaatttaaatccacaagggttaatggacgactgcacctgggagtagggtaggaaagaaagccattaaccgaccccttatctggtgaatggtggtgtcactagcttaagagatgaggagaggtctgaagtcctctgactgttcttttgtgcccacttccactccagttttataaagttaatgtcctctctagcccttagggaacaaaagaaaggaaacgttcccagggacggagggaatgctcagagccaacttttttgtacaaag

SEQ ID NO: 182913 - DNA, 207 bp, Homo Sapiens
ttggaaatatgtgtctctggttaaaatgcaagatactgaaagaaaaattcaaataggcatttcagtgaatagtttacatataatatctaatttgtctgacattacaaagtaagtactttcacaactaacatttccagctaactaaagtccaataataatagaggccaccttaaactgggagtatttatttcctatattgcctaattt

SEQ ID NO: 182914 - DNA, 578 bp, Homo Sapiens
ttggctttgacctgaaaaaggcttcataattttctgtaaaacaatgtattttttctttcatatttatatttaatggaaagtttatattactatggtaaacaaaaaaccagtatgcttgccataaatagataagtatcaaaataaaatatgcacaaactaatgtaaataaattctaactaggtgctattgtctgagcctctttgtacgtagaagagaaagattgggcatggtaaacgttaggggagtattcaaggtgaagtatcctcaatttgagcatttctctttgagggatttacgatggacaatgaattgacaaagtaataactttcttgttatgtgatctgttgctgggtaaagaacataagctgactctcccggtgccccacccatatggccgaggccacttcagatgccatctgcagggcctcctgtccacatctttgactttctatgtccttctacctggcagggtttctagccagggaagctaacatcctgaggagcccctttccatcaatgaggggaggagttggtggattgaaactcccacctcctcacccctcactggagaattatgc

SEQ ID NO: 182915 - DNA, 899 bp, Homo Sapiens
ttggcttttcgtctacaagtgtaaaactgtaaaaaaaggaaatctcagagttgcagactgtagggaatttaggaagtgccaccagatccttcccatagaatgctctctagtaataaaaaaagatgcatatgcatgcacttctcttgtggctcaatagactacagagtaatctgcggcctctgttctaagaagtgtttaacactttttacctctgcagcttctgcattaagagtaaatccataatggaacccagccaactggagagctgattatttttgaaaaacagtttggttcttggacattgttttctcttgtggaacaagaatttaaattcatgccattgctttgctcttccctgacccaaaggaaaattagaatagagtatggattctgaaataggttgtacttctggactcattggtgcttaataatagatatctctaacccctagacaattaactagtgctcatatataattcccttgactcacagcagggaactaaaaagggtgaagataaacgtaaaatctaattggaattcttacacttttccctatagcctaaatggagacttgaaaatttatgctacacaattacagtgtctcttcacattcaaggaaaggaagagtgaagcagtaatctaaaatatcactcaaggtcagagcacaccactgtttctgactgcctgaatctgtctccagcttggtgcttactcttcctccttgtgttctagttcttctccctcagattgacattataattggacagacgcagaccaacctcagagccctaaattctgagcagattactgtccccaggattgataacccaaagtttgaggtctacatctttgttcatttctaacactattggcaagacagacagctagcagtcattagg

SEQ ID NO: 182916 - DNA, 388 bp, Homo Sapiens
ttggctttaatataccacttttaataatagacaaaacaactagaaaaaagattagcaaggaaatacaagatttgaatagcactgtaacacaatgacctcaaagcgtggaacactgcaccaattacagcaaaatacacattcttcttctgttcacatgaaatattctttagaatagactgtatgttagatttaaatacaagctcctcaatacatttaaaaggataggaatcatacaaagtatgttctctgaacaaaatgggataatagaaagaaatttgggaaagtcacaactatgtggaaattaaacagcataaatgtgaataaatgatgggtcaaagcagaaaacataagggaatgtagaaaatattttaaagggagcccccaaaca

SEQ ID NO: 182917 - DNA, 921 bp, Homo Sapiens
gaagcccaggaaagttggcccccaaacttcctggctctaggccaaggaggctgatgggctttaccctcctgggaatgggctagacagcttctgagctccttccaacccaaagggtttcatgatttttccctcccttagggagacatgggaggttggggtaaggatatgtccaagtttgcatgaattttaaatgaaagcagttttttaaagtcccaaatgttgtcaatgatcccattttttacaataaaatgttcgtgccccacccccagaggggctgctggcccagccaagcgctgggtgccggaggctgctgctgggcaatccaggctcctggctgagactagcagggacctcctcgtcccaggggtccctcttctcccagatgagcctgtctcctgggcctcatcctcattctcctctcctgatgactcccactgtcttcctcctcttcctctcctctcgggatgaggggctactgtcctaaaagcatggcctctccttttcggccagtccacctgctccttctcctggaggtggagtcaggtacaggacggaagttccagatgtcttcacagaatttccaaatgctatttcttcatttgcaatttctgttcctgccatccgcccccatgtagcctctgcccagtcttcaacccccgcctttggagtccgtggaggaaaagagcagaaacaggagcccagagaccattccagactcaccaggtatgggcgctgccgacttaatttttacaaaaccaagccaatccgtccctaggtaaatttttgtaagcaaggtgcccactaggtaggaaggctgcatttaatgctaatttactgtaaggtctagggaagtcctttccgcttctctgggcctcagtttcctcatctgccaaatagggaaatggatgagatgattgccaa

SEQ ID NO: 182918 - DNA, 777 bp, Homo Sapiens
ttgtacaaaaaagttggcacttgtagaggaggcacccagctatcacagcctgatgcccctaaacatttgaatcatgcaattaactcctctccgctctgattccatctctaccagtaactttctgatgacaatttggctttctgtgtgatctacccgtgggaagaatacaagtgtttggctaccttggttgttattgattctcagtgaaaattaacagttgctatgctgtgttagagacttgaacctcctagggcttagtcagcatgaattagcacccactaattgtcagggtttgataagatgaggcatctggatgtgtcaggctgttggcaggaagataactgattcaagtggtggctctttgtgagaccttgacagccacacaaggctttcttgtgacccgtatgtagatttcccaccttctgggcttcaattccattccaagatctgcccatctaagaagtcagaaaatcctaggagctctcatttattgccattcctcatactttgtttttagggtttgcgtcctcatctgcctttccagaccagcagttcccaaaagccagtgtgagaaccatctgcatcagagtgaccagtctgtgaagatcaagcataggaatgccaggactccaccctagatgtcctttatctggggtggtgcccaggcttcccgattattctaccaactctaccaaatccttgttcttcgttgcacaattagctgtgaaacagacagaggttacctacaataagtgcatgtcattttggactagccat

SEQ ID NO: 182919 - DNA, 858 bp, Homo Sapiens
ttggggacttcttggggaacattagcctggctctctgctttctgaaaccaacagcgcgtgtgtagacttatatattattctgcattttccgttcttacctcatccttgcttctctctatacccagtgaccccaaatctggttcttctcccaggaaattattaatcctaagtgttacgagtgtgaggacttggggaataaaactccttaaatccgtttcagacatttcccctgtttgcattctttatcttgccctccccagtcctctgcctttggtgattacaggtgcttctataatttggagccttttggggttctctgggggtgatttagcttgctcacatgaacagtttcctctgcaggcattttaacttgaccttttcccattctgctgagtcatttacctttctttcaaatgttttccatcctcatgcattttagcttagggttataaatgtctttgtgggttattgaatgtgtttctgtttcttgtttacctttatgtttgggggtatggaaatgtttttaccatgttaaaattggaagtcaataagtgacttccttttaatgaattatagcaatataatgtacatatattgtataattactatatacttggcaccattctaagtggtgtacatttattatcttatttaatccttacaatgtctggtttgtgtcacgcatttacttccctaagatttttaaattgtattttaagtcttcttatctccacaacaaatcctataaggccagtaccattagcagtcttattttacagatgagggtacagagaggcacagaggttaagtaacttgcttgagaatgtatacattatagctagtaaatgggtcctatgc

SEQ ID NO: 182920 - DNA, 914 bp, Homo Sapiens
ttggcctatttcaaaaaagtaataataaaaccttctggtataggaaggacatcttttacatgggaattttatcttacattcatttaactcacttattttcaacacttatgcttggattgcctataaagatgagataataaacaactagtcatcattttgtttttcttgctgacaaattttataatataaagacaacataagcttgttttaccagtaaacctagataggaaatcatgcatctttatgatattatccccaaaactatgaaaacatgtctgtttcagtcaaaccaacaatattcttatttgccaaagattacccaagtcagatgagctgcaaaagtatttgaggtagttcttaattttctgagagaatacttcatttatacaagcacttatttttcttaaagccaacaaaatagagctctttcataatttaattttggagcattaaaaggagataagaaactatgatacctgtatcatacatacagacttatataaacataaacagcaacagatcttacagctttcatttaaatatcttagccatgttccaggtacagtaatataaaactcctgaatttattaaagactatctggatccaaattgttcttctggccaatggaacaagatttcttgcccagatgactaaagcttttgaataagattcgtgaaggagctttaagattttttttgtttgatttctgtaaggaacctattataaagaggcaattttttattaatttaatcttttagatgcctctgtgtatcaattaaagaatgcatcccattgcttttgtggcatttttgaacctttcttttctaatgcaccttgcaagtgaacagttttatctaggtcaaaactttcccactgtggccactgtaactcttaagttgtcctcagcaaagtt

SEQ ID NO: 182921 - DNA, 568 bp, Homo Sapiens
ataatggccaactttgtacaaaaaagttggcctggctgctgggtcatccacacgcacctggaagggaacaggaatacactcacaggaatacactctccagtgcacacgagctctgctttccgacagttcactgaagacatgcaccggtcacatcatcacatcagtcatcaaattgagacaaccatgctgatgaaaaagaacgatgatctgtaggatggttttatgaaagagccagatttggaaggctaaggaaaggtgcctcaagacagtgtctcttaagttgagatcagaaggaagaggaggctttaattagtataaaagaggtgaatggagcagggtaggatagagagttttaaagagaaaagtcagcagagccacgtccttatggtgagagggagcggggaacaaggaagacttaaaacaaggtacataaaagaactagaacaggagcgcagtcttctgtgttctttggcttcactggctaagaatagctaaagtggttactctgagttgggggatgtatagatgctcctaatagccaagagtttaattgtacattggaaatcag

SEQ ID NO: 182922 - DNA, 487 bp, Homo Sapiens
gattagaactatcctctgcttgggatcagatgtggctgaattaatcagtccaaagaaggcaatgggtgggggtgtccctatttcttccaaagaaactacaagcacatcaacagcatccccgaaggcacaccagccatgcaagcagccaccggaaggtgccagccatgaagagggcagacagagagagcctagcacggctctgcggttctctgtcgggggccaagggagcgtgagggatgaggtggcccagcccatggagggaaccgggtagatccccacgtgtcgctccaccctctggctgcggaaggaaaggtccttaaattttgaaaaaacactgatggaaataaaacctctcatgtcactgaaaaataggaactgcttcttggcaatctgcctccttcttcgtaaatccttacagaacaagttctttcccagttaattctcccactattccacgtcctttgtcctgccttgggctataatccaa

SEQ ID NO: 182923 - DNA, 825 bp, Homo Sapiens
ttggggaatatgaaatgagacctgtttctgaacttctaggtttctgttattctttccaggtagatgacattttaatgcttctctgtaattttacatttcttttttgtgtgttggggaggggcctggggtatgatttaaatacgtgaagctgttagtactggtagcacttaagctggtgaagtggtgggtctgagcccctgaataatcccattttacttaccaagaagggagcaaaagtacctgccaaggtcagctctggctaggccctatgagcctgttcctgagcgtgtgctcacactcggcttctggactgaggcagaaggtccttctccctccgtgtgtgttaatactgttggcactgcccacagcctccaggggcacatagccttcctctggccgatcgctggagttgcaggaagatgaggtgctggtgattttttggaagacatggtggggcttacaggcaagcaagctggcccccagttctgctttcctgcacagagcagtcttccagagtttgtggtgggatgtaagggagctcgggcagccggagcagtgcagagacctggctccttcctccctcctgaggtctgctgctgctggcacaaggggtcacgtgtgcccgtttgccttgtgtttgctttgggtgctggcttcccactctcacttcctaatctctaaagaggagtggcctgttaggtccatgagtggtgacagtggagattgaagtgcttagcgtcaggcaccgcactgcactggcaagagcactcagattaaatgtgtttctttcattctcatctgacccgcatccactttcatttaaaa

SEQ ID NO: 182924 - DNA, 895 bp, Homo Sapiens
tttatccctcgcaaccaccagcaacaaagggagtacgattccccatttacagataagggaaatgagggcaacacactgctcttccatagggccatccccctccaccctgcctgttaagctggagctctgatcagtgctactgccaggccagtggctcaacttttcattctgtcactttttccccaggcccaagtgtagcaatagaccacgttacacattgcctgttcccaagcttccctcctcagggctcccacctcgaccctcaccatctcaacaggtcacagcttttcctcctttaacctcccgtaaggagcccagcagcccctctactcctgcctcagatgccttcccctttcctcctgccccagtgtctgcaaggaggcaggaagtcctgtgtgagtccattcctagtgtcacaatgcctggggcagtggctggacacctttccacacccctctcccgacccaccctgtgctgctcctaaggcgagatgacactgagaccacaggcatgagagcctagagtcccatgccaagggccactgtgaaaagccactccccagggtcaagctccccactgcagtgagcgccccagcgtgccccaggggtcttccccacagctttgcatttgtgggaaggtggggagccacagacagaaggatctgtggcccagagcagatgtctgaaaggagggtgcctccatctcccctggggcaaggctggcacatgaagccaacaggatgggtccagggcagcagggaagagcccggcagtggggccaggccacatcagctcgagggggtcagccagaatcacccactccgtggctgctgcccacacccccaccgcctgttacacaaacatgggctgggctggctgaaagtgagtgtggccaa

SEQ ID NO: 182925 - DNA, 886 bp, Homo Sapiens
  misc_feature (731)..(731): n is a, c, g, or t
ttgtacaaaaaagttgggacctgttgcccagcatccctgcagttcgcggtacagtctctagtagagcgcgtgtatagaggcagagaggagtgaagtccacagttcctctcctccaagagcctgccgaccatgcccgcgggcgtgcccatgtccacctacctgaaaatgttcgcagccagtctcctggccatgtgcgcaggggcagaagtggtgcacaggtactaccgaccggacctgacaatacctgaaattccaccaaagcgtggagaactcaaaacggagcttttgggactgaaagaaagaaaacacaaacctcaagtttctcaacaggaggaacttaaataactatgccaagaattctgtgaataatataagtcttaaatatgtatttcttaatttattgcatcaaactacttgtccttaagcacttagtctaatgctaactgcaagaggaggtgctcagtggatgtttagccgatacgttgaaatttaattacggtttgattgatatttcttgaaaactgccaaagcacatatcatcaaaccatttcatgaatatggtttggaagatgtttagtcttgaatataacgcgaaatagaatatttgtaagtctactatatgggttgtctttatttcatataaattaagaaattatttaaaactatgaactagtttcattaattgaatttgctaagtggagttatttctcattgctaaactgttttttttncaaattctagatctctgctaactttagtaaatgaacactaaaagtggtgagctttgataatgcattttgtggatacaaaatcatcgcctcatcactttcagaatgaaaggctgggggcattgctccacttttgcgtgaagaaaagacctgtccct

SEQ ID NO: 182926 - DNA, 890 bp, Homo Sapiens
gactttggcaagttgtttcacctctctagccctcagtgtcctcactgtaatgaggaacactgacctctttttctggatacccaccactggactggtgtgagaattgtatcagttactgcccagaagtgcatcaactgctcagcagctcctgagaccatggcaaggcatcaccatggctgacaatgtggaatcagtcttcccaggttcaactgcagctcttccttctcagcagtgtgacctacagacaggccatatgacgtctctgagccccgtgctccatctttaaaactgggagagcggtgcatactccccacatgagatgcacctgtgagaaggcaggtgaagccttttgctcttcctgactgcagtgagtggcagtgtctgtccttgggctctgggtcacatcctgcaccctctcctcagtccctctggagccagttcaaaggtgtttctattacagacacaagagttgtggttatttgtagactcataataaatacagtccctagtaagtgagaatgtaaaccctttaaaagatatgaaaaaggtgactgcttttagaatagacaataatggcaaacataagatgggggaaaggaaggaaaggatgttaacacctgtaccaagccctgagctaattcaggactttactcaaattccctcatgtaatcctgagactcatcctaagcagggaagaccatacacatgtctatgaaagccacagagagacaattatccccatgctgcaagtgaggaaacgggctgggagaaggtgagcaatctgtgcaacagcccagcaggaggtagagctgcccttccaattttaaggcacctgctaggccaggggtgtctcacttgacattgaagccctaggataattcataaagatt

SEQ ID NO: 182927 - DNA, 564 bp, Homo Sapiens
tgatgagcaatgctttttcataaaaagggctttgtacaaaaaagttggattttaatgaatctttagattgctttgggtagtattgatatcttaacagtatcaagtcatcttatccatgaacatgggatgtctttctacttacttgtgtcttccttaatgtctttcagcaatgtttcatcaatttttgtatataagtattttgcttctttggtgaaatttattcctagttatttcattattttggaattgttttcttaatttaccttttatattcactgttcagattgctggtgtgtagaaacacaacagagttttatgtgttgatcttctacctacaactggagttttaagatttttatagtatacaaatgttcttttcttatttttaaaaaattttttgacatcctaagccttacaaaatttcttataaactttactccacatattcatataggtatctcctcaccccattataatttttgttaatgtagcctccaaaaatgttgaaaaaaagttctatgtttagtaaacgtctgaaaacctatatatctgagaatatttgta

SEQ ID NO: 182928 - DNA, 894 bp, Homo Sapiens
ttggactctatctcaaaaaataataataataatttttacctcagaagaaagccccaaaatcttggattaaaacaaaaaaatgacattgggtgatgggaaaaaagaaaggaactaattatcattgagtgtgtgtaggtactatttgtgtaggtgctatatgtgtcccatctcactgatgggtacaactcatcaaatgactctcattctccctgttatatgaacaagaaggataactcccacatacagatgaggaatttggtaaattgcccaaggtcatcccacaagtaagagataaaacccagtttccattttatctggctcaaaaaaaatttctctcactataccatgctgctatataattaattttcttctttacaaagggctgtcatctcaggtgggtgcatttaaaagtttcttggtctcagattactgatgccacagtattgagatgagattgaattaaacccctttggcctcttttggatgttgtataaacagaaaaaagaagcatggtctctctctctctgtggtaaccaattgatgtgtaggtataaacatggctacccccacatgttttgctgtgatctatctctttgacttcatgcagaacctattctttttcatctcctggaccaaatgtgaaagaaagaagtggacatgtggaggattctttctctgtgaataatattgaaaaagctccattttctggggaaatacccatggttcattgtctgatgccaagaaagaattcacgacacagacacacatgaggagtgggtttaggagtggaaagtttaatagataaagaagagagtgagaaagcttcctcatgttgagaaagacagttgctcaagagagggttttctgggtttggggcaagatttgattgatttc

SEQ ID NO: 182929 - DNA, 972 bp, Homo Sapiens
  misc_feature (100)..(109): n is a, c, g, or t
ttgggtacaggctgttgtgtgctttttgtttcttgcaataaaaaatgtttggagtgtatattttgccattttcacgttgtatcacttagtttttgttagnnnnnnnnnncctgcctgatttatggcttccaaaaacgcattagcaacatgcaaagcttatattaaagtttgatgctttctccaagttcaaacacatcatagaaaagagctttccagagaccattgatgcagctttattatttagtcttgctttatttggcattttgagctccttcttttgtttacatctgtactataaagtgaaacctgaacctggggccccctatgaatatataagtgtcttagtgattttgagtttatataaactgattatattgttttcaaagtttaatgagatcttccacttctatctagttagtgcagatgtccaaattaaaatatttccctcttatactaaaatgctgcgttaattttaggccattgaaagctgtaccttatcagaggtaactccccttaaccaggataactggtttgaagaaagttaagcttaatttttgtaatcacagattaacttaatttgtgataccattttaactttgagctcttaagtaaaaagtagcagcattcctaagttgtggggtgaagcatctgtttcataacacaggtctatcataattgggttctgtaaatgtaatggttctctaaacattttaatgcccaggcttgatattgtacacaatgcaagatgtctaaaatcttcatttagaattcaagggtattgcttgctatttcacattatatactttttaaatactattgctctttgtatatgaggcatttcactaaccttggatcattggatcttaaacatgataatatagaatatctgaacattggacttgttctttagagtatatggcctttagttcttgtggaactaaatacagtgattctaagatcaaaagtcttagt

SEQ ID NO: 182930 - DNA, 942 bp, Homo Sapiens
tccccatttagaaaccccttaatgaaataaagatccaggtatggtcactgctggataaaatcactaggtgaaaaagtcaataaggagcttgtaaatggatgggtcaggttgacaacacccaaatatgataaataagtgaaagtatgggggaaagaggaagcaaccagccaaaatccagaatagtatattctataggacaaatgaccttcaacaaacgacataatagtggcagtgtgggatagggttgtggaacttgagacatttcaaccaagtgggtggcccttgcctggatcctgatttgaacaaacctattatgtataaaagacacttctgagacagttgggtgaaatttaacataaactgggtattagaggatattaaagttcatgttgttggatgttacattggtataacattaataaaagttagaaaaaaacatcaccaccctctaaaattgaacttgcaagatagtgagggaaaccctcatcaaagtagaataccagatcagggtgcaggtgctggctactccacagcaacaatcagtgctgactgggaggaggcccaagcgcacagcaggacagacctgatcagacctcaaataaagccagagcccatcaaagggctatacgcgcaggaggagggtgtaccagagaaaaaaattactgtggaggcagacagtaaggaaactttctgacttgcttaacactagtggaaggagattctagtggaaggaattctcattagtgagaattcatatagccactggctgaccctcatgaggtttggagtctgaattcacactatttggaatagtctgaaaaacctctaagtctttgatccagtaatcccatttcaaggactatttccctagttagatgtaactgaaaaatacaaaatgatgtatgtacaaagttagtcaacgtggcgttgtttgtgacccaa

SEQ ID NO: 182931 - DNA, 977 bp, Homo Sapiens
aaataatgtgtgtgaaagtttctgagatatagtaagtaataatacttgtggggattttaaggcttacttgcagtgatttaagtgtatatggggaatatttttattgtattgcattggcatgaataaagacatttgagatttggatgtttacgtcttaaaaagccagtggtatttaatatttgcaggaagaaaatgttgtatttaccctataatataggaaacttggcccattttttctaatgatatagaaaaagctcaattaggcttaaatatgacctagcaccaccccaagcctacagcacttgtattctctttaataaaaattgcgtaaattatagctttctcttgatttgcacagtacgggctcaattctaccccctttcccctaagtagagttgtttcttactatttttcaggttaaccaactaatgtcagacatatgtttcttcaccaaacactgcattaggggacgtttattttacatttgttcccttttgcaaatatttgcagttagttgcagaactgagctattttatgaagtacagaaaatatgtccagggaaaacataaggtttcaaaagtagcttttgagaaggagaaaggaagaaaagtctaattacagtgaagataggtactgatttgtgctaagagaatgtataaatcacgtccactacactcgtggttttaatgcattctgtgcatctgaattaaacaggagctagtgtttgaaattatgtctaaagctttcttcagtgatttgagaatataaaaagtagtgtttcttttctttcaaaagacatccctctcgcagtgtgccttctattcttgacttgtcttgctataaaagaaaaagctctcacagtcttttcaaatctaaatagtctgtacattaaaacagtttcttttttcatttaggaaactgaatcatagctatacagttacaaacataatatgaaaacccaacttttttgtacaaag

SEQ ID NO: 182932 - DNA, 628 bp, Homo Sapiens
tagtgatgccagcagctatgactgggagagataggagaagtaggacggctgtgattaggacggatctgacgaagtggggcgttcggtatcgagttatggcagggggctttatattgataattgttgtgctgaaattgatggcccataagatagaggagacacatgttaggtaaaggtgaagatggttaggtttacggaggctacagggagggagcagttccctgataagggagggtaaggtgttcaacaagaacgaactccggcgtactcaattgctgacacgagctccaggaggagagagggaggtaagagtcacatgtatttgtgtagaaaataatgcaattccttatgagtggcttcgagcatgaaaagaccttttcagaaaccaattaaatgatcactctttaaaaatttttgttaatctcagaatccaataatgtgacagacaaacggtatgcttaacagagtcttaaatcctgtgtataattgcttgaccatttctggcatttaaatgacctcccagaatattacacaagccatgagactagtgagcatcttactactgaccttgtacaataccaaagcttcataatgataaagaaaaccaaaaccaacttttttgtacaaa

SEQ ID NO: 182933 - DNA, 762 bp, Homo Sapiens
  misc_feature (265)..(345): n is a, c, g, or t
gggtggggtctgtttagtaatagtggacagtgccaccagggcatgaggggtgcctcggtggtgattggtggctttacctttgagactgatggggctgagccctagctctacaaggggctgcctcctgtcctgtgaggccagtccagggccaggttctcggggggtgtgcacacctcacacacacatcccccgcccttaccgcactggctgtcagatggctttggtttctagttgtccttggtgggacagagtgctcctccatgcnnnnnnnnnnnnnnnnnnnnnnnnnnnnnnnnnnnnnnnnnnnnnnnnnnnnnnnnnnnnnnnnnnnnnnnnnnnnnnnnnctggcatggcccaggtcttgtctgcccaacctccctggtgctgggcatggtgtgggggatggaccgtggggctcctgggtgcagggcagacccacagcccagcagcagcaggggcacagggagtgccaccagaacccccagctgctggatggagactctgcccatgttctccccttgcgtggctaaggatggagctgtgcagccagatgggaggtacggggtaggcaggagggctccaggaaaggggctgcccacagccaggatgcactaggcagcctgtggccccttcctctaaaacctgctctgaggccagaaagccacagcaaggatgtttccaccttcatctccctactgagtgtgacccttgggaaagaaacaggaagagcaggcaggacgcggtgactcacgcctggccaa

SEQ ID NO: 182934 - DNA, 1434 bp, Homo Sapiens
ttggcagaatttctttatgaatatacagacatatatgaacataaaatcttattctaatcgaatttttcttatgcaaaaacagcatatcatatacactattctgtatcctgctctttttactaatatatattggaaacattcgcgtaagtctatagtagagaccttactccttttttttaggcatgtgtagtgtatagcagacagattgtaagaatatataataattgatctattcccacttaataaatttttttagttgtttccattttcaattacagaaaattctccaataatgaacttgtatatatttgccattttctacatgtgaagtctatgtgtctgaaggataaagtcccaaaagtgggattgctaggtaaaaggacataagcatttgtaataatgatggatattgccaaattacttactatgaaaattatagctacttatactccctcaggagcaatatgtctatttcctcacgatattgccaactgagtcttatctaacttttgatgtttgccagtctgatagatgaaaaatgtgtcctctaagtataatgtactattcttattatgagtgagttgaacatcttttgaatatgtcaaagccatttgtatttcctttctgttaactttctgctcatagtttctgctcacttttgggatcctttccttgttaatttgtagaaggcctttattgagtagggagattagccctttgtgatatgtgttgccactttgttaagtcatttgtcttatgttttttatttggcatgcagaagttttcatatatacgtagccaaatttatcaattttgtttaatgccttttagatttggggtcatagaaaagccatccccacccccatattataaagaactctcccatgttttcttctagtattttcttgttttattaaattttcattgaaatatttatatttggactttattcacaaataaagtacagtgtgagttaaggatccaattctgtttttccaaatggttaccaaaatgttccagtaccacctatgtcaaatagtaagttttcttatgcttctgattctatttctgtagtttttactgtaatcattggtgcttatacaatttgttttattgctccgtaattctgggccttcttcattgctcttccttttcagagctttcctggctatttggctgtttatttttccatataagttttaggatcacactgtgtactgaaaacaaagttgatatttgttacttgctttttattagtattttaaataaaatttgtaaaagtgtatatatatataaaatactaattcttttcgatttttaaatgtcttttcagaggcaatttacagttgtttatatacatatattgcattctttttagttttatctttttgttgctattataattggaattttaaatttacatattatattgta

SEQ ID NO: 182935 - DNA, 838 bp, Homo Sapiens
  misc_feature (232)..(240): n is a, c, g, or t
  misc_feature (295)..(332): n is a, c, g, or t
  misc_feature (526)..(540): n is a, c, g, or t
  misc_feature (680)..(693): n is a, c, g, or t
gtgaagcagattcctgaaagtcatggtattgcattgtaggattcacttttgcgctttgtatttaaatttatcagcagtagagataactttaacagcagtagggaacacacttgttttctgtcaccgtaaacatgacacacagattaggaattcactgaatcattttacctgaaccactctttaatatgccttcattagttcatcctgttgattatcatatagaattgtttgnnnnnnnnntgacttgcaagaaaagaaagccccagcctgggcatcctaataagaccctgtctcnnnnnnnnnnnnnnnnnnnnnnnnnnnnnnnnnnnnnncccaagtctttgttttcattgaaatgcaccttctctgttcccagtcctccccttcccccaaccccagagtgcatctgtgcatcttttgaggtaattatatggcttttttcttttaatctgttagggtggtgaaaacagtaggtattctgaaccaaccttgcacttctcaggtaagccaaacttggtcataattnnnnnnnnnnnnnnnctttgtaatttcaaataactgcagcattggactagaggtggagagagtggtactgggggagtggtgaagcaagtgagaagctggaaggaatggtcatttcagtgctagtgcagtttgcaacttcagataattttggagcnnnnnnnnnnnnnnttagcaggatgtataaattcaactattttgatcttttatgaaatcgaacctggggtaaatttggagcgtgtatatatataaactgtaaagctttatttgcccttatgttattaccctcctgtttgtatttaccattcctttaaaa

SEQ ID NO: 182936 - DNA, 570 bp, Homo Sapiens
ctttgtacaaaaaagttggcttgcgttttcagaagtgtaagtggatctcagttgatctgtcaccccaaacctcaaatgatccatccaccctgcttggccatctaattcacctgctctccccagtgactattttggacctttcctctccatagatgactttgcaatctacagggaaaatacttatgcaggacatcttatatctcccccttaccacgtacagttctctccacagctgccagcagccctaacctttttgtctctccacctgtgctttggatgctcttctcccagccttttcaggatctttgtctgtcctcctatattaatgtattcaattattctctcagctagatccttgctacttggttttaaatttaagactaagattaaacaaaactatctttcacaaccacaaaccccctcccgccaagcaactaagattttcctctcattctcagccagttttcttgcaagcagtatctttagtcattgccctcaattcatctaatccctatcttaagctatctctaacatggatctttccctctactccacccaacttttttgtac

SEQ ID NO: 182937 - DNA, 951 bp, Homo Sapiens
actttgtacaaaaaagttggcagcctcagcgccctgaaagcttccttttccgagcaggtgtcagggcagaaaccaacaaaggtcatgcttcacctcttcctccatctgctgcacctaccactgattctacagattccataacaggacagaattcaagacagagagaagaagagctggaattaatagaccaactgcgtaaacatattgagtaccggttgaaagtgtctctaccttgtgatctcggagcagctctaactgacggtgttgttctttgccatttggccaatcatgtgcgacctcgatctgtcccaagcattcatgttccctcaccagctgtagtaagttgataatcctaaaaagccttggctattcatcagacatttgttaagcacagtggacagacatttcttaagcattgtgctagatattaaggatacagatataaagagtccagtctctaccttcctggtctcacttctactcgagaagaaatagacatgtatacagctacttacagcagtgcgataaatgtaagaaaggcatgtacagtgtgtgttatagggatataaaaaggggccacttaactccacctggagagttcagggaagccttcccagaacgggcaaaatttgaactaattcttgaagtttaagaaggaattttccagcagtacagagaggggagggggccttccaggcataggatttctagattcagaagctaaggaaagtttggcttttacttaaggaattggtaaattgttcagaatggatcgtgcacagggttgtaatacaaatggtaaggggtaaggctagagacgtgagctggggccgtggtacaaaggccttatgaaccgtgtgaaggacgtttaccctagtacagacaatgaggatacactgaattaaagagggaataccatgattctaactgcagtttagaatgacgaatcta

SEQ ID NO: 182938 - DNA, 542 bp, Homo Sapiens
ttggggccaaattgttaaaggtaggttaaaagtagacagcatggtgggaaggttaatcagagtcaaaatgtttcagtgttcttacatttttgggagtagccagttaatatcaacttagtctttttaagtatgcatgataaaattccgaggttaattgctagaagtatatataatctctaaatgaatagtgatgagagatggtgggataatagggaagaaacaaaattttaaatttgagaaataagcatagaaaaggtggataaaacaaaagatggcaaaacaagtccaaatagatcagtaattacaataaatgtataagtattaaactagcccaaggaaaaattgaatattaaaacaaaccccaatcatatgctgtttacaggagacacatctaaaacaaggacataaagttgtcctgcagctgtgagtaacaatataggtgaatgttaataataatgttgaatgaaaaaagctggtgtcagaagacatgtacattatgatactccagaagttcaaaaacaagtgaaacttgtttagacatg

SEQ ID NO: 182939 - DNA, 958 bp, Homo Sapiens
  misc_feature (792)..(836): n is a, c, g, or t
ccttttatttgttttttaaaccacgtagctcattgccttctcttaagtaaatgatagatattctcactgaagccaaaggaataagttcatcaagaaaatgcccaaagccctggtggatacatcctccctatcttttttttaaaccttccactatcactctatgacactgaaaagaaccaggtaagccccaaacccagatgttccagccttatcctctattgggtttacccacagacatagcaaaccctgtcagtgaggaaaattccccatccttgagtgcccccgtcctagaagtttgggccatattatggaacaggggtctcttatttgaaaagagcacaaggaggccaagattttaatggggcactttaggggatacagcccacaatggcatgggcctgaggtggccgtgatgtctgcttctaagcttaacgcatctgctcaggcacagaataaacgtctaggctggccaaaaaaggaactgaatcccaggcccatacgccagcaccagaatcaaaccagtcttcaaggaaggaaggctaggagagtttaacaagattttcaccgtgcctggcctacgtgttcaattttctatgaacaaaggctttagtccttgacccagggctaaagtggtctgtccaagctgttgttggtagagggagtatgataaaatgtttaaatctcatttggttaccttgagtcctggaacacgcagtaactgtcatgctatagtcatcatctgtatttggctgggaatacaaatgaagattgtggtgtattcaagcagtaggnnnnnnnnnnnnnnnnnnnnnnnnnnnnnnnnnnnnnnnnnnnnngtctgactacattaaagataagactgactatatttatacaacagaaactttgtaatagattttttcagctttgtgaaatcgaattttttttcatcagggctggttggatttcctttttaccc

SEQ ID NO: 182940 - DNA, 1141 bp, Homo Sapiens
  misc_feature (432)..(521): n is a, c, g, or t
tgcacacctactcctgttatttcagtgcccctctccagttcctgcacttaaaaagtgtagctgccttacaaggccctctactatttggctccataacttagaacctgcctttccaggttccaggcctatcaaacttttacttttttccaacgggtcattttctcctgtctttgaaacttcgtaaagatctttattacctgtgcctggaatttttttcttttcccttccttgctaatatttgtcttaaagccccaagctgagacatgatttatctctaggaagcttttcctgatgtcctaagtctgggtaagagtccccttttaggtactcttatagcatcctgcatgacccctgttacaataccttagtccgtattataattgctgttcattattttatgtctcctactagactgcacatctagtaaggagnnnnnnnnnnnnnnnnnnnnnnnnnnnnnnnnnnnnnnnnnnnnnnnnnnnnnnnnnnnnnnnnnnnnnnnnnnnnnnnnnnnnnnnnnnattctcccagctatatgtacaacctgtaaaattgactgttcatagtggagactttattttccctttggtcttttcagctacactggcttacagatgtgataagatattttctttaggttcctttctctgtcttgcctcttgttggggaattgtttactcacccacagtgatttgtctctggctcccgttttactaaccagagcaagttggactaggaggtgtttgcctagctcaaactggccagtcagatcctctccttggtttcagaattaggaccaagagagtcaagtctgagtcttcctatggagctggaactgtaacatgttaacttaccacctgtgaggattcatacatatctttttttgtgtacagagaagctgagaacagaggtctgcagagagacaatgaagcagagggaagttgaagtgtaggattgagagaaagcccttaactgcccgtccttaaacatggctgtatttctgtaccaggctctgtgacatgtttgtttccttataaattctccctgttttgggtcaaaccaacctgagttaatgtctgttggttgcaacagactatattgtaaccactaaataataacaaaataagtggatttcctgtaa

SEQ ID NO: 182941 - DNA, 1236 bp, Homo Sapiens
tagcaaagataatgaccttcagtttcatctgtatggctgcaaaatacatgattgtattcttttttatggttgaataggattccattgtgtatatacaccacattttcttgctcatttatctgttgatagacacttaggttgattcccctttgctatgaatagtggtgtgatgggcatgcaggagcaggtatgtttttgatatattgatttttttcctttcagtagatacctagcagtggtattgctggattgaatgatagttcttttagttctttgaaaaaccatactgttttccgtaaaggctgtactaatatccattccgagcaacagtatgagttctcttttctccatatcctcaccaacatctgctcttttttgtctttttaataatggccattctagctggggtaaaatgaaatatcattgtggttttgatttgcatttccctgatgattaatgatgagcattttttcatatacctgttggccatttgtatgtctcttttgaaaaatgtctgttcatgtcttttgtcccacatgggattatttgattttattgtttgagttccttgtatattctggatattagtcctctgttggattgatagtttgaaaatattttctcccatataacaggttgtctcttctctatgttgattgtttcctttgctgcgaagaagctttttagtttaattaagtcccatttgtctattttttcttctgttgcctgtgcttttgagttcttaatcattaatttggtgcctagatcaatgtccagaagagtttactctaggtttccttctaacatttttaaagtattgggtcttacatgtaagttttaatccatcttgagatggtttttgtatgtggtgagagataaggattcagtttcatttttctgcaatagatattcaatttttaagccatttattaaagcgggtcttctttcccccactgtatgtgttgttggttttgtcaaaaatcagttggctgtaaatatgtggctttatttctggattcactattcttttatattaatctgtatactatttttatatcactatcatgttattttgcttactagagcgttgtaatattatttgaaggcaaataaagtgatgcttccagctgtgatctttttgcttaagattgctttggttacttgggctttgttttggttccatatgaatcttatggttgttttttctaattctgtgaaaagcgacactggtatttt

SEQ ID NO: 182942 - DNA, 738 bp, Homo Sapiens
gaggggagagaggggatcacccaaatccctccacaaatttaataaatagtgatcttctccctagaaaaaaatgggacttatgtacatgcacacataaccccacattttgtgtgtatttttcaagtagtgtgggctccaggttaaaaattcttatgttaagcgaaaagctagtcactttataaaggttaagggtgtaaaagtatattaagtttccctcgcacatgatgcatcatgcaggaatttaacaacaacaacaaaaaaaacctgaagcttttaaagaatttctcattcttctgtcattttgatttcaatttgcttgctatgtgaagtagtggcttcttttatgtgttgtataatttcttctgtcctttagggtaaaattaattatgactatgattttaaagcttcaggttttttaaaaaaccatgtttaaataaaatattaggtaagcaaaaggtgaagcttacaaggaaggtgtaggaattacaaagtgaggcaaaagatcatgtttagccattctatgcaaaaatttagaagataaagtctaattgcccaaaaagcatttcttgatttacggtgtgcatgtaagtgggggtggggaggagaagcaggcagggagatcgttttgccattttatttagggctctggcaaatctgggcaaactacctgatgatttttccacgctggctatgaatgagaaaggaaagaagcctcatttaacaggtatccaacttttt

SEQ ID NO: 182943 - DNA, 828 bp, Homo Sapiens
gagcaatgctttttctataaatagagcaactttgtacaaaaaagttgggtgtatgtgtgtgtgtttttactgatacttaatagttattaagtgctgctatgtgatgggcactgtgctaccagaattagtaacttgaggtctgaagcttgtgggaaagtagccatgtgcattgaactcaagagttaaagaattggaagtctttctttgtaacttctaaaaattagattttgcatgtttttaaaaatgtgtggtcatatatattatataattatatgtatttgtgttcataactcgtgctttaacgttctataacattacaaatattactaaacttgcttttagccttcttttatatattatttatattatcgttactaaaaacgtaaggaaccataggattgcagtttacttttcggtaattatctgtatttcaagtcagttttctctgtagtttttgcaaaacactgtttctgcaagagatcccctaacaaaagattctcttgtcagataagtttgtgaaaggctgcatttttatattccatttagaactgtagtctaaatggactaagtccagaggtaaacaaacctgtttaattttgtttcacccaacatttttccaaacttaattgtttccagaacattttccacgtaagatgtggaatccacaattacttttcatagttttttcctcctttgttagatctttaacctttgtgctttctgttatgtatatgccattccttaatttgctgtaagctttgaatgaatgtgtgtaagaataaatagtcaaaagactagacaagcctctgataaactatttcagcttta

SEQ ID NO: 182944 - DNA, 828 bp, Homo Sapiens
ttgggtttccttgtccgttaagtggaacgcctaatgaagacttgctgttccctgggttgttaagatgcgtgcatggtgcggatttgaggatggctaatccccttttctctcctccaactcttgtcactaagacctgcctgtcagtcctggtggggagtcacttgcctgcctctggaatgggaggttgcagccccctctcctgttacctggttaccatggctacagccacgtggggtcatgctcccccaccccaagttccagggccccccaccagggggccagcctccccaggttccctagcaacagtcccgggtgttggggcgccagccgggcgggagggagccaggccagctggtggtgcaggccaattttagctcccacccccggcccccaggggctttgtcacccactgccccagctgcccctcgcaggggtccctcagccatgctgccttcagcgtggtgccatcccacctccagctggctgccctggcgccacctgacagggcttcttctccaggtccttatcttggtggggatcggaggccttatctccaggatctccacctgcctccctggtctctcctgggaagaagcctgggcctgtggggaagcctggctcagcactcaggaggaatcagcaggccggggttcgcatcccagcactctgctccatctgccctgtgaccttgggggagggactccccctgcctgagcctgggtgtccccgtctgaagactgcagatcataattggactcacattggagggccagggtgagggcacggcacgcaatgggcgggacgcctggttaaaagccctggccgtgg

SEQ ID NO: 182945 - DNA, 819 bp, Homo Sapiens
ctttgtacaaaaaagttgggcaaagattttcctacttaaaaaaatccatgaatatctttgattttattataaagcatttgtaaattatttgcatttgagctgtaagattcataaacatttacatttcccaatgatttctattttgatttttaaaaaatatacagggcaagctacatttttaaagcattaatcaacaactttattatattacacattccagtgcacaaacacacaatatcatttaatactcacagtagtacctgtgaaatatatcagatggatattcctatctctattttacagcagaggaaaccgaaattcagagaacttacatttctaaggttgtacagctgcaaaatgaccaaattgtgaagtccctaacatccaggttttcataatgccagtactctttctatgacatgtttatgaccctccaaatgtaccaaaactacctaactaattcactgagaggaagccaactgcaaaaataggatttttaaaagtacaatagagtattactacattttatggatttcagacaaagaaacctccgtttattatatcctgatggtgagtattgccagctctaaattattcatatttctaagaccaaggaaaatataggtaaatgaaaattttgaaataaagaacaatgccttaatttgtaaaatctatcattgctaccaccctgcccaggtctggccatttgccataaatgctggtaaataaatacaatgactgatagagttctgtctcctttctcttttgctacccaccttggttagagcaaccaaatgtctaaaaggcatgtaacaggag

SEQ ID NO: 182946 - DNA, 533 bp, Homo Sapiens
ctttgtacaaaaaagttggcactgggcagcccttcaatcttatatctctggtcaatacccctcttgatgagccttatggatttactgactcttggattgttgtcaataatctagcagtttagtctgccacgtgaaaactacggatttaatacagtccaaaagtgattgacctattgtcacaaaaagcattcaaaaatgggttgatagtcaaagcattctatgaacctctatgttctctaccatgcataagcattgagagttgttgagagttggaatgaactcaagaatttctaaatctacttcacccacttcttctgacccacaaatctttgtattgtagtttggtcattgaatgagactatctcccgaacggaatcattgcttctcagctactttccaggtaatgatgaaatggttgaggcatatatcagcctattttgcaaatttaaaatgtctttgaccgtttctgagcattatgtgtctttctttccctaatggcaaccacagtcattcttgatacaacatctgggtgg

SEQ ID NO: 182947 - DNA, 717 bp, Homo Sapiens
ttgggtaagagtacccctgaagactaaaatagagaggctggggtttgagccattttactgagtagcttagctggaacctgatatcagaagtagcctttaacaaaaagcctcttggcaattgtatggtactaacaactagagtactgaagtgtaagttgaaaccaagttgcagtgggaaatcaaaggtgaggtagcttatttgaaaccagcaaatgagacaggttggacagttttaaaatctcttctaacaaagaaactgcacggtagcaaggactagcggttctcaaagcccttctttttcagtgttctcattcaccttggcacccaagtatgtttaacaggccatgcattaaaaataaatacaaaaatataaaagccgcttaaagggaacttacaaactgacaatctctcctctgtatttgtgttcatagtggctgggagtttaattatatgcacaaaagttaggagccacttgtttctgcacagactgtaggagcaagatgaggagatgggcaggttttggtaagagcccccagttctggtggacaggcatacttgtggcattgggtgcggcattgctgggaggaccacgtcttgggaggcgattgacttttggtttgtaatttccctttaaacaagaagagatggctcacattttccatatatatctcaatgaatgtactgtattactgtttttaagaatttgatgaagtaata

SEQ ID NO: 182948 - DNA, 865 bp, Homo Sapiens
gagcaatgctttcttttaatagccaactttgtacaaaaaagttggccccaactcctcccctagaggcctattcccgctgctcacagacctcagcagaggcaccagctggagggctccagggacatccttggaaatacaggaggctttcctggcacagggcacagctcttaggaggcctttgtaggacgctgtctccccagcgtgtcctgctcatccaggatggggagaaagaggaggaggccccaggctcagaagccagggacagactgccgacgattaccaaactgaatccaggcagtgccatgaccctgggtgtcccttggttcacatcacccaccagacagctgcggagagagtgcagggaggggctgggaccaaacaggccagaaaccagcagaaaagaggcagaagtgaggtgggtgtgcctggggcacgaagccagcgccggggggatttcagtggagccttacagccaggctccgtgcggactgtgatgccagagaggcgtgcagcctctgggcaagtcgggagagggcttgggtggtccccacaaggcagaagaggtggaagggccagagaagaccaccaagaccaccgttcccgcaggcctggggtgagtgacctgactgagactagcgggcagagccaagcagggctaaactccaacccagggcccggtgttggacaaagtagctttttctttgctcgtttgtctgtgtattaagaagagactaaaatagccaaacgacgctggtcgcatgcgctggctgtggtctgtctgctgaatgtctatttttgtctcctgacgagacgtgaggaccatgcccttgatccctccgatggaccagaaacccccttcccttgc

SEQ ID NO: 182949 - DNA, 856 bp, Homo Sapiens
ttgggactggtttaagtccacctggactcacctttagaaagtgcgaggagagcccatgcctctgatacactcataggtcaaggcaggggctcctatacctgaaagaggaggtttctgtttcaaagaagagaggggggtaagagacagtgagtgcccaaacacagcgtcctgtacagacagcttgggcgttgttctcagggaagactgcgcctcgaagatccttggaggaaaccaaagtgggctcccagccaggttcgctgcttctgtctctgtctctgtctcgttattctcaccgctccagcctttaaggaagagcacaccggacccgaaggtaagtggacagtaggttactgtctttttgtttttaactttacagtatgggattatattattttctaatgaaaaccaacattttattgcatttaaattacttaagaaatcttgaagtagcttctactcttaaaaatccaaattcatataggtaagtctaaagcccctttggctctgataagcatccttgcccctcattacagcccctactcccaccctcagaagtaaagcactgctgcaatttcatgcgttcctttccaaggaccccccttttatagtgtgataaaaattcataaaattgaccatcttgaccattttttaagtgcagttcagcaatgttaggtgtatattcacgttgttgtgaaacatctccagaattttttcatcttgcaaaactggaactctgttcccatcaaacagctccgctccgcccctccccctgccccggtaaccaccattctactttctttgtgaatttgactactctaggtaccacttaatggtagaaattatatagtatttgtca

SEQ ID NO: 182950 - DNA, 1193 bp, Homo Sapiens
  misc_feature (264)..(344): n is a, c, g, or t
  misc_feature (387)..(500): n is a, c, g, or t
ttggcacagaaataattacatacatgatacaggaagacacagaaaaagagaaactggtctgataccagaagtatcaactcaggaacaattttctactagctgagcctcagaagcagcaacttttccaaagtgaagtgatgaatggaggcgccagccctcctcctcaggttaagaaaggcaaagagccctgcttttggctgtaaaaagccaggttccctaatcaggtgaaggcctgaggcagggactccttagggcagtgtaacnnnnnnnnnnnnnnnnnnnnnnnnnnnnnnnnnnnnnnnnnnnnnnnnnnnnnnnnnnnnnnnnnnnnnnnnnnnnnnnnntgagcctctcagcccctcgttcagcctcagttccacatgtgtnnnnnnnnnnnnnnnnnnnnnnnnnnnnnnnnnnnnnnnnnnnnnnnnnnnnnnnnnnnnnnnnnnnnnnnnnnnnnnnnnnnnnnnnnnnnnnnnnnnnnnnnnnnnnnnnnntatttattttgaaaattcttcctttagtcaaacttataagttttctgtggctcaaaatattctcaaccagggtttctttagtggccatcagctcccagggggtgatatcatggaagctgttatgcttaggaatttgtttaaaaagacgtcctgccctgtgccccagtacatttcaacaccacccagccacacagccgccttctggcccaacactcttaaagacacagtgcttgggaaatgtcctcatgcccctttcctgaggcaggtttgccactgtttccccaggcctggcagtcacagatggcagtcactgacctgctgtgatttgagagatggagagaaaaccttccactcttcttattctccctaatagcctcagtctctgccttcagttccacatttccctttggcgtaagctatgattgtcgtccaaggcccctcctagataggcaaggactcatgataccaagagtgtgatcaggggatagagatgagatgtctgggttggatgcgggagtggggtattttctaactaatggggtgcaaggggtacctgagcatgctctcaaaatgtgttataccctaaaaaatgtttttaaggtagtgtgttgatataacagttgttaagaccatgatgctagaggaagatcgtgagatccatagagaaagtagttgatgagtagggccttttat

SEQ ID NO: 182951 - DNA, 592 bp, Homo Sapiens
cttaatctgttcaggtgattaatgtctctagagtgttttaatttcttaatctgactagattttataccaacaccatcaagtttgattatgggtgcagttacaattctcctagggtttagtccttgttcccctggtaaaagattttaaacagcctagccttaatcagtaagtaatcagctattgttgcctcatctattgtatagctttctcatagtgagaatttccgcttaatttttagctggtgcttgaagtagtcatactgagcttcttaatatatatcccttttaacttaaaggttgtcacactatgtatgttttttttctattttcacacttaccgtcctcaacatttttcgaggcaaggactacttcctcagatgtgaatgagagtccatttctgcctgagcagcattctgtgtaactaaaagccttaactggctgaaatattttgaaatatttttcttcagaaaagtagagaatttgactcctaattgtgttcatgagactgttacatagattcaaaacaaaactgtattacttgctttattttggctgtggtcagacgaaatagtaggttttaaaaagaaatccaa

SEQ ID NO: 182952 - DNA, 1624 bp, Homo Sapiens
  misc_feature (1073)..(1105): n is a, c, g, or t
  misc_feature (1107)..(1149): n is a, c, g, or t
  misc_feature (1411)..(1469): n is a, c, g, or t
aaagctctgattcagggtgaccagaggtcatcatggtctgagattcgaggctgtaggcagggggtgagaggttcactaggagcacagaaggccaaggttggggagaggcagcagagagagtggcctccctttcggcccaggtgggaggttcacagagacacacttccttcttccccaaggcaggacttgttatagtgagcttcaggcagtctggctcttaggactaactaggatgtcaccctccctgcagcatccaccactccatagacaacatgagaggagtgtgtaagtataactagaacaagctagtgtcctgatattctctgtgatggaggggacagccctcctcagagacccgggggtgcccagaaccatgggcagcctgaacacactttactttctcagcagtgaaaatcagaaccctggcctactaaagcagaaattaaaaagagaaaaacctaagttcctgcctgttccaggctgactcactccaaggccgtgctaggattaagataactttatatacaaggccaggaagagcccagaaggaatggattccaggaacagggatgagaaaaacaagttcttatcagcttccccctttgagattctttcccaggccaatatctctttgttctgctctcataactatttttgtaactatctctgtaagtttataaggattttttaagttcctgttttccatctgtgtgaccctgagaaggtcacaagacatgcctgagcaagcctaaaatagttaccatctgctgagagcctgctgggtggcccagcagaggtcatcagacatgtttgagtcatacacttgtcactgtttgattaactgcctttgttctgcttctgtaagcttgctaagcccgccctgtaagttctgcacagctgcatgcttaaaaaccaggccccgtcttttttccgggctcagccttttggatgaaaatccactgggcaagtggtcactttaataaaatcctcctgtctcacccattggtctctccagtctcttgaatccctcaacactaagatggctccaagacagcatgtgagacttaataacnnnnnnnnnnnnnnnnnnnnnnnnnnnnnnnnnannnnnnnnnnnnnnnnnnnnnnnnnnnnnnnnnnnnnnnnnnntaaacatccttcagcagaaaccttcataggctagcttcctagaagtagaggttattaggtccaaggttgtgaattgttttaaagctatttatttttctggataaaattgcttccagagatactgtcccattgcattgcaatcagtggatctcaccttcagtattttgtgcaattaaaaaaaagaatgcttctccttttaaagattatatttaaaatagcttttaaatatgaaaaatttgtatctacaaataagagatagtgnnnnnnnnnnnnnnnnnnnnnnnnnnnnnnnnnnnnnnnnnnnnnnnnnnnnnnnnnnncacaggcctctgtcatggagaggacagctgcaatagcttttttgttcttttatctctgcttgatacattcttcttttaattaatttttaccccaacttaagtgctggctgagttgtcgatttgttgctggatggaaagaagaaatttgcacccaa

SEQ ID NO: 182953 - DNA, 646 bp, Homo Sapiens
gtacaaaaaagttggcctaaagtgctgggattacaagtagtgagctactgcatcccacagtatcttggatttttataaggccagacatttacctctggtaatctcttgagccatgtgtttcatttttatgctcacagaataatttggtgtaatggggcttatcaacccaaatttcagaactttaaattcatgtatctttttctacactgatgactatactcaaagcatcttactttaattatataaatgtatatactgtctttctcaactggggtttcaagagagaattaagcccaaaataaaataatttgtgtatcttattttatcatttttctctaggatgatacacagctaatacccttctagatgcatagaaaaaagttaatttattatatacaatggataccttaaggcaagagttgacaaacttttcctgcaaaggaccagatagtaaatattttaggcttcgtgggtcataaagtgtctattgtaactgtttaaccctaccttgtagcatgaaatacttaaacaaatgagtgtggctcaaataatataaaattttattcatagacactgaaagttgaatttcagataactttaacatgtcacagaatactcttaaatttcttcaaccattaaaaaatgt

SEQ ID NO: 182954 - DNA, 297 bp, Homo Sapiens
ttggattagactggattaaataatccttcagtgcagagacatagacgtccatccacatgaaacaacagcaaacagagaaccatgacctacttaaagggacaaagcaaggaatcagtaactggccctaatgagatggcaggatgtgagctctttgaccaaaaattcaaaatagcagtcttaaggaaattcagcgatgtctaagataacacagaaaagcaatttagaaatttgttagagaaatgtaacaaagagattgaaataatttttaaaaatcaagcagaaatcttggagctgagt

SEQ ID NO: 182955 - DNA, 989 bp, Homo Sapiens
  misc_feature (802)..(821): n is a, c, g, or t
taacattgatagcatctcccgtggcccttcagtttagtagtgccagttaatattgtttctgaaaacttttcctctcaaagtgctggctataattttttctccatccagtacacataagaaaaggatttagtaacacttgggcaagtaataaactgtagaactttaaaagtagtaaaggcatataccaagcatacgtgactccacacattgtcagaaaggcagtggactggctaacgagtttctgccaagtttcagaagcaaagaatgcactaatgaaaagggtaaggcatccaagcagagtgtctgaattgatggaccacttttgtctaaaactaatttcaacatcttccaatatgcaagcaggcatttgttttacataaggtgaaacactttataagagaaaagaaaactcctataaagcttataagatcagaaaaaattaatactgaatttttataatcaatgcatggagcaatgatataaactgaccataacaattttgtgagaacaagtataaaactatccattactaccttaaagagttgaaagttaagccctctaaagtattcaaagtggaataaataacaaggtaggaaatgcaatacctatatattttaaaaagcccacatctagttaatgttctcttagtttgttttaaatcagttgttcatccaacctggagttgatttaaggatgttggtaaaaatcttcaaaagtccttcaaatcattttagatgaaatgtgatagaaaaaactatacaactcattctctaatcttgctatttttcacaccatccttccnnnnnnnnnnnnnnnnnnnnctagataaattcttccaccggagtaactgacattaagtggccactattcctgtagtaatcatttgtaagaatctaaaagtcttgcagtaggggacgaaaaatgattataaatattttaataggctcatgcctcatcttcaaaagggatgaaacttggatagtagccaa

SEQ ID NO: 182956 - DNA, 1360 bp, Homo Sapiens
  misc_feature (1093)..(1102): n is a, c, g, or t
ttggatttaattgcacttgaaacctgtctttgagcttccagattttgtgagcactttagcaacagaagttttagagagaaatgatagtttaatgttaagtgttctggcatgtactaatagtacttgtggctttttggcaatgcctgtgtcggctttctttgtgctctacctttgtggaataatggtttctaattttgaaagaaaagcataaaatagagcagtattttattaagcaaacacttgttagtgttcagaataagtctgtagaggagggcatgcttaatgtgcagaaacaggaatataataagaggtgttaagtgtgatgcttccataatacatttggatgctgtcagctaagttcacttctgaactaaggggttcctccaaatgttggctgaaattcatcccaaggctggtctgcaagtgagtgtctgcacacagtttgcttgtatgtggagtcgatccaaaatagcatcaatgttggttttaccaaagtatttattattgataatagaggctaagtacaaaatgtagagaatgtcagctacttgaggcctttgattattaaaaattttattaatgcattaaacaagagtacagtaaatagataaattttaggttcatgaaataaaactgaataatttatttttacttactatttatcatggaattactttgaataatttatttttaatggtataattggacagtaaaatttataaactcagtgcttttcataaaaatcaaagtgaagtttgtaatattttatacaaatagaattattatttaagagaaataacctgtttatgcctaattacagtttttaatcatttcagttacctatttcttttaagaataaatttagtgggaatatcagttccagtcatgggtaccaaacttttttagtgacagagtacacacaggtatgtaaaacttgtcatttctcatcaaatagaggctgctgaatataggcaggtaagaaaagctatgagaaagaattgttttgcagaatatttgtctagttgtcagagcaaggaactgaatttattgacacagaacattttattaagtaaaaaaaatggttcttataacnnnnnnnnnngctaattttacagaaggcagtagttaatatagccgccaataaaataaatgtttctctgaatactttccgaggcattacagtgatttttaactaatatgaagtgatatataataattttaaagtaacatccttgagttttcctattattaattgcttatggaaattgggtttcacgtatgactgagagctaaagcattacagtgagttagaaaacacaacacaaatgtaaagaaaatgttagtggtgagtaatctgatt

SEQ ID NO: 182957 - DNA, 772 bp, Homo Sapiens
ctttgtacaaaaaagttggatgtgagatgtgcctttgctcctcacaatcatgttgggaggcaaggaggagcaagtcatgtcttacatggatggtggcaggcaaaaagagagtttacgcagggaaactcccctttttaaaaccatcagatctcaagagacttattcactcttatgggaagagcatggcaaagaagtgcccccatgatttaattacctcctaccaggtccttcccacaacatgtggggattcatgatgagattttgatggggacacagccaaaccatatcatatattatggaaaattttctaagataatgcttctagaagtctttttcaaaatataaaaataattattatagtataatctgtacaacattcaaacaaccagttggtgaggttgtaaatcaaatgagagaggaggaactgatccgggtagcaggaacacatttccaagtaaaatttgcaacagagcatgttgagatcatggttttaatttatgaatggcattattatctttaaactattattttccaagctcatatatggcctttttgaaggttttctgaatgttacatttgattttaagatctaatccaaaatgaaatatagaatgtgctttgttttctataaaaatgccaatgactatctcttaaattagtcaaggaaagacaaattaccaaaattcaaacttatttgaattatttttaagtgattccaggcaataaatacatagaacccatggaaagttttagcttcaaatcacaaaattgc

SEQ ID NO: 182958 - DNA, 449 bp, Homo Sapiens
tatatgagtcttatatgtatctatacatacatatatatatgagacttaatacttcaatgagaaacactgaaataaaataacaaaaaagcatttccactgtccatcagttgctaagtagccatgtgccccatctaatgtaatctaatttatcatggaattttggtttaagctggacattaagaattgcaaataaatggcttttgcctaagattaatagtaacattaatattgtttttcttccatctgcagaagtaacattaatgaaaatcaaatgttaaaattatataatttattagtaaagtgttttattagtaccttatacatctggaattactctttaattctggaaacaatttacttagactacataagagtaagatttcatactataatatagatttatgcaataattgttttcttctgaattaatatttgaatttgaagctgca

SEQ ID NO: 182959 - DNA, 2430 bp, Homo Sapiens
  misc_feature (329)..(342): n is a, c, g, or t
  misc_feature (1890)..(2179): n is a, c, g, or t
ttgggtttatcctttatttttctatgtagaagtttttgaatttgtgtgtgtgcttgtgcgtgtctacacctagtattacggctgggactctccagctgtttttgttgttgttatgtttttaagagggttgaattcttccatcaggtgaacgaaaaaggcaacaaagtaataaatcagtgaatgtggccggcagctgtgtttagcccctccagatggaagtttcacttgaatgtaaaataataaagtttatattttgaatttctcttttcatgggggaaaaaaggtacgttaaaaaaatcaaaataatgatatgtcacttgcagctaccnnnnnnnnnnnnnnaaattcaatcagccaccttcatgtgcctttttcctttgtctttccccaaaattccaggaccagagatctggccctggcctattttctcttgctgtgtacacacacgcacacatgctgggtggcaggatctcgcccgctggagggtggtggagcccagtagaattggggtgactgggcataaacctgctgagactgcttccttccctggttgtgagtgatgtgaatgcctgccttccccggtcagcacttagaagcccttgataggcagcatttggcgacttgtggggcaggtgtttgggataaatcctaccttcatcctaggacttatttctgcatcagccttttaactcaggcacttcaggtaacgtgatctatgtgtgttttgactgaatctcatctcctgtgtttccctgtgcagtctagggaagcatgtctccagtctttgtccctgtcttgtcccaaccattaattctcatgtcacagcttctcactgcatgtgacaagagccaggcctatctgctagggccctgcggctgaggtctgacctggaccctcatgcccgagtcggaagacccctctccagaagccattctgcatccttgtctgctctgcgtcacccgagaacacaggcttcgcagcctcgctttctgaaatggtgtgtgccgagtcagattgccgctcagagaaaatacaagcccgttttccctagctgtgccatttggtgctctgccaggctgccgtgcaagggaataccgacgagacgagctgcactgtctctgatttggagccctcaccggagcttgtctttaaaaatgagcaggaagctcatgtatgtttgcatttcagtgagccgggtcctgacctgccgccacccatcacggtcagcgtggtgcatcttaccgaggaggcgcaggcctggattcttttgagtggtgctactgcctaggaagtaacacgtggagaatttccatcttgggaccatgcacacagtgccttggggagtagattttgccctaatagcgatgaagaattttatcagtcagtggagttcctttttcagatcagggatgggaaagagccaaactgggtacctcccacgtgtgccccgtgaacagccctttgcagctgggctgtggggcttggctgctgccctgtcccatctggcagttaacgccttctccctgctctgccccccactccccaaaaccagttgcagcctcaacccacatggggatgtagaaagccgtaaagtccacgctactgttgaaaatgtttacatctccgctctcaacctgccttgggttcgtgttaaatggtgttaaattctgcaaatggaggggaaaaaaatcaaattctaaatttcaaagtagaatttaaagcaaatttgtaaaaaaattatcctaccaccccttttggtccacttaagatatgccacgctgaagcaaggtatttcctactggattttgctttcactggtgtttagaaaataaacttgatttctctaggagcactcctttggttagagggatgcaagaaggagaggtgaannnnnnnnnnnnnnnnnnnnnnnnnnnnnnnnnnnnnnnnnnnnnnnnnnnnnnnnnnnnnnnnnnnnnnnnnnnnnnnnnnnnnnnnnnnnnnnnnnnnnnnnnnnnnnnnnnnnnnnnnnnnnnnnnnnnnnnnnnnnnnnnnnnnnnnnnnnnnnnnnnnnnnnnnnnnnnnnnnnnnnnnnnnnnnnnnnnnnnnnnnnnnnnnnnnnnnnnnnnnnnnnnnnnnnnnnnnnnnnnnnnnnnnnnnnnnnnnnnnnnnnnnnnnnnnnnnnnnnnnnnnnnnnnnnggcaaaaaccggaccctggagctctgtgggccctgattgcaggcccctacctgtgtgatgagggatgagtcagcttggggagccacttggccagcctgcatgcctggtcatcaggaggttgagaaaagccttgaaagttgtgaagcactgagcagatacaagtgtttgttaattttgtagaaattaactttcccatctggcctttatctccaaagttggtattgttgccccacgcagacttgcagtccggt

SEQ ID NO: 182960 - DNA, 1063 bp, Homo Sapiens
aaatcgtgaatatcttgtgactaaaagagcccaaaagaatttttgttacctgagagagacaagagaagttcaggaacttgccctagattttatctaagcggtggaaaaaacgggccctccagggtgcacagggacaggctggagggcaaaggaaatggcgccctctctcttaacagccactctcactctgttgggtgcacgtgtgcattcaaaaactttctcagaaaaaagttggcagaaaaaggaatgtactactttcaagacagcagctcaagctatgaatgcactaagaacctgttttgagacgatccctggcagctggcaaaagtgcaaccttgagaagaggccgtgaaatatccccaacgaaacagaaggatttccaaactgaagaacgttgcagaaggcatcaagcgcggtgccttcgcttcacagatgagtagtttggggcccagcgggtgaagcggcccagctggttggtgcagagcccagcccagcatccagattctctgatttgggaagagctacctttcctcgaggccagctgggatgtgcgaaggaaaccaggtcccgtggagaaagttacctggactttctagcaagggaaagcctaagtaaagaaaacagttggccaagaggaaagacagtggtggcaatgctgagagagtgccgaggaaagagtggagagtttgtagccaagacgaacatttatagtaagctcccaacagccaaggacttgaaagccatcaccgtccagctggacacgagagcaagaattcagtacatcctgccgggccctgctagttgtgcagagcacaaggtcctaggcaagccagtgtcggggtaaaacactgcttccgtcgaaagtagagttaagaatggaatggaaaaagactgaggcctgcatagcgcacgcacggggatttcaaaatggattcgaaaaccctccacaatgcaatcttgggagatcgcaacataaaaaggaaggaattcaatgcaggtgagcctcaatagacaccacggcgtggttctgaaataccaacttttttgtacaaagttggctttt

SEQ ID NO: 182961 - DNA, 1917 bp, Homo Sapiens
ttggcagcatgatccactgtgcccagctgctagaacatttttaaatgaaaatctccatactttataacatttgactacagagatttaattggtagtattcacatgacataaaagatgatgtcccattacttgattttttgagggtttaaacacaaaaattacatgaacacggaaatatttatataatgatatttaccacatgaaatgtaggctgtatcatttcagctaagcggaactgtcaaatgattttattaagattatgaaaaaatgtttaaaaatagtttttaaaagattatgaaaagtgttgcataaccggtagctgcctgaataaaggtgatctattctaaatgaacatcagcaagattaaggaacataatttaaaatccttataatgtcaaactattttaaccataagcctagtttttacaattctgtattcttggggtttttacaacgcatacttcagtggttttgccaatatttaatgatatcatgagtctttcctccttggtttctttctgaatactccctgtgtctcagtcaacctgatttttctcccaagactttgtctttctgattggtcaggctctttgaagccagcaagtggcaggaaatcttttttaaaaacttgaaggtaattgagatctaggaggttttaggattctttcttgagcttgaaggtagtatgcctaactcagaatctacgtttcactttaagggtagttcagtttccttttccttagaatgaaagcagaggagaccagtgatggcgagtgaaagacagggttgaagtctcccacaaagtaatctgtgtttgagggagaggggagggaaggaaagcaccacggaggcaagagtcacctgtcagtttggtacattttctttcctattataatagataatggaaactagaaaataaaatgttgcttttagaaacaacaaaatcaggtctgacttgggactcaggcactttccttttaaacaaacaccctagctgatgtagataatgctgatactttgaaaaatatttcttaaaggaaatccatctagcctttaatatgttttactgagagcacatgtttagaaagcattttgtaaccccaaaagtactacacgagtgttacacacctccacaaaatagaacttaaagaccaaaagattttaaatgagagaatagttccatatgtatgtatatgtttgttttgaatgctttcctgtagtaattatttatatagaacttcctgtgctactaagagaaggcatcaagtcatatgtccattttacaggtggaaaatggaaccaaatacatttaatcataagagggaaagaaaaaaagagagctgggagttcagattcagtagtagataattgtcttctttattaaatttaagagtaaaggtaaataataattggttttctttagtaaaacagtcgcacttggaaaaaaaatttgtttttgtgcacaaaggaaaataatgccatatatcttcatgttttattttcacgtatattagataatattggccttttcttgataagtgagtgtggtgatgcagtgtgctctggattggctttgtccaaagaaggaagccaagatcacatcccacagaaggagcgagaacttgcgtcatgggtagagaggaaaacacttagcactctttgaatagtacagtacattgctgagtagtgatacttttaactactctgcagtagaaattttactgtgcacattgcttggctctttctactatttagttgtataaagaagtggaggagaaacaaatgaagaattttgagaactacgagacatctgtaggatttcgtgtaattgcgtatactttatctacataaagagaacaaaaaggttaaatccttgtgacatcacttagcatttaatgtccatattccctttatgga

SEQ ID NO: 182962 - DNA, 992 bp, Homo Sapiens
actttgtacaaaaaagttggatttgctgggtttttccctccccaggaatttataatctcttgctcccttttgtgtttatctgctgtatcatgggtctcctggagccagtggcatagcccagctctttttttgttcatactggccccaggcacctaaaatatactggtcccatctgtgcttcaaaccattccctacagaaaccattccctcaggtaacctcttacaaagttggaacattttcacagtccatctctcctccctagggaaaagctaggatttggggatgttggggattctacctgcttactctgcactgagctgggggagcggctgtagtgagctcatgcttgctagtccaaacttccactttgatttcagcaacttccaacctgggccctttgtttttagctctcggactcaggcaagacagaaaacagtctctcgtgcaggttccagaaaagtcagaatgttggatgtacattccagtcatttccttccctctgcaaaaagaagctgggagctgagggtttcctctctatcatgtggtactgtgctgggtccatgggaagggaagaattatggcaagagggtgcctcaggtttttctgccgactttgattcagctggtttcatgctttcctatagtgcagaagaccctcaactggtttctggatttcccacaaagggaatttttccatgtgttattgaatcagtgtgtctgtagagggaaggagtgtccagggcttcctattctgtcatcttgctgacatcactttctccaaggcctttttttcccttaaaactgaaaaagaccttaaatgaattacaggagaaacaatttacctgatggaccagaatcaaaatggcataaggctcttccacaacatctttgggaaccagaacaaagcctttgaattctgaggaaaatcattttcaacctagaattctgtactcactaaactatcattatgagggtaaaataagatgtttcta

SEQ ID NO: 182963 - DNA, 1431 bp, Homo Sapiens
  misc_feature (1046)..(1059): n is a, c, g, or t
ttggggcagcactctgtggtggtcagccctcagagctgtttctaggcatctctcagatcagacagcaaagaatctacccagatctgggctgggtggaggtgtggctgggctgggggccattctgagcctgcagtgagagtttggcccagcctcagtccttgctcttctctggctacctctgcagggagctgcaggggcaagcactctctccagcactcaggaagcccggccgagggtacctcctcgtggaaagaatgcactttaaagctctgctgaggagttcggagcccaggctttcaggcgacctctgccctccctgcctctcctcaccctccctctcttcctgcagggcctgggaagggctttgagggagcctgggagccatgtgaagaggggcacgcctgggctgtcccacagtttagatccagttggaggttctccctggctcctgcaggcctgcggggatctctccccacttcaggcctccggccagctgcctgccctcttgtctgtgcttcagccctgcacaaaagcagcttggtgacaccactcagccacccagagtacgtgtttacaggctttccagatcaccttcctgtggggtgaacgtaatgaggcggggctggtccttggaatttcccctggaaaatggtaacagactccatccttgacccggggatgagcatgaaggcattgtcccaaaggcagaggccaccgtggtaggaattccaccaaggccagaagggaaaaaggaagaacccaccgtgtctggctgtgcgggccctggggagggtcgtgagtgcagcccctctctacttccgtgcctttgtaaaacgtgtagataaccgcagtggttggctgagccaagaactctcctaaatcagtggctttctccccaccccttgctggggagtcatttttaaaaaaatctgtgggatataaaattggcctcctgctgcttcagcctacctctccctctgctgacttaatgtcgtgattctgtttcttcagatatttaaggctgttaggttgtgtgagccttgaannnnnnnnnnnnnncccagcgactgtccactgtccaggagatgcatgtctttgtattggagatatttctgtaactcattctcttggtgctcacgattgccatggccatagggccacagtgccgtatctgctgcagacatgattgtttcttgttctagaggttttcttgttttcgaatcttgcctgatgaatccagccagaccaaggggcctagatttgacctctgtcctgggctcctgggccaggtgcaggaacatctgaggccactctgctggccacctccagtgggtgctgaccacaggatgggctttgtttacactcattttcaccctgattcttgcccccactttcataaaagaaacttcaaaatgctgacgctttggagag

SEQ ID NO: 182964 - DNA, 501 bp, Homo Sapiens
acaaaaaagttggcacaaatacttaccaatgtgttacaactgcttacagtatttagtacagtaaaatgttgaacaagtttgtagcctaggagcaataggatatgctttatatcctaggtgtgtagtaggctctacaatctaggtttgtgttaggacactctgtgattgcacaattacaaaattgtctaatgatgcatttgttagaacaaatagctgtcatttagtgatgtatgactgtatataaattttttcaaccctaatgagagcatattgttctgcaacgtggttgttttctgtcaatgatctccaatttatatttcaataagttctttatctaatattcaaatggttaaatttccaaaattgctcccaaaatgttacttgcattggagatctgtttctgggccatttctgtggttatagctagaaaagttatgagtttgtattcatgtttccaattgtattttaataaatagtttagttttttactttatttaaatt

SEQ ID NO: 182965 - DNA, 532 bp, Homo Sapiens
  misc_feature (303)..(312): n is a, c, g, or t
  misc_feature (342)..(350): n is a, c, g, or t
  misc_feature (352)..(386): n is a, c, g, or t
gataaataagattgaataccacaattaacataacgtcttatggacattgtggaacactgtaccccaaaatatacattcttacaataaaatatttttaactgaccatatgctaaagtcttaaatttgaaaatattgaaaaataccatatatttggaaatgaaattcttgtgataactaaagtctactgatacacaatcctggaattctagattaaaggaaaaaattatttagaagacattattgagacaaatgatataattaagaaacatggtctatagtttaaagtactgtaaacaaagtcannnnnnnnnnaactgtactatgggcacataagaaaatccnnnnnnnnnannnnnnnnnnnnnnnnnnnnnnnnnnnnnnnnnnntatgagaggcaaactaaaaattgattaatctgtataagagatatatgatctctatatactttgcaaatttaactttgaaattgttttaaaataggcagtttaatacattcaaatcatcaaggaattccagtagatggtagaaaaac

SEQ ID NO: 182966 - DNA, 910 bp, Homo Sapiens
ttggcacatgctgaggttcgaggggagaagaattttgggaaagaattattcaaccactacagatggatgaccagccaacctgggtggcccacaataaaagagaagcatcaagggaggactggggcaagaaagagagtccagggctggtggacagggaggacaccctgaggaagatagaaaaggaaaccagtttacatttggcaacagaaggaaaccagggcttgggagagaggaaaacacggcgagtagctttgcaggaaagggctgtgtctcaacctgggcctctctatccatttatctcctgcatatcttaaagaattaaaatgtaaatatcggaaattaaatccatgggtacagtgtaaatagaggaggcttttacagaacagacaaagctgttctttttccttattaaacagccgtgggtgggaaagcacgtctgtatgcacaggttttatttgagatggattaaggttcgtgatgagtgaatctctgaaggattgcaggtgcagttctcataagcccgcaaaagttcagctccttatctgaggcttatccaaacctgatgaaaccttttaggccagcgtggaggtttgggacctccagcagttgaaagttaatatcctgcatcaggaaaccacctgtatcgtgtgggggcgttggggagggaggtctataaattaatgcagactccgatcagaagcctgctgtggtttggggcttcctaggcttggaccacccactctctttggtggatggattacaagttcagcccttttagctcttgcagaggaggagttaatgcatcctagttcttgggatcttttaccacatttagttctcacatcagcttataggatctggctccgtgacctgccactgctgtcaccacactggccttcctgcagtgtga

SEQ ID NO: 182967 - DNA, 371 bp, Homo Sapiens
agtgtgagccactacgcctggcctaaaatcatgataaggtatgccaagttattgaaaattatctatgtttcatgaatcaagccttgcgttttctcactgaacatttctgtggcttactatggcccaaggtttctagttcaaaggctctaggatctgagacgatcacggagaacaaaccaaaggtcaggctgatacagacatgcagagcctttgggaaaactgcagttgttgcaggggccccaggattccctagttagaaggatttgtttcttccccttttctgtctagctcagagttattacccttaattcaacttttttcatttttgctcatgtgagaaaatagaaccaattgaggatgagcttgttatt

SEQ ID NO: 182968 - DNA, 976 bp, Homo Sapiens
ttggcaaagaaccagcagtcatgggaaagcaggcatgaacattccatatttgaactgatcagaagaatctgtctggatgtattaatacttcagggagtagttcgagttttttatttaatgtctttggtgctttgtacaactcccattgtactgttcccttaatgccttgtagtggatgcaagtttgtactcttcttattttttctagtaaatttattgaggtcagcgatcatgtcttagtcacctatcaatgattagattcagaaacttgtataggatcaaccttcaacaaacattagggctaggagggaatgaatgagatgagacagaaaggacaaggggggtgaggcaggttgagaaaaagctgtacagtcatttattcagcaaataacttaagcctaccatgtccacttacttggatatgtctgggaatgctgtcacttgcaaaaacagacatttgatttgaagctttccatgtgtttatcccttgccaggcctgtagttagagagagcagtggtctgcctttgcgatccctcttctctttccttctgggctccaaccattcctcctatgttgggtctggaggaaggagaggcagtggtcaagtgtctctaatgtgactgagactggtatccccttgctctggcaggaggcccttttgggcaggtgctggaagatgctctaactggtcaccttaaccagtgttctgtgaagcaagcagaactgggagggtaaggcttctctctaccttgctgtgctgtattctgtgtttcctttccctcattcaggtagggggcagagtaaatcagcaggtttattgcttatccaactggggaatgagaagtcagttttgcaggcatccctagcctctgggagtagatctcttcctctcccatcacatgacagtgcgccccaacaagcaaacaacttaatgactccaaggagtcccttcatctttcctcttcccagcttggga

SEQ ID NO: 182969 - DNA, 1581 bp, Homo Sapiens
ttggcaaagcttgcagggtaagtgacacaacttgaaactgcttggccctctttaaaaagaaataataaaatgggagagaatgaagcaagtttacctaacacgtctttgcaaggtaaaaagatggcctatcagaaggtccatgcagatcaaagagctccaggacactcacagtacttagacaatgatgaccttcaagccactgcccttgacttagagtgggacatggagaaggaactagaggagtctggttttgaccaattccagctagacagtgctgagaatcagaacctagggcattcagagactatagacctcaatcttgattccattcaaccagcaacttcacccaaaggaaggttccagagacttcaagaagaatctgactacattacccattatacacgatctgcaccaaagagcaatcgctgcaacttttgccacgtcttaaaaatgctttgcacagccaccattttatttatttttgggattttgataggttattatgtacatacaaattgcccttcagatgctccatcttcaggaacagttgatcctcagttatatcaagagattctcaagacaatccaggcagaagatattaagaagtctttcaggtaggtgaagaagaaacagatgttgtttgaatgcatttcttgggaaaaatgtctcacagggggtattgaactgatgatttttcatggttcacgtcagtgttgcaagctgagaaacatatcaccacaacaagaatagaaacttcaaagaggggagcgcacattttcagatttatggtactgcaatataaatttgtgatgcagttttattaattactagtaagaatcataactactatggagactaaaattctccagccactgtattttctccctcttggtgagccttgttaggccaaattgggatgcaaagattgccagatatacaggtaataaaaactaggacattagccatatgattaaaaactttaatgacatcagaataaaataaacctgctttatgggctgaagtaactcttcaaaagtttcaccgatgtcatataactagtggataacttggaaaagctttttgttattttattagcatacatgttgagttgtaaaaggttttctagtttacatatttagtgaagtgaagaactagatatgcaagatgaggtatttgcatatatcttctatatttgcagaataagaatagtcctaggtgaatcatgtacgttgtttgtaggcagagagagtagtgaggtactgcttctccagaatattctttctgggttacattgatttgttacagccaagatgttggcaggtgtgcatttccgggaattttctcagggaagcatgtccactgaagatgtgtcacttaattcatgtgctgaaataccaggtgtattggtgttggtggattctaatcctctaatcctcttcctgaagattaggcctcagtgactgacaggaatgtgtttcctatacccttctgtgtctgctattcccttttgtataaccatccctggacatttaatatgtggataacaacacttttcatgatacttcccaatgtaaaattgtt

SEQ ID NO: 182970 - DNA, 320 bp, Homo Sapiens
caagaaacaactgtattcctgaaacagtcttgagttatcattttctttcttctccctctatgtatgtacatagagtgtacatacatagagtgagaagcaaagaaggtccatgaaatggaccaattcttttgaaaactgcaaattaccacagttcatctaacatgaaatagataacctgaatggtccaataactagtaaagatattgaattaatagtttaaaaaccttctgaaaggtaaatctctaccctaaatgatttcactggtgaattctatcaacacatttaatgaagaaaaaactccagttctaaacaactttcag

SEQ ID NO: 182971 - DNA, 549 bp, Homo Sapiens
ttggagccaatcggcattgggcacaagggaatgatgcttgtattggagcatgatgaagagatgtcagctttgtctcagcaccaacatcactattaacacttgctatctgtcaccaatcagcaatctgttcctgatgtaatcgagagttccaaagcacagctcaattcttccacctctctgagaagagtggtgtgtaggccttctgacagtgggagaaagttgcactctttgggactcagtttcttctcaaaactcattcagaaatcatcacgtgtcactgttagctaggtccaggatgtttgaataagaattgtggttatattatagtaaattgtgtaaaaaatcagttagttatgggtaataggtatggcagttaccatgtgccaagaatcttataaagttttttacatttagtaattcatttaagtctcacagtaaccctacaaggtatattttccttattttaaagaggacaaaactgaggtacagtggttaaataatgactcaatgacaaaagtgggattggagtcccaacagtgtggacatgct

SEQ ID NO: 182972 - DNA, 1231 bp, Homo Sapiens
attgaaaggaagaagaatgagtcacggatgactctggggaggtttaccaatgttcctgacttattcagatcatttattgttaatctgtttactgttgtttactagtgatagctaccctaccctttgattattggcttaatggtgatttctcctctgctcaagcttttagaccagtgagtttgatttgaatcatcctctcaaggctggaagagccccattattgaagttttgttaatgttcttttgtggggatgggccggggcactcaccccttgtcttctgtgcccttctgcatggtggatatctttcccattcgtgcattcctattcgtgcatttttcatgcagtttttttcctgatataataataatctaaaggtaaatggatcctcaacctctgactcatattaaactgcagaacttttagtgaggtaattaggagtgtaatatttaaatgcatttgataagtcacatgactgatgtctccaaatttaggttgataggacatttctgatccatatttaaaaggcgaattccttttttatattaggtttataataccgtgaactgcataccttttttctagtgagggaaaatgaattatcagcaattgaatatgacccctgtagacgtgttcagtccagtagaatttttttgtttctgagaacttgttctatcagggaaacaagatgagtgaaagttaatttctcccagctcatgataatgctgtgactagagaagaaactaagaagctggtggagaactgttttttagtctgtgttataggttaaacagcctccttgcctagggaatcttactttacatggggtcatctgagtgtacatgtactctttcttaccacagattttctccggacttatagccctaagaaaaatttgcaaccaccctgatctcttttctggaggtcccaagaatctcaaaggtcttcctgatgatgaactagaagaagatcagtttgggtactggaaacgttctgggaaaatgattgttgttgagtctttgttgaaaatatggcacaagcaggggtcagcgagtattgctgttttctcagtcaaggcagatgctggacatacttgaagtattccttagagcccaaaagtatacctatctcaagatgggatggtaccactacaatagcttcaggacagccactgattacgagatacaatgaggacacatccatatttgtgtttcttctgaccacgcgggtggg

SEQ ID NO: 182973 - DNA, 1378 bp, Homo Sapiens
  misc_feature (240)..(248): n is a, c, g, or t
ttggctacttagcattgtctgttaacacaaccaaagagagtgtgtgtgaacatgtgcagttgtcctaaggggaactgagagatttggtggtagtggggagaggaagggcttaacatgaggccattaacgtagatgggaaaacctcaaaaagtactggatataggtgttagattctaaggagcgtgaaaacttcagatgtttaaagctggaaggttatgcgtcattcaatgattttcagannnnnnnnnaagtaatagaattcttttttaaaaaataatattttctatcactttaatatttaaaatcaatgacaaggaatgaatggtcctggaacttatctgttttatggtcccctacattctcaccatctacccctttctctataccaccctggctccatcgagatggcttctctgaaaaacacgtagagacatatggctccaaagggtagtttgaaaacaatgatgttgcagactcaagcacttttagaaaagcatctctgagatgaaagtacttactactattagctaccacttactggtcacttactgagttttactataccagggacatgacatgtatcttctaatcttcacaagagccttataaaattggtgatatttcggagataagtggagtgaatatcttaacagcatatctaccagagacaaaacatggcagagagtgatagaataattgtcacccagggacagaattggaacttaaatctgtctgtctaatataaaagttactcttgttccagtaccaccgtgcttcatcactgcagttgagttgacaaatttccttgacttgggcatgggcatttatttaaatccactatataatgagctatataatttatttgatttaatccagaatgatcttctactacttcatttaaaatacttctttccacaatttgaaagctttaaatgactgtttcttaccctttgtgggaaatggaatctgagactcactgttgtttggaattgctgccaagcttcaggattttctctatgatattctcatcccttggggagacgctttgcccttcctttgatttatgtgtatgttatttttagttatttgataaacacttgctgcgtgtctgtttaagcaaacctttagaaacacatatattatctgctgtctcattagagcatgtatggtaaaagaaaaaatcatggacgaaaggaatcagactaaagtctagggtttgaaaataattttaagtctttgtttgcagtgaggtattttagatgagaaattatgggcttatttcaatgtgctcttccaaaccatgttatcatctgtctattgatgcttttgccctctgcacagagaagatagtttgccacatttgagttgcttattaaaa

SEQ ID NO: 182974 - DNA, 547 bp, Homo Sapiens
  misc_feature (136)..(421): n is a, c, g, or t
acaaaaaagttgggtgtttattaaacgtgggttttcccttttttgaattgcctgtttatatcccttcccacttctctgtggatttcctatgttcctggcttgcaggaattcttgtaggctctagattttagatccnnnnnnnnnnnnnnnnnnnnnnnnnnnnnnnnnnnnnnnnnnnnnnnnnnnnnnnnnnnnnnnnnnnnnnnnnnnnnnnnnnnnnnnnnnnnnnnnnnnnnnnnnnnnnnnnnnnnnnnnnnnnnnnnnnnnnnnnnnnnnnnnnnnnnnnnnnnnnnnnnnnnnnnnnnnnnnnnnnnnnnnnnnnnnnnnnnnnnnnnnnnnnnnnnnnnnnnnnnnnnnnnnnnnnnnnnnnnnnnnnnnnnnnnnnnnnnnnnnnnnnnnnnnnnnnnnnnnnnnnnnnnnncccactatttagtggctgtcaggttggcaaatttgaaaagattgttaatatcctgtgtgggtgagtttatagtaaacagatcctctttctttcttggtgataatgtaaaacttaaaatagcaccaa

SEQ ID NO: 182975 - DNA, 1050 bp, Homo Sapiens
gggttttaaaattaggtattaacaaataattaccaattttctgtaaacctgcccaaactctggctggggggcttctatttctattagtgtaaaagaattattgtataaaagaaatgattcattcacggcctaacccacaggaatacagttaacttatactggtgccctgctttcaagaatgtttgagatgaactcagcagcacagtgttttatttcagatacttgaaaagatcacagctctttataatggtaaatcatttttattgactgaatattcacaccaaacacaaaagcaatgctggttcttctccttaatggactaggataggagaagagagttcagtttagtttcttgctgggctgcatgtactcacatgcaaaacattatctttaagattcagggaaaggtggtttgaaacaaagacttaaataaaaatagcaccagaaggaccaggtaccaataatcacatactccacccattcgggagtttcattttgtgaaatattattgcacttgtaatgtaaaaagtaaatgatagtaaattacccaactcagtaattttaaatacttcgatgtattctgaactaagcagtttcaaaatggttttgagtttctcttcaaaggaaacctggctaagacaactaaatctagccatttactttaaaaagcaaggagagaggaccaagttttgtttctaaactacaactgcactatgagaaaagaggctattttagatagtggtacgaatttggtccacatcaaatacatcgttattataaaaataaacaagtttgttttttgtaaaaaataacattgcattccttgttcaaattgcacagtacaaacaagctgtcttaatactgttataaggtaattagaattacatacagtggatgggtgtttaaagcaattaaggagtatgcagttgttttcataatgtatgaaaacaaatttaagtcatttctagaagtacataaaatactttaagtttacaatgaagaatgcattctttacacactaatttttagtagccgtggtaatacagccaa

SEQ ID NO: 182976 - DNA, 1323 bp, Homo Sapiens
  misc_feature (81)..(89): n is a, c, g, or t
ttggctttaaaaatataatgattagaagtaacaaagtggcacatatgaaaatagttaaaactgattatatggtatttctannnnnnnnnggtaaaacacaaatattaattgagtatacagtaagtcctctggttaaatatatacgcacatagattttagttagataagatgtacattatatttgtgaaattgattaccaggatatttttcaagttctccattgtaaggatatttacagtaaaaaggatatttacttgcaacctagaagtgcatgcacatttccaaagtatatatcagcgaaactaaatttagccaataactaaatttatttactgaaattaaattattgtcaaatatgcttttggtgttggatagaacacaatcacttaaaaaaatatgtgatgtaggaaatctattggcatcataagtggtttctttgggtaatatatccaaacatttaaatattgatcaatgttatgaccttttaaaggccaaagtagttactttctgcctgtactcttttttaatcttcttttcatcttccataagacaactgacatatatccacaagaagtgccatagtgaacctgatggacctgggattgcagcattaactagtgaggagcgaactcgatgggctaaggcacgagaatatctgattggtcttgatccagagaacttggctttgttagaaaaaattcagagtagtttactggtatattccatggaggatagcagtccacatgtaacaccagaggattattctgagattattgcagccatccttattggagatccaacagtacgctggggtgacaaatcctataacttgatttccttttctaatggagtatttggctgtaattgtgatcatgctccttttgatgcaatgattatggtgaacatcagttattatgtggatgagaaaatttttcagaatgaaggaagatggaagggttcagagaaggtacgagatataccacttccagaagagctcattttcattgtggatgagaaagttttaaatgacatcaaccaagctaaagcccagtatctcagggaggtatatttttcacttttctcttaaataataatgattttttcttttaacaaccatatgtaaaaatttggctgtcatccaaagcatgtctgcacaaaacattttaaaattatgcctttaacacctttaattctttatgtctggtgattacttttaatgcagtgataatttgcttctctttggtgtattctccttaagtgatttttcaccgttctcatttaattcttcttgttaggcatctgatctacagattgcggcttatg

SEQ ID NO: 182977 - DNA, 909 bp, Homo Sapiens
ttggcgttgtgggggccaagagggaagatgaagcgagagatgcccagaccagtgggagacgccaggacttcggaagctcttctgcgccacggtgggtggtgagggcggctgggaaagtgagctccagggccccaggagcagcctgctcgtgggtgcggaaggaaaaaggcacaggggcttggtgtgggcggcttttggctgggagaagtttgcacgtagggagaatagtagccagtgtttgcagagcacttactatgcaggaaggcctgtcctaagtattgtaagtgtattacatcatgtacaagtgtctgtgattaaccccgtcttgcagagaaggaaacaaaagtacaaacagaaaatgtaactaagcatgcaattaataaaaagggaccaggttttgaacgcgagcaatctggctcaagaatctgcgcccaaccaccggctcctgttcttagagatgaacgtggagtcctggagactgctcaacattgtgacttgactgtgagcgtacgcgctccctgtccccaggagacagatttccagtgcaatcatagaaagtgcctgtgtgggcttcgggagatgtgtctgccttggggagaattttccttttcagctagagccaggcccaggatgttgacgtcagtgagacgctggtgacgttctctgctccagtggctgatgagaaaagttcctccaagccagctcagttgagaagaattaagttctctgggtcccactggcttcacctacagatgccaactttgaggccagtgaactgtgaggccagctgggctgattgccatggcaacaggaattggaccaaagtcaccggaggatggagagggaagacacagtggtggcttccccaggtcttgaccacaagcacagccgtggcctccagaaccctga

SEQ ID NO: 182978 - DNA, 1524 bp, Homo Sapiens
  misc_feature (1333)..(1391): n is a, c, g, or t
ttgggtcctgagcatgtttagtttaggatggagggaggggagttctcagaagagaaagcagcaactccacaccataggttgaggtgggtgggcagaagaggacatgcaggatatgactcctcctctccagtaagcactgagcgactctactgtcctcttgccttcttctgctcctttgctctgggtcaccagaagtggactcttgttccagcctccccaccctgacaaggagctcgtaatcatctcctccttttccccacgttcagaagtccaatctctgaacaaggtcagaggttttcaaatggtaatgtgtctaaaactcactcggggatcttgttaaaattcagagtttcattcagcaggtctggggagagattagaacttctggattttaacagacgcccaaggtacaccaaggctgtgcccaaaggatcacatttttgagcagcttgggattagagcattatccctcctgtctagctgccaagggccagaagtcaaatagacttatgcagttattaatccacagtgactcttccctgggacactggttgtgtgtccttttcctagtcattgatctcagatgtcacaagcatgcaaactgcccccactacctttgttctagggccaagacccatgcatctcccatctcccctactccctccccagacccttcatgaaggacaccttctatcaggcagcacaagtatttccttacaacataagtttcctaattcaaatgagacttaaggacaatgattacatgtaaaacaacattgagaacatgaagattgctattcagtcaactgcattctagaaatatccccacacctgtaaagaaaaattcctggtcaatgagcaaagaatatcacagctgctttgtcaaatttttctattttcagtccaagaatctgagacatgtacactaatttggggtaggagcaaggctgaatcataatttttcaactctgtattttgtttatcacaaacacaggtgagaatgagaataagaacatgtacataatgtgtacataaaatttttgtgaaaatggtggtttctggtggtaatagttaatggtagtggtaggtataataagatatgtttgaatcaataaaattacatgtgacataattttgtgcttttgtgattaataaaagtatgcttttaagaatcatgctagtactctaaaataaagcaatcttttcaaaacccacctaagcacaactaaaagaataagaaatctttagactaactgactttgcaaactagaaataatttacaggaaaggaaattttgttaattctagtcaacaaatttttatttgtggcttcnnnnnnnnnnnnnnnnnnnnnnnnnnnnnnnnnnnnnnnnnnnnnnnnnnnnnnnnnnnattcttaccatctaatcctcattttttatcatttataatgttttctgtaactgaatttttgaaaaagtgagtttagactcatatttatttattttagattagaatagaatatacctacaatcgtatatttgaa

SEQ ID NO: 182979 - DNA, 1192 bp, Homo Sapiens
  misc_feature (787)..(798): n is a, c, g, or t
aatgtttacttttcttcctctgccacccaagaaagtacagtacaaaacaaatagtctaaactaacacgaactgttacctggtctattaaaggatacacggtatccactaaacagacagatccttatttccgtgcttgatgttgcaaagcccttggcaaccaggggcaaaggtcactggggtttgactaactggggctgagtggcagctatgactgtccttcagatttttgagttgtttttgaaattaaaagcttctaaaagttgcatcaacatcctcctaagcccccagaggattgtaacaccaccacaaaaggccaccaacactttttaaacaaagtgaaaactgtctgacaccaatcatcttgaaaactccatggcaagtgcattagctatgatttcatcacttacaggtagagaagcttactgtctactggtgtggacactcttgctattttctttatacttaatttgcagtggcagaatggtgaagtaaaggggtctaatttcactgtgaaaaaatgaaagacaatggcagagagggccatgagtaattatttcaccatttgttagagacaaatgctaggaaaaccacagaagtcaccatttctaaaatgcatttagcactgctaacatagttatgactaactggaatcatgacaggatcatttgatttccttgtggttatagaacatgctgtattattttggttctattgatccattttagaaggtatctttctccccctacccaaatcccactggaccaacaagcctgtaactattaattnnnnnnnnnnnngtatttctgcatatgactgagagtactgcatatataaatagctaaaggaaaaaggaattgaatgccgtgaacttttgttttggtgaaatggtggctgccttctgtgataagactctgccactccagaggagttccttatgtcagaggggaataggattgattgtatctgtgaggctggcaaccccacacacatggttccatgtgagaacagactcggcagtgacatccactccaaatggatcaggtaagcccagattacatttcaacatgtgtacaactctccagggcacaatacgtttacagctgcctttccttcacatacttttctaattcagaactactcacaattctaagcaaattcccattcacgaagtctgtccataatgcgaccttc

SEQ ID NO: 182980 - DNA, 1252 bp, Homo Sapiens
  misc_feature (401)..(416): n is a, c, g, or t
caaatgttttaacccacatgttagttaacataagaagatcacacaaaaatgtttattcactaagttgtggcaaagtctgggtatcctttcagtggggaaaatacactatttctatttcttacacaattttttctaaacagtgatacttacccttctttttgtataaatatcctaagcagtggattggccgttgaaacagctttgtgataattatcatcattatttataggtagtaagtctccatggatgtctgcatagcctaccaaaacgtcaacattggggatcttatgaacatgttgtagtaatccataaaactcctcaaattttccaggttttgatctttccagcgaaaaccgacgaaattcagctccaaactataaacgtaacaaacatattacttnnnnnnnnnnnnnnnngtaaaaggacccaatttgaaaatgcatgccatagaaaaattaacgagcagagcaagtatttttaattaaggaaagattgtctattgtgaagaaccttactatcagggattttaaaaagcctaagaaaggcacaagaatgtgcctcctgactgctgtgtctctgaagagcattcctttcaagagaggcaggctcaactctatctatccctggggtacctaggccttactgcggactgttctgcatagtgactcagctcaaaccctgtctggagcccagactctgacggcaatgctctcctcaggtgcatcatggggtaccaaagacttgtccaagtccttattttgaccaaaggaaagcatttaagtgtcctcccccataaatggaactaggatttcatggtatgtggtaagaatcaacagcaaaatatacaaaaagaactgtgagctacgtggcgttaaggtatgatcttccctatgttaatgcagaaaaaaataagcttcagtaatacatcaaatgtatgtcctataactatccaattaacgcacaaagtgtttatgtgtttggcacagtgctaggccctagagattgaaagcctcgagcctgctccagaagctcaccaattagtgggtaaagagaataattacttcagggaggtattaagagatcacacaaatggggcggaatggggaggaagacagcctccatcatgcccaatacttaccttcacagttctgattctgaagtctgtttccctacacctctgttttcccaatgtcaaataattaaaagtgactcttattcaacactaagaactgaggccaggcgcgatggctca

SEQ ID NO: 182981 - DNA, 592 bp, Homo Sapiens
gctaattacaaatacaggaaaatggataggccatgtgtttataagtttgagctcttgagccagtgacttccctgcacgttcagctttctcctttgtgaaatggtaatagaagcacgctgcacttgggattcttgtggattacatgtgagggtcttagaaacacttgatgtgtaagccaactattatgtattactgtatatggaacacaagggatgtagccaaaactaaatgcaagtttgtgcctcagatgtcttcctatcagaacagagtcaaatccagattttgatgcttaaatgtgacagcttattcagatttagaaaaacttttggtatgggccaaagaaaacatatccttaaggggatatggcccctaggccctcattttccttttctgtctgagcaattaaaaaaagcattaagtaaattccacaaattctttggaatacctagagataaacagatatcatgttaactgtatgataataagttagaatacttgcaacaaaatgcagagttttctaggaaaacaagtaatcattcagaaataagaatatgaatagttcctcagttctccccctttgtggaatttgtgc

SEQ ID NO: 182982 - DNA, 793 bp, Homo Sapiens
ttgggagactttcccaaaagcaatctggagtgacatttcattcatgtattcatttaatgactatttattgaatgcctactatgtataaagtattgattctaccctcgaggaagttagtggaaatttttaaatgttagataaataaatagagattgattttcatattcacacacatttaaataaataaaacatagaaaattgtaagaaccataagagatagaatgctgtgggtattcaaagagagaaaatacttcagaaaaaggcgtaattgaggaggtaacatttgatctggtttctaaagggtagctaattactctatctttacaaagtgtgtgaatgtatatgagtgtttataaaatctgggtcaagtttgaatatacagagattgtagggaaggatgttctacacacagggtacagcaagatcaaagttgggagagactgagctatgtacaaagaatagcagtggttttagtttggctggactgtaaagtgcatggaggagaagttgcaaagaagattggaaacctgggtgggaaccacatcacggaagagctggaattcttagctatgaaaatttgtaccatattctgtaaacattttgggagccactgaaggttttagaatgagggaatcataagatcaaagcttgcttgggaagattaacactcttcccagtaaagttttggcaacagcatctgctgttatattgacataatgtgggtaaagtggctgacatagtatctgatgcataggagctcagtaagtcatggaagcagatatactgtattggt

SEQ ID NO: 182983 - DNA, 1386 bp, Homo Sapiens
  misc_feature (305)..(335): n is a, c, g, or t
  misc_feature (999)..(1011): n is a, c, g, or t
  misc_feature (1175)..(1231): n is a, c, g, or t
aacaaattacacatttgtgatctttgcaatatatgtgtaaccaaaaccgaaaattgcaaagaaattgcttggagctgattaacttacatgctgctatttagaaattctactagagattattaatgcacaaatattttcagagaagttgccttatttacaggacaacactacctatatttaattatcatcttaaggctaagaagaaataagggcagaggtattttccataaagccattatattatgttagtttttattaattcaattctatttacaaagactttaaggcaggccttactttctttnnnnnnnnnnnnnnnnnnnnnnnnnnnnnnngctaacctccacaaaacttaagtgattcagtactgcctgattctttaattaccctgaaaaacttgtaatccaccaaaacttaactaggcagttaggcaattagtgtgctgtcttctctcatatcaaaaaggcttgaatcatggccattgtcattacttacaattatttctagtttttcatgccataataatggctaattatactggttaatcacaaaactcagccaatccaaattcactaataaatcagctaaaacaattagattgcaccatttataaatgtttagctacacacattttcacaggatctaggattaggcatttttctaaagctacatttgatggtttgggtcattctacctaagagcagctacaataatgttaatcaactccttggctgtgagccattattatgaaggaaaaaagttaagtgaacaaggtatcagcgaactcaatcacactacaaaatcatagactaaatggaattcaactcagacctcctttttgggttcaggaggctgttaacatatgctgtccaaggttggtgagagaaatgctgttctttaccccatcacagattctcagatcccctgagatttggggtgggtggagtcaaaggctcctaggctaggatttgaagctgcaccccattgccctggcataannnnnnnnnnnnnaagtgagctttgccaataggcctagatagtagaagaaggagtatactcagaagaactgaaagaaagcgttttgtagctggggtccctacaggaagttgttcatattctcaggcacaagaatcttctatgaaaaactctggtcttacacctagggaagagagacnnnnnnnnnnnnnnnnnnnnnnnnnnnnnnnnnnnnnnnnnnnnnnnnnnnnnnnnnaacagaaaagcataacccacaacttatctgaaatgaaaaggagaaaactaaatattacaggatcttttaatgttttaaagatgataatctctttccagtattatttcaaataattatatatgtttgtacgatttcaaatctggaacactggtgcc

SEQ ID NO: 182984 - DNA, 444 bp, Homo Sapiens
ttggcacttagtgccatgcctgcgcagacctgtggaataaacagcaattctgagcaggctcattttaaagggacttgcaaatttgggcgttccttgtgtgccttcctcataaaacccactcctcccagaatatgcttagaggtgctgctgtatttacctgagagctatgcttttcatcaaaaacctaaacgtgatcatctcttggatgaggtgtggccctgcaccctcgcctgctcgtggaaggagtctgggccagcagtgacccatgcgctagggtctctgctgaggaagtggcaggtgtgtggccctgccctggccccgtagtgagtgtggggcccacctgtgccctcatgggcagctgaagggggagctttctaccccaggttcctttccttactgaaaagtcttgagcaaacagttgccgctctccaccccctgcttttt

SEQ ID NO: 182985 - DNA, 1402 bp, Homo Sapiens
ttggctataggctttgaaagtaatgctcgtagattcagtgttcacagtatgtggcctccagcatgtaacatgaggaatcctttatttcattaattaatggctttttgacttgagccaaaacatatgtaaaggaaacagaagtaccgcacctcctcttacaccagtcagctcctttgccttcagtgttactagaaagcggcctgtgtccatgagtgtgctttgctgttggtgcactgaaaggcaggaaggagacaagattttctatttactcatctcatgatgtcatttgaagggcatgtccagatatcttaaaattataataggctcaagaatcagtctcaggtcactttacccaaaaacatttgaaaatctgaaccacaatctcctgaaagtttttctcctatagattgttgacaacacattgttttctggaggcatttgtgccattaggtttccatttatcttcagtttttttctttggtgtttgggatgtcttattttgttgccttatgtccttttcaatttaaaatgtttgagtttgtatatagttttgaaattggattatgtgttcattgttgtttagtttgcatttttgtcaaattatggttttgaaggttcatttggaacttactgttagtctgtaacagggttgcccttgtccagtatttatttataagctgtttacttttcaagttgataaaaacattctccaattctaaatttgcttgtgtccataggtgatctctttagcaaactgagaaaaaaaggaagctacttttaacatgcaaagttccctcaaggtgtaccgtgttgtctctgtgggcactcttccccagcactttagcagtaattcccccagctacacgctgcagttgtactctgcccactctagtgttcctcagctctgctgtccttttacttgtagctggatctttgattatccttcgatttccatgaaatattaatattgttgccagcatagcagatacagtggaagtcttgtagcagtgagattgtatcataatttaggatttaaaatgaattaaagtttatataaactgaagagtctccatatgtcaaactcttggaaaatcaaagatgttccaatttcctaaacactagagaatacgagagaaggtagagtggaaaaggttaggtaaccttgcaaaatattttactattttctctaaatatgaggaagtttgagattatgatctggatctaccagatataactaaggttaatttagcatgaaaaagttttagtcatattggcatccaacctattcagtaaccgaatcatagacaatgatggattagagaacaatagagtgggatcattataaagaaaataaattattaaagtgtctttatcgttttagtgccatttttagtgtctttac

SEQ ID NO: 182986 - DNA, 1527 bp, Homo Sapiens
  misc_feature (148)..(159): n is a, c, g, or t
ttggacacaggacactgacacagtagagcagggatttttaacagtcaatagccaaatagaatttcaatctagaatatttttaccccctcagaatgagtgaaacaacttctattatttggtgtacccggtgctacactcctaaaagtcnnnnnnnnnnnncatccaggtgacgttttttatttttcctgcttggtggtggaaggttatatagtaaacttcactgtcattaaaaaagcgcttgtccaaaatgtttaaagtactagaaaagggataattcagcactttttctgttacaacactaaagtcttaatttatcttcagagtcttaggtactgtaagtttttggatgattatttaaaaatataaaacatactacataatatggggtcagatcacatttatataaataattcttattttaaaaaagacaataacattttgtacctttctagcaattccaagtgattgcctcattttctcttgttaagcatttcaagcttaagaatttggaatttgagagaaggtgagggggaaaattccctaaaataaaaatttgtttcaaaccattttagaaaaataaatcactagggaaataggtagggattctctccccctttaagtcttcagggaatgagcagtatttagaatctttggctgaaattcaagcctttttactttgtaaatttttaatattaattcactgacatgctttttacaccagaggactgaaaatggatcttaatgtttttaagttgtggaagggtatatttctaaaatgaggggggatgattaactaggttagtattaccagcattagtaagtttaaggaattttagtatgtaatagcaaagtgtttgattaaaagtctaatcctatattactagtcaaaattagttacattctgatctaggaaagataatagtcattggatattgatatgctgtgctgtcagaaaaccagactaagatagaaacctttatctgactcccacatgttgcttgttgtgatgggatgtatactttacagcagcttattgctgctttgaaaaaaaatgtataaactatacatttggagtgtttgcatataattctttataacctccacttaaagctgtcagacattggtattttatcagtccacattgttgaataaaactaatgttcttaggaatccagcttgtacacactgtttaaaaaccctcagggacagtttacacactcttctcactcaattcaggtactttgatgctattcttaaacctaacagtgacttgtatttttctgttttgcttttatttcaacgtgctggtagcacatctgatgaatgtcaacttaaaaaactcagttcaggtatccaggtataactcagccaaacagattttaaagctgcatataactctccagcacatggtgcctcacactcttatagtggcattctatatattcagttattactactgagcagataatatgggggttcctgttaacagtgtattttttaaaaaaagcgcataaatgtatagcccag

SEQ ID NO: 182987 - DNA, 1142 bp, Homo Sapiens
  misc_feature (435)..(732): n is a, c, g, or t
tctgggctgtctcagggtgccatctgtctctttcccagctgcttccctcgccagcgctatcaatccccccattcaatttctgctgttgaaatattcagtgtttctgtatccctagttggacctgagtgaagagatgtctgaagggcatctcatgtcaagaaccagactctgatcttcctcacaagcctcagtctgccccattcaattaacgatcccctcagccacccacagttcaggccacaaagctaggggtcatcgtggttttgtctcctccctcaccctgacatccacaccatcatttatattcttccatacacatcccacatctgagccagactccctcattgccagcaccctactccagcccaccatccctgctgcccctcttgtccctccggtccattctccacagcacaactgagtgacctcttaaannnnnnnnnnnnnnnnnnnnnnnnnnnnnnnnnnnnnnnnnnnnnnnnnnnnnnnnnnnnnnnnnnnnnnnnnnnnnnnnnnnnnnnnnnnnnnnnnnnnnnnnnnnnnnnnnnnnnnnnnnnnnnnnnnnnnnnnnnnnnnnnnnnnnnnnnnnnnnnnnnnnnnnnnnnnnnnnnnnnnnnnnnnnnnnnnnnnnnnnnnnnnnnnnnnnnnnnnnnnnnnnnnnnnnnnnnnnnnnnnnnnnnnnnnnnnnnnnnnnnnnnnnnnnnnnnnnnnnnnnnnnnnnnnnnnnnnnnnctcttaaattcttaaataggtacatcggatcctgtcactccccttcatcaaaccatccaacagcttcccattgccctgagaataaaacccaaaaccctatgtggggcccacaaggccctgggtgatccagcccctgactatccccagcctcatctcctcacacttgatctgggtcacacttaccagttttctggtccttccaataaaacaagcctgctcccaccccagggcctctgcctttgcttcccaaagctcttcccgtagctggttcttctcaggcgttctcagtctagcttctttgaatgcccagctgacttcaccccatcgtccctcactgccacatcctctggaggcctcacagtgcttctccctctctgaagccatcttacttgtgtgggcacatgtgccaa

SEQ ID NO: 182988 - DNA, 836 bp, Homo Sapiens
tcagcccctgcacatctctgtagtgcttttcatgtattcaaaccacttccgtatatgacctctcacttagtcctcatgacaatggagcacttattattcttcccattttacagatgaggaaactaagacccagaaagttcaggtcctctgaccccagaagtgtctgtgatgaccctcccaaccttggctatctaccccacctgtggagaggaggtctggggtgacatctattgtagatcccacctgagagtttaaccaatgagaagacttactttcctggtaggcagcctgctttgttttgcacaggaagatagattttttttctcatctttcttataaacaacctcatgcacattctgtgtttgagccaagactagtcacccattgggggctaaccgtgcagtgtgagctgcgtccacaccctcacttctcccttcactccccctttcctcactcaggggctgagaggacagaggtggtcagctggggagcagaggtggcgaaggggctcatggcaagtggcagccattggaacaggggtgaggacccaggcctgggaaagccaccagggatgggggaaaccatgacgccgcctcctggtgcagtgcacaccatctctatccctgtcagccctcactgggtcatgggccttgggcagatgtcaaagagcccagcagcagcggtggtggccagctgggcagagcatccttgcttgggctaggaaagctttaccttctctgagtgcctccgcctgagagatgtgtgacccgtggcaccagggaaccacgtcttggagtgggtcactgtaagccatgcgcttcatccacccccagtcc

SEQ ID NO: 182989 - DNA, 956 bp, Homo Sapiens
ttggcccactccaccctcactgagcatttttgtgtaaggttagtggtgcagttcatttagcaataaatactgttgtaccttttgcagtagacaactattaactttcatccttgattctcagttttttccaaaatacaagtgaatacctggtttccccagcaacattgtaagattgagagtaggaattcattgagattttaatgaattccatggattgtcttaagagctatctaaacttggaagaaaaataacttccagagcatctaaaattgaaaataaaagatcagaagcaaatgaaagatcaattccacacagcttttcctctcttagacgtccctcttctgccatatcctgtaaacatctgaagtgttctgagtacatttggagagaatatttaatgatcacactgtgattagacatgagtagtccctgccagtgggatgttcctgtcctttgcattttaaccacatgttctgtgctctctgtggtaaagataatctaacagtaataaaaacttatggagaaaattacccagagctcctttatcattacgatttttaatactctcttctaatccttatgcacatgtgtatggatttatgtactgcaaatcattgttttgtaatacattctcaaaaatgtgctttaggtttttacaactaccataatattttgtaattttccttcattactgtaatttgctaaaccatttctgttttggtagataattagtagtttccagttctgctttttagaagatactacagagaacttctttgtgcatatttccttaaaacaagttccagtagaagacttactcgcaaaagcagtggaattttttcttaatattttctgttacaggtacagaagagtgcatacaacacacaggttttgtcgaatagttatgaagtgaacacttgtctaacactgcccgagtcagaaaaaacattttctaa

SEQ ID NO: 182990 - DNA, 957 bp, Homo Sapiens
ttggctattatttatttacttagagaataaaaaaaatgagaaagattttacagttgtctctcactttgttccattttctttttgtgggcttaaaaattatagtaggtagataaattgcctttctttggcttctgaaatgattttaatagcttaagctaaattaaaaaatatatctctgaatctttgttctagcaatttgatgtgttagatattaaatatattcatagaaaaagagcttatgttataaatttattattattgtgtacctaattttaaatgcctattatgactgcatttatttggcatttttaaaatctggtttgatttagctcctgataaagcatattgaattcagaaaatataataccatttaggattttttgctgcaaaatctattacgctgtaggaggtttcacatttccagaatggaagcagtaagttttgtggggtcagggtgtaaccagtgaatgaaagtcagaactcaaaatgaagtgccttttctgtttaacactgggcactgatagaaaatgataatgtttgattaatgaacggcagccttgcagcgggtgaaaacatctgcaagaagtgatttattatttcaaaggtattggaagcttgcagtatcttgccgatttaggtatgtgtgcctgaataaaataaatgagatgcaacatgtgaaaaatgaaaacacattacttgtaaaggatgtgtcacaagcagggtatttttgttcaagtacactttgtcatggggatttttaatgctgttctgaatacaaatcatttagctggttcataaaatcgcctcagttggaattcttgcatctatcatccaagacataaatgtgggttaaacttaatgtggtgtaacatatccttaaatgttcaaattttgtatcatatacaactattaaaattgtacatgttttatgtataaagatgaataaattatagctac

SEQ ID NO: 182991 - DNA, 1711 bp, Homo Sapiens
taagatgagactatttctcccattatgaggataactctcttttggtaactttgaaaatgctgtaacaatattgcctagaaaacagtcatttgacttgtgtaggcccatgacaagatgggaaaaattaactctgaggcaggttttctacttcctcacttttcctggtcacccgtttgatatagtggttattgcatctgaataatagtctgaaagaactgaatcaggcaccccaagaatgtcaatttcttacattctcaccctaaggactcttaattccatctgtagtgaccaagttatggcttaggaagtttcatgttgggaagatggtacatggtcctcatttatagcaaccttttagttagaaatgaatcatatttatattctatgatgacagctgttccctgagagtgaaaggtacattttgtccagaggcagcaatagaacagtagccttctttgtccatcttttctcggcgtaagacccagttctggggcctgaaggctaattggcccacttgaaggaatctctgatttctgcctgcattccaacattggcaccaaaatgtagccatggagatttaagaattcagtgctgtggcttgcttctcttggtgtacaagttatcctctgcaacctgtgtcttcaactttttgtagttctcaactatgtcagttatctcatttattttaggacattatcctacttgaaatatagtcattctcacgtcattcctgtcctcgttatccattgaaaactgagctttctcttcaatttggatcgaattcaaagattcagaagccctaatggtatgtaattgagtgcactgagggcttcagttttcccttagagaaaatgggacaaataccagcctgcataggtgtttagacaggccaggaaggcttaggccatatagattctgaggacccaagctgaaaatagtgtcatttcggtgtgtacaaggatcagggaggacgtagatgtctcctctaggttttataaggccactttacagaagtagttatataaaaggtaaacatttgtgcgtaggctgtgttgccagtttgggcattaggagaaattctaattcctcattttccctttggctattaattctgtttaatatgctcagactgaccataccaccacccgcagatgggtattgcagcattggaacaggtgctgagtatagtaggaactttgtttggtggccatgtgacaggtggcttaatagacccttttgggtaaaacttcttaactgcatttaggtttcttccatgctctgctttctgttctggcctggccacgtgactcctgcttagtgttagtatgtttcctggttcctcacctatggctgtcatgcgaggaaagacttaaaatctcgagttttagtacacttggaaaacctctggggctgtgtttgtgtacacacatactcataaaggcacttttagccaggactcctttaaaaagaaaaaagaagatttaagagtttcctgtgtatgtgcatcctgcctgctagggcctcttgggtgtttggggattaatggatttggttgtgtacatacttgttttcttaccactaaacctcccatttccagatttttccccctccccttaggtaagctatgacttgcacagaatagacttcttaacctatatttaaactcaccttattccctttagcaacttttctgaaatatgtcacagtttcc

SEQ ID NO: 182992 - DNA, 599 bp, Homo Sapiens
caactttgtacaaaaaagttggcaatgactgtcctaaacagcacagagaatgactagagagggaagggtaagtccatgggggaaaagatgaggtctattagtaaaggctggcagagaaacgagactatattgttagggcagtggtagtgataatggcagggatttgaagattttagagatatttagaaatagacattttaggaaataaaattcacagcatttggtgactgagtagccactaaggatgaagcagaaaataagtttctgctttgggagacttggtggatatgttgctaccaccacagagaagcaatttggaggaaaaggattgacagattagggggaaaggacaggtactgtgttcagtttgtgacacagtaggtttgagatgccccatcagtcattgaaatggagataccagtaggtagctgcatgttaccttgtaaggaaacattttcctttgttaggaagaattaaaactatgatcagagaaaagaaatgagtatagagttggttaatttcattatcatgttcaaattgtgccttgcatatagaaggttctttatttggttaaggagtgaagtggttagtatctgttt

SEQ ID NO: 182993 - DNA, 985 bp, Homo Sapiens
ttggggcccgtcgtccaatcctcatgctaaaccatctgactttcacttcttgaaagtgatcggaaagggcagttttggaaaggtaatttcaaatctgaagatcttttggtacacttccttcatgtcctcttttatattctccctggatgaggatagaaaaatgatttttttaaattgaaatttcaggttcttctagcaagacacaaggcagaagaagtgttctatgcagtcaaagttttacagaagaaagcaatcctgaaaaagaaagaggtatgagatgtgcttgatggggctggcattggcggtagacactccttgaataatcttgattctggaatgttggtgccaagttgaaacatgccactaaatctgaatcgtcattttcctaggagaagcatattatgtcggagcggaatgttctgttgaagaatgtgaagcaccctttcctggtgggccttcacttctctttccagactgctgacaaattgtactttgtcctagactacattaatggtggagaggtgagcaggggggatagaagtcaactcttagtgtctctgcacagcctgctttgttttagtttgagaaaaaagttttcaaagatttttggtggggagaatgttaccagaattagcatttccttcaacctgtcaggtttatagttaatagattacttggggccacttcctgcagttgttcttttgctgtgtatgtcaaaactaattaaattcattcgcaacccagaatgactttgttctgtctcctgcagttgttctaccatctccagagggaacgctgcttcctggaaccacgggctcgtttctatgctgctgaaatagccagtgccttgggctacctgcattcactgaacatcgtttataggtaagcctgagagctcttcggctaccagttttggtataaaggagacgtagcactggctgtttcatagggccttaaaatatttgtgtttatttgcacttggttg

SEQ ID NO: 182994 - DNA, 809 bp, Homo Sapiens
tttgtacaaaaaagttggcaaaataaacggttgaggcttttactttctaaatagtttgtctcttgtatcaacatagctggaaaagggagaaatccgatttttaaggccaagggaggggaaaattccaagtagaagccaggctctctgtacacgtttaccccacctacctgtgtgctcctacctgtgctgaggattctctctgtagctctaaggtcttgggaaggttattcaccttcctgcttcagacgtctgactcaagagaagaacactgttctacttaccagagtgtttttctgtgtaaaaccacatcatgaaggagaaagcgacaaagggaatgtgaggggctggaagccacagggaggctgtctcttgagtccccaccactgatccagagccaaccaaggcacctcaggaaatggaaggccacattgcctctggatttggaaatcctcctgggtaatgtaactgaaacccaggttgatgccatgcagcaggagcagcagggggaacgtgctctcaggagaggtcggccaaccctccagcccaacacccttcaccacagtggtggaggaggctgcacccaggagatctttgtctcccttttggccactgatacctttggccttatctgacaacagctacccctcgatccttccctcccaccccaggggctgggcagctggctggagctttgtgtccaccttgctctggaggttgagacccccatctgagcaacatcctctctctttgttcctctgatcccttggcatcgtcacaaacccacagggtgcataataaaaacttgctga

SEQ ID NO: 182995 - DNA, 1451 bp, Homo Sapiens
  misc_feature (943)..(1071): n is a, c, g, or t
  misc_feature (1149)..(1247): n is a, c, g, or t
  misc_feature (1249)..(1298): n is a, c, g, or t
aaagtcataaatctccaggagcattggattccaggaaagttaagtccattctcaaaatcccattttaaaactgttatggaatgcataataaaataaaacaataaaaaaccctctaggtcatgtgtgactgctgcttgttatactttttggaagtaatactagccatgttagaaagtccttaaactctgcatttggaaaacaactaaaaaataacataatctatgtaattctcacatttcatcacagttaacaatttcccatttttgacaaagcaaaacaaaaagaaactgcccactgcagacctaacaatgctgtattctataatctaaggtccattatgctttggtaaaattatatatgctcaaattctttgtgcaacttgaaaagacatcaaattccatattatgtatggaactccatgtgttttggtaatatatctgatatattttgttaataaaataagaaattaaaaagccaatgaatgaaaatgtgtcaggaaagataaattcattatgtcagtatttgattaaatgtaacatagaaaattgggattctttcactgcatatcaccaaaagttgggtagtcacttaatcaaaataaaacactgagaaccatggactatttacaaatgtactaaaatttttaaaggagagaaactttaacaaaaatcttgataattaaaaattcaaattgtgctagatagaatgtattccaaaatttctgctaaaaatttttgcttttagtttgtaagacataattcaggagaacctcaaagaaaaatttagcaattaagtttggaaaagctataaaagagacctttactttttgaacagacatttttccctttcccaaaatgtgtattattcaagaagcatatttataaatttcattaaagaaaatatcggccaggtgcggtggctcacacctaatcccagccttcannnnnnnnnnnnnnnnnnnnnnnnnnnnnnnnnnnnnnnnnnnnnnnnnnnnnnnnnnnnnnnnnnnnnnnnnnnnnnnnnnnnnnnnnnnnnnnnnnnnnnnnnnnnnnnnnnnnnnnnnnnnnnnnngtcacaaatcttgatgtttctgggaacctccatttccagctaatgaaaatataaagtaggctgggagcagtggctcannnnnnnnnnnnnnnnnnnnnnnnnnnnnnnnnnnnnnnnnnnnnnnnnnnnnnnnnnnnnnnnnnnnnnnnnnnnnnnnnnnnnnnnnnnnnnnnnnntnnnnnnnnnnnnnnnnnnnnnnnnnnnnnnnnnnnnnnnnnnnnnnnnnnctagataacttttctggaaataaatttggcaatatacaacaaagcctttgaaaaatactgtatttttaatccagtaaataattccttctcggggaatttatcctacagaaagaataaaaaatgcagacgaagttgatctaaagaggctgccaa

SEQ ID NO: 182996 - DNA, 977 bp, Homo Sapiens
ttggcaaggacctgctattatttgttaatttgccatcatttatgtatattttggaaggtatgagacccacaagcacaatgatcatttttatttgtttgtttgtttgaaacttcagcagaatagatatctgcatgctttatgaagttgttgcttcggtaagagcccatgggatgccagaaattaacatttctttgctgccatgggctgatgatgctgctattagataaagtttagctgtggcaccaagtcacatcattttcatagaaaaagattacttgtagcttattttagaagtatgaccttttggtctgtttgattgattgattagaattgcaataaaagaaaagcttgcattcataaggcattcattctgttgtaaatgttcaatatatttattttgagagcaaggacctgtggttgtaaacaggtgtggttacaggtgtggttatgtatctgagtgttgcggtcatactctcctccagtccaatcctgagcatcttcatcttattaattagctgttcgtttctttgtgcactcattcttttatttttacttctttttaatgttatggtatccagttgtttccagtagcagtttcttgaacttctggcctgtactactaactgcagacctccagagtcactggcctttctgtgctctacatattattttaggggccacatcagttgccaagagcaacatacataccgacctggctgaattattgccagtgaaaacaacctgtacgaagcctttgctcagttctaaaatatgtttgtccttgcacgaattttgtatatttcaaatatttctgtaaaggtttcttcttttctgttagagtgtggtgttaagcccgagtcagtggtttgtgttctcattaaatgtttgtttaaatcctatgtccaattcaagcctatctaactacatttggtaggaattaacatttcatatacaaaagggggcttaatttaaaactt

SEQ ID NO: 182997 - DNA, 1295 bp, Homo Sapiens
ttgggaatcattgctcattagagagaggcactggttgaggtgaaactggtgtagacttgcagtgggaccatttgcctggctgtacaatttactccaccaaagactggcgcccccagagcaaaggtgggaaaggccaatggcgagtgtatctgcggaagcagaagggcccatgagggtatacagaccacaggccaagccctcaaaggagctggaatcatgctgagaggccaaacatggggtccataataggcaagcagatagctgagccccaaggtggctctggggtcttgggaacagagagaggtagacaagattaaggtcaaaatgaggataatgaaccgttttctgtaacagtaagtacatgtaaacatcaaaagaggggtcattgaaggagttttctaagatctggaaagggaacaagtgatgatcaagtttggcaatgaacgttgaacaaccaaaataacaaaggattatagcaaaatggaaagaagcaaacaaactagaagcttaaaagctaccacttaaaagtccacagctaggtggtccaggcatggctttccatagggtcaagaacccgagttcttctttctggctgtctggccggcttggctttcattccagcatgccatcacccacattggcatctcatcgacctcccaggcagcagaaagatggaaaagacaagtctttcctgtaaggacacccatcactttcacctgcatctcattgaccagactactgcctgtagcctcacagctccaagagggtctgggaaatgcagatttccttctgggaagccatgtgcccagctgataaccaagaagcacggtagaagacactagtggaaaatgctgaatctgtgcctcactacaccccttgagagccgccgtgagtggagtttgtgaacattcttagaggcaacaggatggaaatctcaagaggccttatcattggaagcatattgccatggtgttttgacattcctgaggacagaaggagagggcggtgaggaaaataagattgttagcctggttctaaaagtgtccactgtttgtggagtcccgtatgtcagagaagacatgaatggtgagaggagggagtggtgaaagaagatggctttgagagaggagaagcatggagagatggtggaggagctggagtttgggggcaacgtggagaacgaggctgagaaatgaccctgccctgtcccctttcggaggtgaaggggagggatggcttcaggggaaagctggccttcagtgtacatgatggataaaaggccacttgcacggaaa

SEQ ID NO: 182998 - DNA, 918 bp, Homo Sapiens
ttggcacaaagtttcttgcaacttacttatgggagagatcttcaagaatatcactcttagactctgaactgaaatttgcatacgcttccaacatgttttattagctggctttgaagctcacaaaagaatggcaaagaaagaggctgctagattgaaggcaggcatactgaaagaagaaaaaggccaactgaaaactagatagtgagatgagaagaataaaacttcaagacatagcaaatctgggactgtctacttaccaaaggatactctagttgacccagaaaatgtgtgtacaacagtatggcccgtagactacttcctataatggtgaccctgagtttttttaaaagaagaaattaaatccagaacgctttataaaagggtaggaagaagacaatagatgttagaatttcatccaaaatgtttgagggagaggtgagtgacccaggttttaaccaacagcaaaagaaatgggcaattcataattttagattaagtgaaaagtttagaaaaaatttaagtatttttgttattctacaaatgcatttttaaagtatttttataatttctataatcaaatagctttggcatgcatgtcagcttacctaaatgaagatgtgtttaatgaaatgccatcttaccagctttctttatgcagagtaagtgtttgaacagtcctgtttcagtagctgtgctcttctgctttcagtgagttctgtttcattttgcatttctctgcactgggcactaagctttgtttttgaaaagagagtttgcggggaagaagatgagagtgtcttcatctggcacacagaaagagaactaatatctgttaagtgcttactacatgctgggcttttgatgtatgttatctcatgtaacctcaccttatcgcatatgaaagatcctctccagaaa

SEQ ID NO: 182999 - DNA, 906 bp, Homo Sapiens
tgagccaccatgcccggccttgtctaacttttaaattgtgaaatataacacaatatttcgatattaatattttatatatttatgtgagtgcataaaatggacaagacagctgtgtctttttctaattgttgttaagccaacactcctataaccaccacaatattgctagcacctcaaaaacacccactacctccagttccctcaaggcatccttggcctttttccaagatctgaaatatctagagagtcagggagaggttgggtacacatgtgtgtgagcacatcatgggcatgttctcacatgtgagcatatgagcgatgcatgtggccttgtgcctggggctatgtttgtgtatcctgccatgcaacatcacgggtgttggagcaggcagtcacattttccaattacctctacacccagctaggagtggagtgtcctgttgtgtggactttataacgtgtacctggtacccagtgttggatgacgtgatgcctgtggaagcatgtgggatggcacacgtgtggatcttccccgggtgtgtgtggggggtgcccaggtcaggctgggcagcagggagaaaggacctctgcctagacctgcctggtggagggaggggcaccgtgggaacagcctgcggctctgggtgacgtcatgggggtggagggtggagagctgtctggacacgttgggtggtggtggcttcagcccttcccggctggcacccttcagcttccctgtcttccaggctggatgggcctctgcccagtggggtacgagtggatggggacactttgggctttcccccactgaccactgagcacagcggcatctacgtctgccatgtcagcaatgagttctcctcaagggattctcagtcactgtgggatgttcttgacccccaggaa

SEQ ID NO: 183000 - DNA, 969 bp, Homo Sapiens
ctttgtacaaaaaagttggctagtttacccttaaaggtattttgtgtgtgcaccttttcttctcccctcatgcgtctctcacacagaacatttttggtgtcacaaacagaatccgaaagaaaaagcatgccatttttcggctgcaaggaccaggctgggagcttggagacttcccatatccaaggatgggaactcccccagttcttccccgtggccattgagtggtccaagggaattggcctttgtgaaaattgggaatctaaattagtgcaatttgaacctttgtgcgtgaagtgctgcagggaatcccagttggtaaaggggatgctgagggaatttccctgcgtggatggtgcttgcttactgcttataagttaatgtgtcaagatagggactggttgctacaggagaaatgtaagctggaaaaggaaaatgctaatctgacttccagactggtcctggcccaatgccaggcctatgtcttgactgatcaggctcaaagctatcagcctattgatgaaaaaagcatctgtttgagtggcccagtcagtgtactggaagtagaagtactgaagaagtagtcagccagggtttggagcaggtacaaacccagctcctatctcaaagatgggaaattaaccctagtaaaattcaaggacctgcacaaacaaattccttggcatcctatggaataagggaaataatccgttttaccaaaggctaaggctaaaatactagaatttgcaacccctaccaataaaaaggaagcccagaaattggcttgtttggattctggaaacgtcatattccccatttgggtaacattttacaacctctgcatgcagtcattagaaaacgctatgactttcactggggagagaaagagaccatggcttttgaacaagctaaacaagcagtgcaactgaccctagatctgtggtccctatggtgatggcccagtagaactgc

SEQ ID NO: 183001 - DNA, 983 bp, Homo Sapiens
ctataaaggcaactttgtacaaaaaagttgggtcaaagttaaaaaatcagtttataaagtaaaattagttagctaatgttaatttattattgaagaaagaaaaatatttttaacacatttagtgtggccatagtgtacagtgtttataaagtctacagtagtgtacaataatgtcctaagcctcacattcactcaccattcactcactggctcacccagagcaacttccagtactgcaggctccattcatggtaagtgccctatacaggtgtatcatttttttatcttttataccatatttttactgtaccttttctatgttgagatatacacatacttagcattgtgttacagttgcctacggcattcagcacagtaacatgctgtacaggtttgtagcctgggagcagtaggccagaccacacagcctaggtgtgtagcaggctctactgtctaggtttgtgcaagcacactgtgatgtttgcacagccacaaaaccgcctaatgatgcatttctcaaaacacatccgtgtcattaagcgacgcatgactgtatttaaaagtataatgtgtagccaagagaaagataaatttccttggaaaacttagagtaatcatacccattatcattatggctttaaaatttaaataaaaattctaactttcagtggtgcctgagtgtataataagaacagtgtctgttggtttccagtactgttttataaagaaacagggcagtgagtcatattgactgatagatttcttggctaagtatctccttactagcaagagcatggactgtctgcccctcctgctgcttctgagcatatgcttcttgggaaatagaattggtaattgcttgcaatacaactaaaacaaaaacaataaaatttatattttgtttttcctccagtttcagatacaaaaatgtcttctcaagatcaatgctccagtccttacataaagccatttgattttgcaaa

SEQ ID NO: 183002 - DNA, 1386 bp, Homo Sapiens
  misc_feature (538)..(550): n is a, c, g, or t
  misc_feature (793)..(932): n is a, c, g, or t
  misc_feature (1114)..(1126): n is a, c, g, or t
ttttattacaaaacaagcccacaaaacagttttagaaaatttttgctacataccaattaggagatcacataaaatgagaagcgtaacagtttccatgcactcagcctagagcttacagcgagtgcatttcacagctgaaacatcactgctttaaaacacagaatcatgctaccccttcataagcagagggggaggaggtcaaacagtatgtttttgccaaacgtttgctttatctgaactctatctagtatgaaggactggctgccgcaggcaataacacagagaggaaaaggaacaaaggaagaaaagggtgctggcagacaagatttaacaaacctgtccacttccgacattttgaaagtttataaacaaagctcacttggggacactcaatttccaaaatgctgtgacctccacatgttatctaatttatactgaaaacaaacctactaaactccactcctcaactactgaacctgctatttattcatggggtctttttagcccatataagagtatatttatattcagaaatatnnnnnnnnnnnnntttgcttcaagtagactaagaagctggaccttaaaactactttctttctcgtgggagctgagtattcaactcagaaatagatgtataactccaatattctgacctgacatcaatctccataatgtatacctcaatacccttatgatgtctcacttaacactaaaggccaaattatttttaccaaccatcagctgacattgagtaagcaagtcttttgaagatttcaaaagtaatagatggtgnnnnnnnnnnnnnnnnnnnnnnnnnnnnnnnnnnnnnnnnnnnnnnnnnnnnnnnnnnnnnnnnnnnnnnnnnnnnnnnnnnnnnnnnnnnnnnnnnnnnnnnnnnnnnnnnnnnnnnnnnnnnnnnnnnnnnnnnnnnnactgtttctaaaaataaaaattaaagaataatggatggcattattcagccatggggaggaccacctgaaatactgttacacacagtgggtcaagaccacttcaaaagccttatgaaaatagcacaactcaggcaaggcttttattccacaaagaaaatgcagtacattttttagttcctttnnnnnnnnnnnnnctcagatttactccagagcctatgcacttagtcactaatctatactgcatccccaacctattttttccatttggttcaattttatacatttaaaactaactgctttggtcaaatacgtaccatctttggttcacattaaaagattatggtccaaaactggccagaagttaagaaatatcaacaaaataggaagtttgaaatacaatttaggaatggaatgcttttagagcttgtttcattgaagataataatttatccaa

SEQ ID NO: 183003 - DNA, 1459 bp, Homo Sapiens
  misc_feature (1010)..(1026): n is a, c, g, or t
gctcttttagtacattaattagtgaatacactattatttctagaacttttccacttgacatctaataaggcagtagctttccaccaaactaaatggaaggaatttaaatttactatttaatgacagaacaaaaagtagatttaaaaatcagtatcttcctgacagaggtattgctataaattttcttttctacatgaaaagaaaaatttttcacttagttattatgaatatatatgtaaatacatatatatagttcttacaaataatgaaagccaagttttaaggaagtactgtggcttcatagcccagactgagaggaaaactgacaactatgtcatcaattcaccaaatagacgaaatgggtttctgtgttctctgctaagttataaaactaaacttagatactgaaattaacacaatttaaaaacagtcatgtagaataatgatgctattatttatagtgctcatttgattctcacaaccttgttaagtggacaaagcaaatatcaccatcctgtttgctgaataatgaaactgagtctctgggaagctaactggtaggtctagaacccgtccagttatctttcctgtgattcctttacctttatcatcatcatcgtggtaagcattacattagacttagctatgtgccagacgttgttttaagtattttacctgtattaactcatttaatcctcttaatagaggattttttgagtttgttctattactattacccaattttccaaaaaactgagacacacagaggttaagtaatttgtccagttatagagcttagtgaatggtggagccagaattcaaacacaggtagtttggctctcaatatagtgctcttaactaattcactatatttgtctctcaaatatccaaatcacatttctatgaaagttgtgtattaaaagttaatagatttcacaagtatttattttatgttttataaaaactacaaacttagaaatatacattaaaaatcaatactatatgtaatnnnnnnnnnnnnnnnnncctagactgattcttgagtacataacaaaactcaatcaagaaataaaattgtataatagcaagtaaaacacatgaatattcagtaaaccataaacattggaacaaataaataactgagaggaaacagtggccaagatattcaaggtagcaaatgattaagatattaaattctttgatacttatatttgattgcaaatgttacaatattctagtaacttatttcaataacattagccatcatttactgagtttgaaagggctgtaaatttgtctaatttccctcttgcacctccaagaccacaggcaatctaaaaagtaaaactaaatgccatctcaaaaaagctgcagcataaggccacacagttgtctttcaacactttcctagtttaatttacagagtatttctaaatgtttaaggtttaaacaacctccc

SEQ ID NO: 183004 - DNA, 1040 bp, Homo Sapiens
catttttaaccacagaaaatgtgcccctgtagcatgtttttaaatggcaagtgctatgaatgccagacatccataaactgcttgtatggagtaagaaattcataaatgaagaaagattgtttctgtcttgtttctcctaggtcacgaacaggatatttcccacaaaatgttttgacctggaaaagagacagagtcttcactagtaaacaggatctaatctccatagtatatttttctaaagaaacaagagctttcagtcctaaagtaatttgctagactagaatcactgaccagcagacctaaattcaagcttcaatattaagattgttgatggaggaaactgtcatggaaatggcaatttcttaactctttataataaaagcagattcaatgtcacaagaattaaatatttggccttttaataattttactttctttacatgtttctggagtgaacctcggttacttttcactgactttgttagaaagcaaaatctataaaaggagttactttaactgaagtaacagtattcacatattttaaccaaaattttaaaatcctaaagttccaatgacaaatctacctgataagcttatagaatctctctccccttctctctttgaaggccacagaatgccacaggcttgatctatgccacagacagcttatgtacacaattttttttcctttcccatatatttccttacccatatatgagattcgttctttggattttcagatacctacataatacagcaatttaaaagtttaacttcaataaaatctccatagactagaaaattattctctagtttccatcctcaaaatttctgttgcataggctgagggtgtggcttgagaatgtgcattctgaagctcccagatggcgatgctgctggtctaggcctgagaaccaaagcctgagatttaactttctagagctgggtacagtatgcaaaacagctgtcacatttttgtgctgcatgaggtgtcagatactttgaaaaggtataatttctcaaaactacagaatacccaa

SEQ ID NO: 183005 - DNA, 1691 bp, Homo Sapiens
ttggctaagaattccttcactaaataacccagttttaatatatccttatccaaagagaaactcatttttttaaagtgaaatatttgttaacagcccattgaacatacttttaaaaacactatggtagagaatgctgtgttgccttctgggctgcatttttcttattgatttggaattgtaacctatgtatgagaaagggattttctggtattttggtgacgttgtacattgtcccagactgtttgtaaacatgaggtcagacttgtgtaaggtagacgcctatggccactggcttgaccaccttggaagtcaatgactattttgagatgaagtatttaactatgaatatcatgaaggttatttaaaaatgtatttattttatctttggggttcaaacattaaaaaaatttacataggtgtagtaactcatttcaagggaataaatgctggattaaaaagtgtaaatttttcatgagaatttgggactaaattgctgaaccaataaagctgaagagttgcaacctctagagtcaaaaaagggattgaaatgttgttgcaaatgtaaatgctggcagtgcagcttgctatacatgtaagccaaaattgttttatagaacaagtgatctatattgttgtgatcatcatttagcttaagaaaggccagagctgggagagtagcaaatgttttctcatctgcagtgtatcagcagttcttgggcttcagctgctgaatagataataattctaattgaacataaattacatgaactcacatgtgaatgatagatatgttacaatatttcattcctgatgcagaaaatcagctgtggtttttattattaaccctttctttttcagtggttttggaattctagctctattcctcctggcttaaaatttgagggcatagaattcacaagagtttttgaagagttctgtctattcaggctttcctttgtccccaccctagtgtcattttcactcactcccatttctacacataagtattaaaaaggatgtatttattataattcgctagtactgattggtaagcctcataattggcctttgttatctttgtactgtgacgaaggcagtggatgatacattaccaatcattgccgaagataacctcttctatctttttgacccaactacccttattaaaactatcaggtaaaatattggagttaggtttttaaagtcattgggctgtggcagtgtgcttagaaaagaaaatggtggaacatagaatattcttttggtcactacacaatgtgttacttatacatggcagggaagggaattttaaatcaaactcgcagtttggttcttaggtcctctgctgatgaattctcgctctatcagggaatgatatgtgacgccagccttaggaacctggtgttcaactgtaaatctttctatttagctttttgtattatttgaatgaagttatagaatatgaattattgaatacagttctgttcagccaataggcacttgatatacagaatgggtaaatttaaatataaattaaatttttctaatattatgatcagcacttcactgtgggttctgtgtcttttaccacctcataataaaaactgttattgaggactggggctacaaaagtgcttaaactacttctagggcttccaaaaattttagtaaaatttaacagataattgggg

SEQ ID NO: 183006 - DNA, 803 bp, Homo Sapiens
ttggctatacttaaccgtagcatgtttgttttaccccaagtgctggttagaaggctagcccattgtgctgataagcacatttttcttatgttgtgctgtgatgtgtcccttgtcaaattggtttcataagaaaagaacttttgaaatatctcttttgctactgacatagtgtgagggaaaggaatgtcttccttaattccggtttagtcatcgcagcattggcgaatttagctggttaaaataatgtaatcaaattctttaaaatataaggaaagcaagacaagtaatgtgcatgaaaactgaaaaaatgtgaacacccgagcctggatgcagcactaataatcaacattgttcttggtttagttaaagaaaatttggccactggcaaaataccatttgggagtaatgagacacacccctaatcctaaaatattttcttgtcacttcctcaaagttgtttttgactttttttccttcagggttgacttcatatgtgttcattttattctaataagcaaaagttgtaatttttaagtgaaaaaataatttatgtcattctacttacaaatacaatttttctattctatatactcatatataaagatactgaagttttactgtattcttggtaattacaagccttacttaagatcataaactgttatgaatggcatccagtgtagaatacttaaaatttttacaaaatgtttttgtatcttaaaaatatttaaaatattatatataaaagattcttagaatttcaacccagttaagaaaaaaggaatagtattctatattattac

SEQ ID NO: 183007 - DNA, 1737 bp, Homo Sapiens
tctttccctgtttccactttaactggactgtgttagtatcatataaagccaatctttcacattctgttgtgctgcctaccccaaatggttatctttctacacaaaagtagaaaatatcgcaaaacatctttctgcttgtaaatttaactttttggcaaatagtttgattttatcattatactatcagaatctaacaatttcaaactagattagaatagggcatattaaagtatatattatgaatatacaaaagcgcatcaaaatttggctttctgaattagaacagtatcaagactgtcctccactaaaacacaaaatacaattttaaaaacatttagatgaaaatctcaataatcttgacactaagcgggtagatcttaaacacatggcatgatgagaaaacgaagggaataggttatgtccacataagacgggttcagggcagtccaaagacctctgtgcaccatgatctcacaaggaggacatgtaaatgcttctggagacacggagaagccatttcaacatttattattaatacacagtgactctgtgacaaaacctgccatctaatatagatgcacagggacttttaactcaccctagatatactttaagttgttttaaaaataaatagttttgcaaaaaaatagtttaaatgtcttgcattaatttgataacaagcttacaactctgcaatagttcttaatccaaatagcttataatgaacacttatattattacagtatactccatattccatcttattaggagaaaacatatgagaaaatgagagtctttttaacaaggtacaatcaacatcccaccaaaattaagtaccttttcccctttaagtcaaaataccataacaccataatattatggcattgtgccttttcttggtaatatctcagttctgaccctaaaaagcaaagagaaaaaagtgaggattcagatatgcttgaatgacaaagccagtaagtttgactaaacctttaccctcatgtttaaagtgggtaagagacttttcctatctcttcctttaagtgacaaaggaagaaccatcccaaattacatgtttcatctgagatagaaacattttcctttaaaggtgtgtagctgaaaattttctggacagggcaatcccaaaatactacatccattgcagaactgtgaaatgaataaacactctgcattacaaaataactaaaaattattgaatataacatctctccccaacaaccgactcaaggagataaaattattagcaacggcaaattacttaagacttagctaaattttaaaaacctatttttaaatggcagtatatatgatagacaatatgacttccacattatctaatatggtttagaatttttctcacattgtgagaaaaattgctccacaatttccacaatttttaaactaaagtcatcacgggttctctttatagtgggggtaaggattggtcaaatccagcacacttttatagtaactacatagaagaaaaatataaatccaactttaaaacaatgttttctttctattcaaatcaatttaaaactttttataaacattaatgttgcaagagaatccagtccatttatgaaaattagttgacaatcaagttcacccaagaaaatgttgactaagctaaagaaatcacagataaaacattttaccaaaaggataggtaacacacaaaaaaatgctatcacaggaagctatgatcatctccaa

SEQ ID NO: 183008 - DNA, 1063 bp, Homo Sapiens
  misc_feature (239)..(440): n is a, c, g, or t
ctttgtacaaaaaagttggctgaaataaacccaatatcctgaagtggtagttccctgaaaaggaaaaagaagaaatagagaaaagttgaaggatatgtacaaattcactcaggtcatatgtactggagtcacaattcaaacctagatgtaagttttccagagtcagggtgcttgtggtatgcttaatacaagcttttaaaagtgtcatggttaggtcccacagctagactacctgagtnnnnnnnnnnnnnnnnnnnnnnnnnnnnnnnnnnnnnnnnnnnnnnnnnnnnnnnnnnnnnnnnnnnnnnnnnnnnnnnnnnnnnnnnnnnnnnnnnnnnnnnnnnnnnnnnnnnnnnnnnnnnnnnnnnnnnnnnnnnnnnnnnnnnnnnnnnnnnnnnnnnnnnnnnnnnnnnnnnnnnnnnnnnnnnnnnnnnnnnnnnagttgttgtatatgctttatttgttactcgttttcatagcaggattgtaactacttgtttcagggccaagataccagtttctttttatccctagagcctaaaatggcatcattcactaaaataaaattgtgtttaaaaataaagatatatacttaattctaccccaactgtcatacatttgtcatgatggcatttatatctaaactaccatcctggaatggctgattcttttgtgctcttcttggctgctaaacttctaatttccttctccatttaaaaaatggtcttagtacttcctgatacctaccctgcctcccctccccaggttttccccaggtcaccatcccttcccctctttttcactggtcgccatggcaatgctagcaatttgcaggatggagtggaggatgggtaaggtccttttgctctcccagctctgattttgttctcacaggcagcttttccgtgtcctgtctcttctcagctggttgtgacaaaatgtctaggacgctatggtggaagcgtactccgtaatgtaaagtcattgcatgtaagctgaagagtttccattatagtctttccttttgatacttaattttttttacagagactgatttatttta

SEQ ID NO: 183009 - DNA, 1405 bp, Homo Sapiens
  misc_feature (326)..(336): n is a, c, g, or t
  misc_feature (618)..(631): n is a, c, g, or t
  misc_feature (1273)..(1325): n is a, c, g, or t
ttggcaaattattatctcctatatatatttagcattactccaataaaaatctcataggatttttggtataacttgataaagggattttaatgtatatagtgaggagagtgttcagctaaaaatatcatgaaagtcttgcagaaatgataaggaaggacttgtaatatcagataccaaaatattattaatagaaaaatgtggtattggtacagggatagacagattattgagttaaaatagagatcccagagatagacatgcttatataagcaattggattagagtatatatctaatatatgtctgtttaaatagatgtatttgttnnnnnnnnnnntcagctacatttttactcagagacatagatcatcaggttaatcagaagaccattcaggcttataaatgttgtaattgatgaagtatgttagtattatttggatggatctttagtctacttattaaaggttgcttgactattaattgtccatgacaccactctgtcagaatacaggattagagtgattgttctgagtatatcatttcttagtatttcatgaaagccatgtacagtacagcttttattcatacagagataaaatgaatgaaataaactttgggnnnnnnnnnnnnnnatttgaatattagtcttgtatacactttatattaaagtgcatttgtagggaataattcacttatttaatattttatgagcatctacaatatgcatagtccctgctttcagggagtttacacttctggggcatgagggtggagacagatgagtctacaaataactatgccattataattaagttttaatgaaatactaaaatgggaaattggaggattttgactatggagtttgaggtagacttcgtgttctttcattctgaaaatcaagggaaggtcattttagacaaaggaaaagtattgagccaagacaaatatctggattgcatgatataatagagactgggttggctctgaagtcagactacctaagctgaatctggctcctcctattacctgccatgtgaccttgggcaaacagtctgttgttagtttttttatctataaattgaagataatattttctttgcctcataggaaaactgcacatgtaagagaaaatgaaatgtcataaaccgagtgtacctgtgtaacttgcacttaaattaaaaacaaaaacagaacattatcagtatcccaggaggtttttacattctccattgtgttgtttcgaggattcactattatttgtaaggtggacctgnnnnnnnnnnnnnnnnnnnnnnnnnnnnnnnnnnnnnnnnnnnnnnnnnnnnntttaatcccaggattttgagactagcgtgaacagcaaagtgagactctgtattattaataaaatgaagaaaagaaaacat

SEQ ID NO: 183010 - DNA, 891 bp, Homo Sapiens
ttggatattctttttcaagactgttttgtctgtcagatcctttgaatttttgtatgaattgtagaatgagtttctttctttctgcagaaatgcctttgggattttgatggtattgcattgaatctgtagattactttagatggtattgtcatcttaacagtattgtcttacaacccgtgaacacagaatgtctttccggttatttccactctctttcgtttttttcagcaaagttttgtgtataccaccatggttagatttatgcctgaataacttattctttgatgctattataaatggaatttttaaaatattttcatagttctttacaactatatagaaatatagctcatttgcctatgtttgttttgcatcctgcctcttttattagttataatcggttttgtgttttatttggagctttatacacataagatcatgtgtagatataattttacttctgttttttatttctaatttagatgccttttatttctttgtcttgcctaattgctctggctaaaattgccagtggtacattgaacacaagtggcaaatgcaccatgcttgtcttgttctagatgttaggaaaacagctttcagtgtttcatcattgatcatgatattaactgttgggtttttgtacatcctattgtcacgttgcagaaaatcccttctatgcctagtttattgagtatttttattatagaagggtgttgtatttcatcaatgttttctctgcatcaattgaaataatcacgtgcttattcattttactgttagagtatattacactgattgattttttatatgttgagccacccttgcattttggggataaatctcacaaggtgatagtttacaatccttttgattatacagtattgctgc

SEQ ID NO: 183011 - DNA, 1527 bp, Homo Sapiens
  misc_feature (998)..(1056): n is a, c, g, or t
aaatctgaattcaacaccccaaaacctgtcctacctgcatcatctatcttggtaaagggctccacccagatactagggacagcattcaagaattcactctcttcgtcctactgcatattccatcaacagtcctactaattcagcctaagttaactctcacagtcattctccctatcgcggctgaactttaggacctcattctcttctatccccctaacagaactcttggcttaagtcacagctatatcccatgctacccctagaatgagcttttaaacaagaatagctgatcaacaggtcacttccctactcaaaattctccagttactctctagcatctcagtggggtggaggaggaaagtcaggaatgcaagttccacaacacgggacacaagcccctcatattctgtttttggactgactctttacctatcctacatgtgacctgtacattcaaattcatcttacattcatcatgttctctatgtaggcaagtgacttcctctgagataacctccaacccattttccaacagattatctgcatggtccacttttattcaccctttaaaatcagcttaagagactccaattcctggaagccttccttaagcaactccccagcttggtctgagtcctcttctttatgccagagccccacatgtacacctgaactgtctgcttataagtctaattatccaatcaacattacttccctgaggcagcaagtaaattttgtgcatttttttgtacctccagaccataacagtacctggcacacaataaacaatcagtaagtctgtgttgcatcaatgaaccacgtttaatctaatcccttcagaaaagcaaaatggacagtagaaaaaagcaactaaaccagaataaatgtttgaaaaaatatgtattgactaacatcactagatattctaggtaagacactgtctctgccgtttttctacatttttcattcctttaaagtgttcagttactactgcttcnnnnnnnnnnnnnnnnnnnnnnnnnnnnnnnnnnnnnnnnnnnnnnnnnnnnnnnnnnnacttaactccaagtaaacatgctgaacattttttctttagtttcttcatctaaaatgatcactgtgaccaactaaaaagagaaaattactccatccattcaaaggtaatttcttctcatgagaaaaaaaattatataacccttactcaagaacattatggtgaagtccctaaacaataattcctatctacatagtcattaataaagactaggtttatatatcattatgaaaaattgtcaataaatatttcttgggtaaccccttcatgtgctaatgttgtgttcaaaatttgggcttacacaaatataacaaatcctgaaaggcttaacagacagaaaataaatgtactggcaaagaaaacaatcaaaaaatagtatgtggacatatacaatcaagcacaaacttatatgaataattatttgttagagattactctgagactgttccatggaggaggtacgactcagccaa

SEQ ID NO: 183012 - DNA, 389 bp, Homo Sapiens
acaaaaaagttggagattgtgcccgtttttttcccccttgggagaaaaaacggggagagtaaaagaagagagaccaaagagaagaactcctcctcggcgagctccgcactccgtgccgcggcccggcgcggggacgccgccgccgcccgcccgctctctcccggccctgcggcgggtgccagtacgagcgcgagcgagggcactgcacccggggacgctgcgagacttttcggcgctcgagccgacctcgccgccgccgcggcaggcagaagagacaggagcgagaagggccctgcctccccctcgccttcctcgcccggtgtctctcgcccggtcgggccgcgcatgcaggcggagggaaggagggaggctgcgaggaggcgggcgga

SEQ ID NO: 183013 - DNA, 1187 bp, Homo Sapiens
acgctctcttcacagggatgttacatgccatgagaacaggtttctctgtcatgtgatatgaaacagggaagcagatgcctttaagtcaggatggggacaggccttgggcctttcaagattattacagacaactccaagtagctagaggcctggcttaccccccctgggtaaaggaggagcttgagtcacaccatagatccagactatctggctgacccgaggagaaggtctctgggacagtctcctctctttccctgactctcttaggcttgaggagaaaggctggggtctggagatgctggtcttgctggggtcaggcccaaagctgatctcacccatttgattcctatgggccggtactttgcaaagctgttacatctgttctccttaggaaggaaaatccccctgctatcagtggctggaatgggtagaggacctctaccacagcaaggatatccagggactatccatgtggccatagggaagcaagtgctgttttgtccctttctagctttgtggcagccagtcccaactcctgtgtgcctcggttggcctttgggttggactcaacagcatgcaccacagaagatatccactggagagactgagggactgggacccaagtctggcttaggcagggctggccatggaatgttgaagctggcctgccaggaattttgaaggctgggtcctggaaccatataatgcctaatttcagaaacgaggagttttctaggaaaggggcagataagtaaaggacaaaccctgcagcccccttggcatgcctgcctgtgcgctcagaggctccggtgtggaatcccatcagttagtctggcgtgtttcttcagctctgcgggtgggtcccaactggcccactctactactgcccctctctggattcccaagcttggcaagcagcgggggccgcacagccagtagtgatgtgggagaatacaggatggaaaagcagacttccacgtattttcacttaactgcaattgaggaggaattctgatacagatggtgatatataagacaaagttcacagggcccagaatggggcccaccccctctgggcacagaacaaagctgaggaatttgatatggaagctctgagcctcgcttagtcagtgcctcgctgggaacctggatgagtcctatctgtatgaggagccaaaacttgccaa

SEQ ID NO: 183014 - DNA, 634 bp, Homo Sapiens
cccgttaaatttaattccagaaaaacaataataatttttcagtataagtatattccatgcagtatttcactgggtgtcctgtgtctgtatttgctagagcaagccaccctattccactggtgacaatcagtgcagcttcacactgcctttctacaggttatcaaatcaataaattacaggttacataaataaattttatatctcttttcctattctttatgcatactacccaacaggaagcaacaagttctcctgccatatgcacttgcagggtaggtgaaatagagaaaagactatacttgcaaatctgtcagatctccaactccaatttaaaaaagaaagaaagaaaatgatgtaaaacaagacacagggtgaaaagcagggctctgcaacatcgtcagtgagtttcaaggtctgtaaaatgaatcaaagaagcaagtctcatccttgttattctatattccatcttctaaaaatgatgagagggcagatgcttttggggagatacaatcccaggaacagttctgttgttttcaaaaggctgccttagatggtcccccaagattgaggcaaacttcctttaacgtactcagaaacataataaacagttgccttacacctaaaaaacagccaa

SEQ ID NO: 183015 - DNA, 741 bp, Homo Sapiens
  misc_feature (537)..(569): n is a, c, g, or t
agctttgattgaggctcagtttacctagatacttgcatcttaaccttgaagactcagttttgtcctccagacttccaagaaatctcacttgaactccagctccattcaaggttcctgtgtctttcaaaaagcctatggttaaatctactggatattcaacattttgtattacgaatttgttgtttaacttttttatttcctcaactagactctgagcattttgaaggaatgggtgttctttgcctcagtcatcatgtgtcatcatgtaaatgttcaatacacgttttaagaataaatgactgaatacagttccttcctcccctactatgaagagcttgaataaataaattaattctaggaggctgggagccagtcagaagggagtaaagggaggttcaacaatggtctgagaggacatttcaaatacagaaagctgctttggggaactttgaatagaaacaggaatactcttctccctgtctcagtagggaaagagcttaatgtttatcattagttagagataaacctggaatttannnnnnnnnnnnnnnnnnnnnnnnnnnnnnnnnagagaaaggattataaacacaacagtcaggaaaactgcatcaaaacagcacacttctgtttacacagctgccctgctgctgcttgtctaatgtgtttttaagcaaacattcattcccagtgggtccctaaattggacccagaccagtgctttatgcccatgctccatgccaa

SEQ ID NO: 183016 - DNA, 747 bp, Homo Sapiens
actttgtacaaaaaagttggctcttctgcaccccatgaacgtttaggtgttttcccatttttcaccactacaatcagtgtgcacgcatgtttccagttcttaaatttaggatacgttctgggaagggattaatgagacagatttttacttttcatacattgtgtcaaactgctttccaaaaaatacggaaacagttgatcctcccaccagcagagaagactctcttcacccttgcatgactgggaataattcttcattcttggaattctgtgggttaaaaaagacgtttcattaaatatctgttcctgtttttatatcttccccgttggccccaaagtgctccttgcctattagcctagttggcaccttgttacaggttgcacccacctttggctcttagtttcttaattgttcactgcttatagcttttttgtaagcaaatcagatttctgtaatacagccgtaaagttagagatatatagatctgtatttttatttacctacagtaagtgtggtgtggaaggagagggaatttgaacaaagatcagataggttgtggttccatgcttgtggagtggccctccgttggtggggctggaagtgcgtgggtgcaggggcggggtggggtccctctaagctggcagggtcagggcaacaacttgtaaggcactcaaaacatcctctccagctccttctgccctgcccgcagctcatgatagaacagtccataagtccttccctcatggt

SEQ ID NO: 183017 - DNA, 691 bp, Homo Sapiens
ctttttttaaaatgaaagaatccaacctttttttactctgacctgcgagagtgcagagggtctggggaacatttgcagaagcaacaggtaccagccagtgctggaaggagctcaccctgggaggtctcgtcagcctctgtccttcatggctgtcccttgtgtcccatgtggagagcccttcctccctttccacatggtaagcactgagcccaatttcttctcaccccacagatggtccctcagagcagagatgtctaatgaaaggttcagattcagatcactaactttccatcttccactttttccagtggtggccatgttcccccgtttgccttcacaaaaaccttgtgaataatacaagccatatggactctgatttacagtttagaagatgagcagaggtgggtgtgagttgcccagtcatgttgctagttgttgaaaaaactaggattgttctcaggtcttgggctcctggcccatagaccagtggctctgtgttctgatggggtattggggaggatttttacaaatgcaggttcctgagattgttcctggaacatctccgagtgggtgtgggttgtggccctgcgtgtgtgattttgcctatcccagctccggggtaccaccaaccactttttgtctctgtgggtttacctactctggatattttgtttaatggaatcataccacg

SEQ ID NO: 183018 - DNA, 1092 bp, Homo Sapiens
ttggcttcttactacttttggtttggaggagggtatcaccactagaaagtgtgcctccttaagatttcttaaaggaaagttagtttcagtatttcacagcaagttggactacaaaatctagagttgatctgctttttaaaccttcatttaaaagcaaacttggaagaaatttgaaactgatgtttttaatatatgtctgtgttgcctaggttttctttttttaaagaggtatgtaattaaaacctttgtaaaatttgccaactaatattagtgcctgacttcccatatttgtttcatctttttaactgacagtatatctcacttcttctttgaatagaatgagtgagtgatctcagttttcacattttattcagaagctaatccctacttagcaaggcacacattctacagcaagtcatagaaagtttaatccttgtgcctccttagctctcgtatattcagggatctctataaaagttggtgtcttttttcatcatcataaattgatcataatcacagatatttttgggtctaagatattcatataccaaggatggttttgtaaagaattctgggatcattgaattaaggattgtggcttgaagtaactaaagaaaaatactaatttccttaaaaggaattataattatgatttacattttacatcattaatttcccaaattatatttaaccgtaaggaggtgcacatgagtttttagcaaacaggtatgaataagcagctatgtatatgtgtttggggcagaggggagcatattactttaacacacttcagaattaaaatcagttcgtttcatgactctgtgccttaacgtttgtgtgaactaaacttgctgattgaatgaaattcttgggaagccgaacagtaatagcagaaaatgtgaccaaatgagtatcatgtacttaaatcactgaattttatataagcacaagtattaattttaaaaacattataagtttaataaaggctgcattaaaaatatttgggagccaagacaagcatgctaaatcttcatttttgctatggctaaaagcatatatttttggcaccttatttgcaatattcttgcctta

SEQ ID NO: 183019 - DNA, 1386 bp, Homo Sapiens
ttggcttttgtgttccccctttttaaccccattctctaccttatgcaactggtgccctgtggtcaactcagacttctcattcatgccctcagctccttaaaccccttatcctcaaactctaccagctttgcaagcttccaagcctgaattgcctgactcagtttatccctgtgtgtatctgcttggggtgtagaatataacaactaaaaatgatagaagtgtacagattgtggctgttatgaatctagggcattcaactgcggttggacctcagtgccattgagcaatctttgtctttggtcagaaccctcttctataaacattcaccacttggttccaactgcttactcacccacgtgcctaatagataacctcacctcctaattcacagagggaggaaagttcaaaatgcaggaactttcacttcccactgtgagcctccaagggagtgtgtacatctgcgtcctgctgcctcatgcatggagatagcctttctgttcaacctgtcatctgttatgatcccacttcatcccatcaatgggatcttactccttcagccacccccttggcacctgtactttcagctgctcagcctctactggtccgttgccctcagccaaaaaacgccccttcaaccctgcactcctggttattaccctattgtttctctctgtggacaatcttcttgaaagaattgtcactccccttcctcagcttagaaactggtttatctgattgcctgacttttggtgctgttggttaccctctcattttctgggataccactatcatcatcttctctttcatgtctttgctgtttttgtatcccctattggattgagcaaagtcatcagcctagtcaagtcaccccccaacaagatgaaacacaacagtcatcctagactccttcctcccatttatcttccatagccaattgccaaatcctgtgatgtttacccattaaacatctgtcaaatcagtccctttctctttattcccatggccaccaaaccattccaggctgctatcatctcttctcgagatgtggagtgatcttggctcctcactatcatactcccttatgtggtcctttgtactgacctgagcaataatgatgctgaaggccccactgttcgctgccagcccacagagaagaagtctatgccagagaacgagtgaccagaagaggctatgctcacagaagtcagagaagcagagtcttcaggaagggagaacatcggtgtccaccaagcagagatacctcatgagatagattgaagtgtggcccctggatttcagaaatggatgtcatctgtccatggaggagtagggtaagaagctgcattgcagtagctgaaaggtgtccttggaagcctagaaactgac

SEQ ID NO: 183020 - DNA, 194 bp, Homo Sapiens
cagtcttagcctaaagaaaagttaacaggtacacagaggtcacagataagcaactcctttctaaagtttggcctaaactccaagggataaagtccaaaatggggtaaatggagaacaacttttagttccctgataatacttatggttattactctttgtcatatttctctttcatatttgtgattcctatactg

SEQ ID NO: 183021 - DNA, 836 bp, Homo Sapiens
gaatacatttgagatttccccatactgcatttattccatggtatgaatgtgcaggaccacagtttacttatcccttcacctgttaaaaggatatttggattgtgtctactttttggtgattacgattaaagctgctataaacattcaaaggttttagtatcaacatatgatttcatttctcttggggaaatacctaggagtggaattattgggtttgtatgtgagtgtatgtttatctttatatgaaatgactaaacttaggaggttagggccagttcctccagccagcaccagggctatgcagggacctaatgaaacattgataatatcctcccctcccatttggaacttcagtgacctatgttgaagacccggtgaaaccatctgtcttttctggagtgatgctttcactttgccagctgatgtgggtttcaccctgctggtaggaggttgaccacctccccattgatgactctccctttcccatatcacaggcatggaaatgacaatgagtagtgatcgttcttaacttaaataactttttcattaactctttttctttaattaggaaactaatatatgcacatggtataaaaaaatcaaatggtgtaaaaggatgtccaatgaaaaaatatacatctccctctcattccaggctcccagtcccttatacgagcgtagccaccatctgctatttcttgtatatacttctagaaattgtctctgcatataatgatgcttttagatgctgcttttagatgtttgcctggtcatcaaagcaataaagtattatagtggtcaggatcattatgaaattgttgggtaatttcaacttg

SEQ ID NO: 183022 - DNA, 940 bp, Homo Sapiens
ttgggtcaacatggtggctgtttaattccactgccagacactagaaccagagctgccctacaagataactattctcttgatgagcgttgggcagtagcttgactggttgcaccctggcatttcctgcctccagagacagaccagaaggcttggtaacaccagtttttatttgttcacttatcagttgatggacatttgagtgttttctctttttagctattaagaataatgctgttataaacactggtatgcaagttcttgtgtgaatattagttttcatttatcttgagcatatacctagaagtggaattgccgagtcacatggtaactgtttaactttttgaggaactgccaaactgtattccatagtggttgcaccattttgtattacaacagcataaaggttccaacttctccacatccatgcaaatgcttgttactatcttttttattatagtcatcctaatgggtgtgaagtagactctcattgtggttatgatttgtattttcctaactgctaatgatgatgagcatcttcccatgtgcttattggctatttgcatattttctttgacaaaatattcattcatatattttgcccaattttcgttgaggttatttgtctttttatttttgagttgcaagcattccctgtatattcttgatactaatccttcatcagatatattatttgcaaatactctcattccatggttcggttgtccctttactttcttgatgatggccttcaaagcacaagagtttttaattttgatgaagtccaatttatttatgctttttaaaaataattgtgcttttggttttccatctaagaaggctaagcataactcaaggtcaaagtctgttcctatttccttcaaaaagttttatatttttagctcttacatttaagtctttgatccatttgggaattaatttt

SEQ ID NO: 183023 - DNA, 469 bp, Homo Sapiens
tttgagaattaagaaaggtttatatagtttattggtaaaaccaggaatgaagaatccaaacattcattgtttaggaaggcatatgctcttaaaatgtataaacctataatttgaatacaataagacaaatttttatatatggatgacctccattataattgaagctgcactcagtctcacaaaacttccactgggtataccattatcgtaagggcaaggaagctctgatgaatcctgactatctacatataggctttgccactattctaatatttaactaaatatgttgacaatgttttatttcttatcaatcataaaggactactaaatagcacgtcaccatccaatagccaatatttttaacatgacatatgatcactaaatgtaatgtggtatcctggagggagtatcgggacagaaaaacaacactgacaaaaaattagtgaaatctgaatccaacttttttgta

SEQ ID NO: 183024 - DNA, 959 bp, Homo Sapiens
ttggcttcaaacatctcagaactcctaatacctcacagtgggctcagagccagtttgcgagtcacagcacgtgctgcagccactgaccaggaagacctgtccagcctccgtccccagctaacctgcaggacagtccctgacgtgctgaatatgggggctcccgggcccttccctgtctagtttatggatctgcagggcctggccacggcacctgtacagggaatgcctgttgctttttttctgaccacagtgccgatggctgcacctgcctctgggccctggaacttctccccgagcttgagaagccctctgaggccaggccctggtccacggggctgttctttcccccggcctttggagcctcagtgggtgattccaggccagccccttacttctcgtcatctgttggaagaatttagctgcttgcaagacagacataagtgtcttcctgtctgatgttgacctcaaagccataaatgggtgtttgcgacttctgagttaatgtcagctgcaggctgcctgtattagagctaattgtatggggacataactcccagacattaagattttttttcacattgggcctcctttatgaaatgtgtgttttggaacagagctctctgggcctgcagagacctcgttttagttcagtgtttcagcattgtgcagtcagtgggtgaatccctcacgggtgctgcgagtcagcgcccatcccccgagcagccccgagctctggcctctgcgtccatcatcaagtgggctcggcctgcgcccttagctaccccttcagagacaggctcagcccacacccccagctgcccctgcagagacaggctggctctgggagtcagcttctggctgatgaacagtggatgtggctcttgcggcacagagcggggtcgcagatgctgtacgtggcgtgcatttgactcagccctccccagctcacagtttccctc

SEQ ID NO: 183025 - DNA, 932 bp, Homo Sapiens
ttgggcttgaactgctgccaactccatgtcagggaagtcgcttttggtgcctggctggtttgcccagagccaagctggggcaaggggcagccagccctggcttccaaggctcccgtactgtctgtgtccttgtataaggagctttgctcttggaattactgaaagtctgtggcccaagagagagacacaagtggccttaagtctttttgaagtgttatttcatccagggaaatgcctcgagccatagagcctgaaatcatctttgttggctcagaaaataccttagcttcactcagctggactgcattgaaggcgaggctgccccttggatcaagcagaaaacaagagaaagaaagaacgttccctttggggatagtctggaaagttgggatttgcaaataaaggctctggaagcattgctggtcctgaagctttggaggtgggcagagagagcttcaagaagactagatgcaaaccctggaaaggattaaggctcaactctggagaaacaggccacagcctctcagagcagctgttggctgtaaatagaggtagcaaggccgctcccaggcccctgtgagtgtgggcacctgtgcatgcaatgctccgactctgcagaggtgccaagtgcccctgctgggccagtcccagagagttaggaagtcaaggcctgcaactcctggttcttcctgtttggaccagttcttgtgccattggcaggatgagaggcagcagccaggcgggagctgtgtctagcagcacctgtagcccacgtgctgctaattagctggaaaactggcgaaagcagaacctttgctaccaggaatcttgacatgtggggtctgtctttgagaatttgtaaatgaacagtcaaatatttcctctcggctcattttgcacatccatttttggggaaatgtgatttctctctc

SEQ ID NO: 183026 - DNA, 908 bp, Homo Sapiens
gcacatacacacagcttggtggtgggctacagaagaataaaaaatgcaactgcttcaattcgtttttaagggtgaatgatttttatgattacttatgacttatttgaaatatacaaggaacttaaagggttattaaactttggaaaattaaaattcgttcattataagaagttagcaaagactctaattcaggattttagcaagaaatccagctgctacatgactcttggtagcagcgcaagtgtgttacattatatatgcagatagttggaataacattatttttatgaagaaaaattgtagtcaggacattatcagtgttgtcttggattggtcttggttttccattgctgttgtctttgcttagtgttatcattagcttctcgttagcaatttattttcagttaactctatgatgtgaagtaatgcatatttaaatcaataatattttggggctatactttccctactaatgtcctagagtttaaggactgtatacattgtgattcaaacacagtagacttatcatatttctattgttaaaacacatgtattgataattcctctaagatttttttggtctgtacatgttgaatttagccacactttggcctcagtggctttttcctttgagttccctctttgttttttttccaaataatttccttaaataaatgctcatagattttgcacacaaaggcacacctaacctattttgttcatatctgttagaatgtctaaaagcatagacaggatagaaggctctcatgttcttttttaacgaagttatttctttgcattttatagaaatcaaaataaatacaacctaccttattgctgaagtgtacattataaaacttattttcattgtgggcagtttccttacctagaaatacaaactcagccaa

SEQ ID NO: 183027 - DNA, 156 bp, Homo Sapiens
tgcatactctttctaaccaacagctgaggtcacaaaaaagtaagaaaatccagcacagactaaaaacttcaaagaggacagggcaccgggtggtgagaagtggcctgtggccacccagattgaggggagagccaacttttttgtactaaagttggc

SEQ ID NO: 183028 - DNA, 296 bp, Homo Sapiens
cctatctccagagtaaaaagataatctacagaatgggggaaaatattggcaaactattcatttgacaaaggtctaatatccaacacctataagaaacttaaaaaaatttacaagagaaaaaccaaacaaccccattataaagtgggcaaagcagatgaacagacatacatgcagccaacaagcatatgaaaaaaatctccatttctgtcataattagagaaatgcaaatcaaaagcacagtaagataacatctcacatcagtcagaatggctccaacttttttgtacaaagttggc

SEQ ID NO: 183029 - DNA, 1000 bp, Homo Sapiens
aaaatgacagtctctatcatgaatttacttacactccaggcaaatgtaattagaagaaaaaaagatgtaagaaaatttctttaactgaaatgtggaaagagtatcaagagggagacccttaagacactctgtaagaatcccagtgactcctcactgttcaattaagaaatgtaccccattatgctgtgctacccacggaagcattggaggcactttgggggttgatgaagtcttcatggatgaggtactttaaatatctggtcatgaagagtatttgagaaatatgacaagtgaagatgctgggtaggaatgcagcgagaaaagtgtgtaacacaaggccaaactggaaaggtcagtgagggggcaatctgtggaggcactgaatgcagaggatattaaaattagcaagatagtgttctagcacaatgaaaaggattggaagagggagatgagagtcagggagtgaaattaggcagctgctaagaatgtccgggtgagtcagaggatcaggacctgtaagggcagtataaagaaggaaggaatgatgggagaggtttagggggaaagaagtgacaacctgtgacaattgaggaatgagagattttgatgattggggtgaaggttacatttcttaaaaagaaacaaagaatggtcggtcgatagagatgcaagatgaagaattttgtttttaggactactgactatgaggtaacaaagaaatcccagagacagaggtctgagcaaaagatatgggattggggaagaatctttgggagtgactgaggttgactagagggaactgggcaagaacaggtaaggactttaagcagaattggaggagtatccatctaaaatctgggtaaactgggatggaaaaacaagtagccagagaagcaacagcccaagctagggtgttgtcaaggttatagatgttactgattttggcaatgaggagattataaggatcgtttatgacccagcttttttgtacaaagttggc

SEQ ID NO: 183030 - DNA, 870 bp, Homo Sapiens
  misc_feature (468)..(519): n is a, c, g, or t
cagaaaattttattagtgaattttagaacgtttaaatgcttaagaaaaattggattttctaaatttgttttcaatgcgtgaattgaatgaagtgaaaattaaacaaaatacatatagttttgagtattctatgtccaaaagtccctctgacaattaaacaatcagtttacaaattcacacttcaaaagagaaagtccataattactgaatcctaataacccttattagaatccaaaggaataagtgattttaaaagcacatagaaagacaaagcttgaggttatctattctgaccaaaaacagtacataatttccttggttttaaagacaagtgaatcacaacttagtaggaatcacatttccatattaaccagctgggtagatgaaacatgatgtttgattgagactaccacatagtctctcttcttcatttattttatttttagagacaggatctcactctgtcannnnnnnnnnnnnnnnnnnnnnnnnnnnnnnnnnnnnnnnnnnnnnnnnnnntgggcttaagcaatcatcctgcctcagcctccccgagtagctaggactacaggagtgagtcactgtgcctggctcatactctctcttcttctaatcacagtattttacttggttgaaggtaggcccccaagagaaaaaaagaatctgaagtacaaaatgttggctcaagaaagaaaagacaactcagaaggtccagtactttcaaaaagggtactgtttgaccagtggccagatctctaagaacatcatggaattgtaaagatacctctcaaagaaagaaatgcattagtcacatttacctgatccacacaaatcaatacaaaaataatactagaaaaatagtctgatttt

SEQ ID NO: 183031 - DNA, 610 bp, Homo Sapiens
cagctcatttctcacacacacctttccttctcatttatagcaaaatttgtcagaaagaattgctcattctcagtatctctaccctctaagattccattttttccccaactctttccaggctggctcttttgcactcccaccaactgaaatcactcttgtcagtgttctcaatccgtaaattactctgcctgtcatcagcatttgacacaagtgattgatcagttcctgttttataaaaactttacttggttttctggatgccatatattatctttattctttcctaatttatggcagctccttctcggtcttattttctagcttctctttcctcacctgaagtttgttgtatcacacctagacttaggctttgtaacttttctttatcagtattcgtcagttagtatttgacaattctttgagtatcttatctaatgctatggctgtaagcattattaatttgctcttgactcaggccttgacatgccttgacatcttcattgaactccacactataatggactgctttttcgtttttcaagacagggtctcattctgtcacccaggccgaaatacagtgatgcaattatagctcattgtaaccttgaat

SEQ ID NO: 183032 - DNA, 949 bp, Homo Sapiens
ttgtagtttgtttttaaaattgtaaaaaaatttaagacaatgtcacaggtgtagttttactttaaaaataataataaagcacacaccagtcatttatttttggctttgactcatctgttttaaatagactgtttatttttatcagcatcactggtgagtaagactaaggagggacatgggaaagcaaggattaaagagaacttgaaagaaaaaagaacgatagacaaataggagttggaaggaaaagacagaaagagaacgactgttgtagataaaagaagactgtggcaggaggggcttaattttcatttttatttgtggagagctttgtgaatgacataaaatgattagatattcttgaatgatttaaaatctgtgtctgattttctggcttgacaaatctcacaatcaatgattccagagttttctatgatgccactatcaacaaatccctccaacagccttttttattcagttatgcattgtatctctatatgagagaaagtctttttgtgtactaagtaatttccatgttgtgaggtttctggtcttcagatacctccaattttatgctttagtcagaaaactcacatagcattcaaaaaggaaaactcaaagcaatatagacttttgtgccctttacaaagaattagagctgtgtgcccctaccaatatagcaatatattatataaggtcaatactccttttcacatgcctctaatacagatacattttatgaggtagaacagcaaacactgaatcactctagtagagatgcacaaaacaagtaattacagttagttgcagaaaaataattatccagttgtgtgatgaaaaccagtttttaactgggaggggaaattctaccaaaaaagcatttgtgaaagctaaatgttgtgatctgggaaacttccaaatgcagctgtatcaccaaagagaggtaccatgc

SEQ ID NO: 183033 - DNA, 865 bp, Homo Sapiens
  misc_feature (23)..(33): n is a, c, g, or t
gtataagccactgtgcccggccnnnnnnnnnnnctaagagagagacaggatctcactgtattgcccaggctggtgtcgaactcctggcctcaagcgatccaaccacctcggcttcccaaagtgttgggattacaggtgtaagccaccacgccccatggagtctttagatttttctaagtagaagaccatgccatctgcaaacaaggctaatctgacttcttcatttccagtttggatgcccttcatttccttctcttgcctaattgctctggccagaactcccaatactacatggaataaaagtggtaaaagtgggcatccttgtcttgttccagatcttagaggaaaggctttcaatttttctccatttattacaatgttagctgtgagtttgtcatagatagcgtttattattttaaggtatgttgcctctatacccaatattttagggcttttataacacgatgttgaatttttttagaaagctttttcagggtctattgaaatgatcatatatggtttttgctcttggttctgttactatgatgtgtcatgcatattgatttgtgcatgttgaaccatccttgcatccctgggatgaatcccatctgatcatggtgaaagatctatactcacaatattgtacaaccatcaccactatctatttccaaaactttttcatcacaccaaacagaaactctgtacctaccaagcaataactcctcatactccctgaccccagctcctagtatcctctattctgctttctgtctccatgaatttgccttttctaggtatcttacataaatagaatcataaaatatttgtccctttgtgtctgggttcttttactaaaaaatgtttt

SEQ ID NO: 183034 - DNA, 1116 bp, Homo Sapiens
  misc_feature (886)..(899): n is a, c, g, or t
gagccactgtgcctgacctttcttgtacatttgtgaatttgaaagagttatatgccagcttctgaggcatttcttaaagatgaatttttaaatcctggtttcttttaagtctttttggaatagctatacattagccaaagtaaattttttgatacaagtttacctctaaaggaagaggacattcgaatagggttttatagctatttcagtatagggttttatgattttctcttaaggaatttcagagtatgtgtcattgtttcaagattttctatttactactttaaaaatggaaataataggtctttggtaccttcttgaaggtcatatgccacaaagaatgcaaaaatacatgaaagtccttagtatttgttgttatggtcattttttagagctaattttatttttaatcattagcggttgcttcgtttggagttctgtttttataacaatgatagataatatctgcatcatattattgatgtaaaaaaaatctacctttgaaatgaattagggatgtaccatacttttgaatgtttgtcatcaaacaacatttagcataaactgcatctagtggccattgctctgtaatatgtaaagacttgtcggtactttgtcctgctaattaatttgaggatttagattgtaagctctgtgagggcagaaagtaatatttttctcatttttgtaatcttttctattattgtctgcatagcatagtactttacactgtatcagaaattgagtattttggtttaggcttctatggtaatagaggttaagaaaggaaatttggtagacctttaacatttgctggattttgacatttttgatttttgactgaagtcttcaagttctgttacatgacacaagaatgtgaaatgannnnnnnnnnnnnngggaaaagctggttttttgtgtgctttatataattttaaagaaaagacttgttatgaaatagtttcagtcattttctgaattattgttgaaattagtacagggtagattcacatggtcagaaagtgtcacttaagttttcacctttagcttatgtggttgatatttatctaattagaaattaagacccagaaatttaaaaatttcagcacatattcc

SEQ ID NO: 183035 - DNA, 625 bp, Homo Sapiens
  misc_feature (199)..(285): n is a, c, g, or t
ggaaagaaaaaataagtaaatgaagcttcagcccggcagatcctgagcaattcaaagaagtacctggatgctgatgctggaacctggaatactgttcttttccctgagaaaagaatgttctttcattgccactttgagggaatagttaggcgtaatagttaggaaccagacctttagcttgggttcatatttgtgactnnnnnnnnnnnnnnnnnnnnnnnnnnnnnnnnnnnnnnnnnnnnnnnnnnnnnnnnnnnnnnnnnnnnnnnnnnnnnnnnnnnnnnnggtgaattgttgcaaagtccaaatgggtaaatagacataaaggcttaaagcaatgcttggctcaaagaaagtcctctttaaatatgagacgttattattattacttgaaagacatccaatttatgcagctagatgctaccttgagcttatctgaagaaaggctacatatgtatacataaataaataatatagtttatctacgttgtctacatagagtctgagattctgtggaaacccaagagggaaagaaaaaattattttgcagaattacctgggtagggaattgtcttccctctagatgttagagaaaggccacctgtctcctggaggtaaagttttg

SEQ ID NO: 183036 - DNA, 1061 bp, Homo Sapiens
atgagccaccgcgcctggcccaaacatcagttttgaaagtagggctacagtgatttatatgtattgtgggcacttattaatgtaacgataataaaacatgaatcgtataaagtcctttgagggaatctcctaatggctaggctctctgtcgtaagtcatattccagccccaggcttctgagctcttataacatacaactgagcattcttaagctcacaacctatttccagaaaagagacccacatctttctatgttttatactacctttgtttttacaccatatagtttttttctattagtttaaggtacctagtgttacaggtctagaaagtgcagagccatccctacctagaagagaatagatgggaagagaactgaaagaaagaattcctcaagcactgaagtcaggaaaatccccgtaggcactgtattagttgttccatttatcccagcactccacttgtggatgaaggagttgtatagaaaggagatgagaaaatggcaggagtggaagcagccaagaagagatcgatgactgaagatctccttcaccttcaggactgtctcaaggggttatttcacctctactcatgaggatggccagtttttctgtcttttatctttagacccatatataatcagttcagagcacaaatcaaaataaactggcctaaataactgaattctaggaagcaaagctacatcttttttcatatgccaaagcttctgtttcctcatgttgttcctactttttaaataataaatggctctcagcatcttaggaactagatgggtcccatctgggtagaacctgctataatttttagaatcactcttgtaattcttacctcacttaaaatattaggaaacacagtaatagaaaagacagggagaactcgtctgcaggttttggcagtgaaatttgtcttccaatgaattgctattattttcaaattgcctatagtcaaaaagcttttctttttatggagacttactttcaaatgagcttgtgttgaattccccactctaaattctctctgacattttcctgtcttttggg

SEQ ID NO: 183037 - DNA, 556 bp, Homo Sapiens
tatatgtagatccacttcactacgcattgtccttaaagcaaacaaatgaacttgcccccaagcatgccatgctcgcccacatcttggattcttcatgtgtttgaaacatgaggttatgtgtccgctttaacccaataagttttctacttgagttacttttgcaaatacagctttgggcctgtcatcataaacctaaaaattaattatcagacataatgacttggaacgtggcccctttttgtccacctgatctttctttgctcttttctgaatctttaattcttggtaaataatggtgtgataatatcatttgtttgaagtttttagtttgagcttttcaaaaactgtgactccattttactgtatcctttcatctctcccgaaagtcacctgttgctagggaaagtgatgctaaagcacctgcttggtaacattcccaagccacacgtctgtgttttggcatttctgtatgttcggtgcctgctatacccaagttcacatcagatactgaaatttacaattcaagggcactcatccagacttccattatgttttt

SEQ ID NO: 183038 - DNA, 1496 bp, Homo Sapiens
  misc_feature (293)..(326): n is a, c, g, or t
taaaacaataataataataatatttttgaggttcatccaagttgtagtatgggtcagaatttcattccttttaaggatggataatactcattatatgtatgtaccacatcttggttatccatccctcagacaatggacacttgggttacttctaccttttggatattggcaaatatttcatttcctttgggtatatatttatttcctttgggtatttcttttgggtatatatccagaaatagaagcagtacacaggggcttcattttctctgtctctttgccaaccttgctcnnnnnnnnnnnnnnnnnnnnnnnnnnnnnnnnnnataacagccatcctgattggtttcaggtggcatctcattgtggtttggatttgcattttcctaatgagtgctgatattgagcatcttttcatgtgtttgttgatcatttgtaattttctttgaagaattggccatttaagtcttttgcccattttttcccccacatagcttctcttatcagatatatgacttgcaatatttatttcatttcggggttgattgctttttcactctgattgtgccctttgatgcatagatgttttgaattttcatcagtctactttgtcagttctttctattctatctgtgctttggtgtcatatccatgaaagcactgtcaaatcctatgtcatgaacattatccccaatgtttgcttctaagaaatttttaggttttagttcttgagtgtagagtttaggtctttgattcattttgagttaatttttgtatatagtgcaaattaagggtccaattttattttaacaccccctgcccccagaactatttgctgaaaagatcaactgactctttgtcacctgctcaccccagtggacactagctgttccatccaattgctgtcctggggccttgtcatgctactcttccactttgaacccaagcccacaccgttcgttgctcccctctgggatactgaccccactataaacttctctggggctacaaccttcctaccctttgtgcctcatgaccaccccctcccttgtccccgccatgcccatgatgagtctcttctcgaggcagctccccttgcctccatctcaccctcagcctatgcaccacagccacactggacatgggtccctctgagcctgagtcccttcccattcccaccatcccctctggcaagaccttccttccaccaccttcatgctcctcccttgcccctgcagggcagcctctccccttggcccctattcccttagggggcttgtggccacccagtccttgcacctggcctacaagtttgccatcttcattcccccttcttctgttcatcagccccctcctctatcctcccaccctcacagttttctttgtatatgaaatcctcgttcttgtccctttgcccgtgtgcatttcctgccccaggaaagttgggacagcagacctgtgtgttaacatcaatgtgaagttacttccaggaagaa

SEQ ID NO: 183039 - DNA, 1112 bp, Homo Sapiens
  misc_feature (602)..(626): n is a, c, g, or t
  misc_feature (629)..(646): n is a, c, g, or t
ttggggaaaatatttttatggatcccagttgcatagttataaaactttttaatttgtgttaatgtatatatgaggaaagtagtatttactcttcataaagttttgtttggtacctttggcattagttcccttaaattctcatctgctcaatagcgtcttcagggaaaaactgagacatacaatctaaacaaagacactacctaataatttttagaaatcttcagaaatacctaaaatagttgcagtttcattcatgcaatatgaagtaccatgaatcagtataaccaacataaaccattatattgaagagggtagagagaataatattttgacatcaggatatgtacatttttgagttttttaaaatttctatgccgtgtgtttacctaatactgctatgcacattaatttgacaaaatgttttttgacacctactatctgctaggtatactagtgatagaatagcaagccaagtagacataattcctaacttaaagtttttgctctagtgagggagacaaactttattaagttattaaatttataaattacaaagtcagctaaatgttaaaaagagaaaatgcaatgaaagtcattaaagnnnnnnnnnnnnnnnnnnnnnnnnnacnnnnnnnnnnnnnnnnnntatgtatgtgtgtttggtggggatgtggcatgttttaatttatggggctaagtaacttttcccggcatcactgaggaaagtaatatttaagctgaaatatggaggatataggcaaagaataattgctatgggtacacagtctgatttgtatttcaaaagatccctcttgctgtattgtggggaaaggactgggggaaggcaagagagtccattacaataatattgttcagagatgaaagtgattggactgagtaaggcccaagaagggactagggagaagtggatagataccaaaagtgttccgatatagaattggtaatacaaatattattattattttcttttaaataaaaaataaaaccccaataacttttgttctaattcataagacttaatagcagagttatattattttttcatcatgttattcattcatccaataacacctaattgtgtgttttttgca

SEQ ID NO: 183040 - DNA, 985 bp, Homo Sapiens
ttggcattttgtgcgatagattactaaagcttaggtttttatcaccatctgaataattctgtgattttccttgcctacaatgatgtatttctctatgattcttccccacaaaggcaatgtttcttcttcttttctttgagctcaccttcttttcccactttttaatttattctgatccccaaatacatacacaatcctactgagaaaattagaagcctagccataatgtgtgattttctcattgccataagaagctttttagactaacagtaaatgaaaaattcttgaaaaggatcactcggacgacggtgacacttaatttattatctacccactgagaatacatttgtaagaaccatgcactttgatggcttaacaaatgtctctgagtctccatagaaagtacaccattaagttggaacaatatttacatattagtgtactttaagtttttacacagaaacatcgccggtgggaccaaatgctaagtccccattatgtagagaagcttctaactaacaataatagatggcactgattgtcctgctaattacagggaaacgaggccttcatggaaggatgccgtgtcctaggaaaagatgctgaagaatggatgttgcggcagcaaggaaattagacaaggagcacaggaaaaagaaagaatccctatttatcgcactgttgttactttgtttcatttaataaattagaatatccaaaggtgaatttttccacattctatctagaatatgcttcatcaaacaaatgctgtaaagactattacatgtaaaactgaattatgcccagatagtccatctgagctgtggcaaatagcaggactgagaaaggtgtttaaagaagcataggtacattatagcggtcatgtaaatagaatgaaaaaagtcttcatttataatattatagagattaggtaaaactgtattgttttaggaaaaccattgtaagatagtagatgaaataaatt

SEQ ID NO: 183041 - DNA, 920 bp, Homo Sapiens
caaaagggctgtacaaacgcgaggcaatgaacaaacactgagcgtgccgtccagatgtcccgggggaggctgaggatccacaccgtggggagtgctctgcccccaaggagtgacctggcgtccgccctccacggatggcacgcgatggcccaggccctgtgctgcagggccctgggagagccagcactggctactgggcagcctacatgacgcgacagccacccttgcccctcggagcctccacttgggagggaaataccaccatgggtgccgacctcttgggctctggaaggatggctcgtggccatctccttctggactacaaggaaaaggcgtgtgcccgcttggagccccctctcctaccagtgggggtaacagctcgcagcccctggtcatctgtatttagaccacagcccatgcagcacaaaggccccgggacccaggaagtccccgaattaaggcttccacagcaacgccgtcccctagagtcctgggttatcacagagctattatccacagccccaacatggttgttgaagattggagttagaaattcctaaaggcgaccctggagactcctttgtcccccaaattagaacacgggtgggagacacaaacagaaagtgccattgtgccctgagcttggcgtctctgggagctgatcccgacagttctgctttctgaagtcctgggttgtatcagaatgagattcggctctgctcagcagaagccccagtcagcccaagagtgttgcttaactgcttcagccctgtcctcactgacctcatttcccttttggggtctgttctcaaggagcaggcactggagccctcatcagaggcctcagggggcaggggaatgcccatggaactccctccaccctggggggaggcagaaagagccaacttttttgtacaaag

SEQ ID NO: 183042 - DNA, 857 bp, Homo Sapiens
ttggctttaacgtgagcccgctgcaggtgtgcggcccagtccgagacagcagatgaggagactgtccttcctgtttcgcagatgaggaaactgaggcttagagaagtttggcaaattggctaagttcctacagctaattgtgggattagtgatatgcttttctaaagagtagaaaagtcgaagatgtctagacagaacttagtggctttgacagtgactacccttctgggtgtggctgtaggggggtttgtcctctggaaaggcatccagcgccgccgaaggagtaaaacgagtcctgtgacccaacagccacagcagaaagtgctgggcagtagagagctgccccctccagaagatgatcagctgcactccagtgcccccagatcctcgtggaaggaacggatccttaaagcaaaggtggtgacggtgtctcaggaggcagagtgggatcaaatcgagcccttgcttagaagtgaattagaagattttccagtacttggaattgactgtgagtgggtaaatttggaaggcaaagccagccctctgtcacttctacaaatggcctccccaagtggcctgtgtgtcttggttcgcctgcccaagctaatctgtggaggaaaaacactaccaagaacgttattggatattttggcagatggcaccattttgaaagttggagtgggatgctcagaagatgtcagcaagcttctgcaggattatggcctcgttgttagggggtgcctggacctccgatacctagccatgcggcagagaaacaatttgctctgtaatgggcttagcctgaagtccctcgctggaactgttttgaaactttccccttgacaagtcccttctac

SEQ ID NO: 183043 - DNA, 169 bp, Homo Sapiens
tgtttttcaagtttcaatttcaaaacaaattgtttttcctactcttacacacttaacagtcaccacaccacacaacataacacagaatacttctgatggattgggaacaggaggttctccatactccaacaaatctccagtgaacaacaactaaattgttgtaaaattc

SEQ ID NO: 183044 - DNA, 1287 bp, Homo Sapiens
tccaaaggaaagtggactttaggtagctcagtcaactttatttctcaatgaaaaggacaattttcagtataatgtgatctgctactcctttccacaatcagaagactccagattcaactggaagatcaacatagagagaactgaaatcagtcttcttgaacagtttttgaagctatgaaccaaacatctcatgacccagacactgaattaggaggatgaatgagcataaaagtgataggtttttttatgtacatcggccacagagtttacttatgcataaactgtgtaaatagaatatactaaagaaccctcaaggaaactaattcttatgatgaggaactcatatcctctacaggttaagattttctggatccttaatagatctcttgctatatataatgtaatagaaacatcttttaaaaatataaataaggaaaaatgtatttcctctaagaagcaaaggtcctgaaaaaattactgctgtccacaactgaatgaagagaagagggtgtggagaaggttgggtgacagataagagtacacactatcaaaggaaaaggctgacctactaacttagtccaataatgtcttttcaaaaaagttataacttggctatctaaaaagagaacatcagatgaatgttgatttatactaggtactaataatcatcaaattttcaatactataaactttcaatagaaaagagtttagggacaatatctatctaaggacatttatttcactcattaaataagtcctcttggaggttcttttcaactctatacttctaaaacctacagacttcatctaccctgaactcttagaaccattactctgcattatttgctattattcaaaagggaagcatgagaaaaacaaaatctatcatatggatttttttctcaatttaagttctatgcttccaattaagcatggcctaagtaaaaatttacttcattatttttatttgaagactatttttactcaagcacaggttctataagcacacgatgctttatttaaaattactgtcattgaaaaatgactgtcaaaggtaaaataatccagtatgagaaagagtctgtgctcctgtagagaaaatggaatattatatcatgctaaatattattaaatgatgtgtccaaccacagcatgatctctgtgtggattataaaatttatcagactcatgctctctaatcagatgccaaattatcacacaaagttgttagaccagcaagctctctccagataacactgtttgcaagcctcattccagctatcccaa

SEQ ID NO: 183045 - DNA, 1644 bp, Homo Sapiens
  misc_feature (1347)..(1386): n is a, c, g, or t
ttggcttatattggatatataatattgaatttatagtataagctttattttatcagttcgcaaatctgaagtctcatactgttttctgtctctttaaaacacattcttctggtggcttgggttcattgtgcattcattggccactcttcttgcagcaaattttaaatcaatttaaaattaggtaaactttttatgatactataatatatatgacgttgaaatgacattggttctgagtctattaatttaaattttgggatcattacattcagaatgaaatgaaattgaccttgatactaactttgagagccaaaaaaatgaatgggtaaacaaagcctaagggtcatgttaattaatttaacaaaacacactattttcagtcctttgggcttgtacattttatagacaaaattagtatttattgatttggaagtgttcaattgagagtaaatgactctgtgttttgaaactaatacctttgcatttaaaatactgaagtattattttgttagttgaagtagatcttttcctgtgtagcatgatttaatgcagagcagttattcacttatacttctgaaaagccataatattgaaatttaaaatgaatagtcttactttaaggtcacttttactttacattttactttaaaggtcgtttttagactttatgcactagtggtattgaaactaacctttaatatttgactaaattgcttgtgaatttttggaaactatgtttaatttttaaagacattgttatgtgaattatcttactaaattatcacttaagaactctctcatagcagtaatttcattaacacatatatatactaaccaatttgctaaatgaattgtcggttgtcctgcttaagtactagggccaagctttgaaatgacttaaagtgatctgaattttgattgagaaaaataatctgtcttctatcgaatgtttgaacttttagtgatgagcctcagcaaagtttcaccctgcatgaagcagaacaggtgggggaaaattacaagaggggtctgtaccaaaaatggccccaggatattccattgaacaaatattgaccattatcttcctaggtgctacaactccatactagtcattacagttagtctttggtttcacaaaaatgttactgcttcaaaggcttggcattaacagtgatgtcagcattcatactgccaacagtctgctggtcatacatggaagactgttaaagtgtggtctgtgcatcattgagcaattgttatgtagacacaaggcctgcttcactcaggatagcttgctcctctcgctgagaagagatacctgaagtctactaagtctactaaatgagnnnnnnnnnnnnnnnnnnnnnnnnnnnnnnnnnnnnnnnnttactagtgtttgtgataatgttataaaaattaataagattgttttgttttgtatgaatgtacgacaaatcgagttgttcaatgtattgaatgaatgtcttactgtaagcatcagagctgtccaaccatgtgtaaatgtacctggtcttttgatcactgacactactttgctgttcaatctggaatcaactgacctggctctgccattgagaaataactaatttagaacaaaattgttaaattttaaaattgcatttc

SEQ ID NO: 183046 - DNA, 597 bp, Homo Sapiens
ttggacttaagctgtaaatagaagaatgggaagaatttgaatgcatggaaatgactcagaccgtcattgagggaacagtaaaagcaagatgcaaaggtgagaaaaagccatgtacaaagaatgtaagtcgtttgggtgggtcatggaacacgtggagtgaggtgaaggaaaagatgcttgatcagtaatcacatatagtattttctttaatttttatagcaacaatgttattaggtgtggtattattcacactttaaagagatgaggaaattgaggtttgggggttacatgacttatccaaggatactcagctaattaaaccagcatactacgaatacaacaacagatctgggtctgaaaaggtaagataagtaaactgggtttataacagggagattgtattgccagtccaaaagcataagattttgaatcctatgatacagtccaggaattggcagactacagcctatgagccggatctggcccactaccagtatttgtcaataaaatctatcagaacatagcatagcccggtcgttgatgcatttttcagatggctgctttcccactgcaacagtagaattaatttattgccaa

SEQ ID NO: 183047 - DNA, 930 bp, Homo Sapiens
  misc_feature (511)..(556): n is a, c, g, or t
ggctttaccaactaccctaaaagtttgaggatgatgctattaagaaagcccacatagagaaggattttatcgctttctgctcttccacaccagataatgtttcttggagacatcccacaatgggctctgtttttattggaagactcattgaacatatgcaagaatatgcctgttcctgtgatgtggaggaaattttccgcaaggttcgattttcatttgagcagccagatggtagagcgcagatgcccaccactgaaagagtgactttgacaagatgtttctacctcttcccaggacattaaaataaggaaactgtatgaatgtctgtgggcaggtacatgtgtatggtcgggagtgtgggaaggttgaggaaagggtactgaaagtccatttgagtcaagaactctaggtttacaggctgagaatccttaatccaaaaatttgaattttgaaatgctctaaaatccaacactgtgtgagcgcccacatgatattcaaaggaaatgtttannnnnnnnnnnnnnnnnnnnnnnnnnnnnnnnnnnnnnnnnnnnnnagtaagtatacagctgaattccaatatacaaaaatatctgaaatttgaaatacttctggtagcatgcattttggataagggataatcaagccatatacagaaaatactgaagtaatgtctttcttctggtcagtgcagagcacgttgctcttctcccaaagtttttcatttagaccccttttgagattcatctgatattggcctagaagtggccgtaagactacaaacccctcacttttggatgtttctctccttcacctcagcaaggtatatttaaacatagcatgtgggtcttccttttaaaaattgtgtatgttcccattggggggtataactttataacttgcaggtctttaacaaaattctttcccatg

SEQ ID NO: 183048 - DNA, 587 bp, Homo Sapiens
ttggattttttcctcacacttaaatgaatgaagtgttcatttattttttatttgatgataatcaagaagtgagtagtagtagctaacttaatgtacactttgcttaggtttttaaacatgttactattaagactacgtattgtaaaccttctgtaattttcacatatgaatgacaggagaaagttaaacctaatcgaaggagttttggaataaaaaagtggtgctggggaaattcaccatggttcacaaagtatgcctttgtaaaactgaatcaacttttagcaagaattaatttatgtagttttaaatgttaaattgtgtatatttaacagaaaatacttatctggcacctcagcagttttaatgttaccttatacttttaacagtatgatttatattgaatacttagatgttttcataagattttatcaaatttgataatgtaatgataaaatgtttttttaaatgtgaactatttaacatataaatggggacacaaaacctgaattgtgatttctacataatgtgataattatggttcaaattatgactcatcgtttaattgattataaatgactatatttctg

SEQ ID NO: 183049 - DNA, 911 bp, Homo Sapiens
  misc_feature (235)..(295): n is a, c, g, or t
  misc_feature (864)..(879): n is a, c, g, or t
gaaagcagtctctgtgccataaagactggggaccgctgccttacgcggctgtgttggtggctgcgtgtgatacagatgaagtgcatgtgcacctctgcctgccccccaaagacaagagaaaccatcttccccgcctcctccacgtgtttgaaggacagcgatggaacgcctatggcactcagtgtgcttccccatctcctggaaacctcagtacgagttctcaggcagaagggcnnnnnnnnnnnnnnnnnnnnnnnnnnnnnnnnnnnnnnnnnnnnnnnnnnnnnnnnnnnnnagagtagcaatctagcacaccagtgagcgtgtctgcaggctggtttggtaactccattccaatctctccctccaaggcactggggtctatggaaggtatgagagtgatggtttgggagtcctgcttgaaagtcctcacccatggctttctggagcatgctaagggcgggctccaccagctgctggatgtactgatgcacgatgatctcaaatgtcttgtagttgacaaatcccagaagctccttgcctcgatactgcttttcatatttttcaacttcttcgtggataatatttttaactgcaacatcaaacagacctccatggtgaattctgctaattctgcagacgtcgtaaagctagcaacagttttataaagtcttgctccccactgtacgcagaggcaatgttgcaaagtggagttttgttcacaatgagaaaaatattcatggtctaataacaggagtttaagaaatactgacttttgggggaaaaaaatcttattctatgaaaatgtgtttcaattgaaagtcatcaccccaagagagaagctattgtttctaactggtaggnnnnnnnnnnnnnnnncctgattagaaactaggtgtggtggctcacac

SEQ ID NO: 183050 - DNA, 1070 bp, Homo Sapiens
gacaagacagcatacttgatagaccaatggcttgatccgctatggcaaatcttgtgtagtacccaggattcagtttactttcagggaagaaacaagaacagaaggttcaggaaagtcccacaattctaactgaggaacaaccaaaagcctacgttacaaaagcaacagctaaaatgaccaggtaggctcacaacactggtaacagactgaactgctcaaattccctgagagttcacatgaagaccaaagcaagaatttgcagatcacaaaagatgagacagcctctgcagagtggagcgaagctggttagccagcagagcccagagtttcctcagccatccacagtgtccctgccctacatcaccaagaatttaaaattgcctggcagggttgatcgaaatagcctaagaataaggttttgaacttacctgggccatactgcgtgcatgaacacacggacatctgaaaactgctgtcagcctctattcccaccacctatcctaaccctctttacggtttcccaaaaatgcttagcactataaccaaaatgccctaaaaaccttatctggtaacatttagactccccatgctggttccggtttctgcagttgaatatgcacttctaatctcgtggagtaccgcatacaccagaatgtgtaacaaacaggtatctggtcaaaacaggaataggccaattccaacgtagtttctatgaaaagctaataacctctctcttccttcccatttccaatagggcagataattgaggaaccgtagcagcaaaggctgccgcttcagaagatagtaaacttccagtgaccattactttataactgctgagtgaactatttagtcctgactgtcagcaatagtacttgtaggatatcttcggctgtcccagaagtgaaagggggcttctaaagctgacttctcagaaagaaagaaataggattctcagaggctacagacaggtctcaaagtcaacctgatgacagctgaactggtcctcaaacaattttataatattaggttttaaaaccaggaaataaaaacaagtacaggaaacccaa

SEQ ID NO: 183051 - DNA, 999 bp, Homo Sapiens
ctttgtacaaaaaagttggctcatattcgggctattgaaaaacgagaatttacaaataaaagggttaaattgaggcagtttcaagcagcatttaggaaaatgaagtggcttccaattttagtgtttctggttacattattttgtttgaattatacaattacataattttctgtaaccaaaatggtaattttgatggattttttaaatgccaaaatccaatcatcaaggccaaagaaatgcatgattactctgatttcttatgcaccattcagtcaagacttaactcagaggcagttgattcagtgcttacatctagacaaagctttaatgagtgcagacccagcctaacagtatttcatctaatttctttgatggcttaagccaataagcactgaggtagcttttctcagaaggaaacagattttattttccaggggctaattaatatgcaccacctaagtccccaaaggatcacacaggtgcctgtatcatgccatatgtcatgtgctatattcctgcaagctcaagagattaatatacaatcattattatgaattattatgttgcattgaagttaatgtcggtcttttgttctaattaaagtacaaacgtggcatctgaatagaagcttagctagagaagtggagttagagtccctattttaatgaactacatatatttttcaatcaaaatgtgtaattatttaattatctagcctgctcagtaatcataactctccaacttcttcaaagggcctttattcaatatgttaccactcatatggtcattacttggtaagtgttttatattttgaatttcttagatgctttcagtgtatgtgctagtgttttattaatattaaaaatttttgtttacttctatatcaagctgctgcaaatggactaccttattttaaaagttagaataaaatgctattactctctaaacagaactttagcatatctgtttgataagaaatacacaaacaaaatatttttc

SEQ ID NO: 183052 - DNA, 1558 bp, Homo Sapiens
  misc_feature (243)..(344): n is a, c, g, or t
gggtaaattagttaactttatggactttcatatgtcatctgcaaaatgaggctattagagctgataatttgataatttttttaatatttcatctgttatcataaatacttaccacttcactacatatcaggaagaaacagactttaagctaaataggaatgaaggatcttaataataaatggccttgagctccctgcaagattattctatcagaagaataacttgcattttaaaaaagctaannnnnnnnnnnnnnnnnnnnnnnnnnnnnnnnnnnnnnnnnnnnnnnnnnnnnnnnnnnnnnnnnnnnnnnnnnnnnnnnnnnnnnnnnnnnnnnnnnnnnnccctcagtgtggacaagacttggagtggttagtccacccagggtcacaaagctggtaaatgacaaaactaggactcaaaccaggaatgactgcaaagtcacctgactaaccacctggaaatttcacctcctaatagataaatcatgagctgaatacattcttatttaatctctggcaggtactaatttttccccctttttagtagagacaaaatagctacaactggcagccaaccaagaaacaacttcaaattaatcatgtgaacaaagatttattacttaaagctaatcaatctttcttttttcttttctattcctactgcagtttatgctccagtacagtattgctctcataatgtaaaagaactcccctgccactctctcatcctgctttccattcttataggacttaccactatgtaacagatctctttattgtccatttccccaactaaaatgttagctccacgagggcactgttcaccaccatatcctcatgcctagaacagggccagggacatggttagtgctcagtatgggttgactgaatgaatgtggacatttattaccattcctccctttataagatgctgaagacaattctccatagatttctttctacctatctgtgagcagaggcaatgactgcctttgttttgcaacatcttttcaaggatatctgtataacaaacagctttgggagacagagtgcctccttcaagagaaaatggtagactgcttactgtccaataaggatccctaagtccaaggttcttctcctctaatacaactcactgcatgcacaggctttccctggtcttctctgcattatcccataggaacagatactcaggggataagcacaaatgcaaatgcactggctactgctactgctgtaagaaactggcctttgtgtctgacccaggagactcgtgtctttgaccagtatctgtgaaaccgtgggaggttagggttaatttgttagcctgcaaataaggtaactctcaggccccccctcagtgtttgccaaaggagcaaagtgagagcaggtttgtgttggtaagttcttttaggctctacaaaactccaaaaggtttgtcatagttttccaagaaaaaaggatagtagagcagtgaaagtaaacccttttcctcaagtactctctaatcattgtatgggatcatcttttctataacatctgaggtaaatctgtca

SEQ ID NO: 183053 - DNA, 1599 bp, Homo Sapiens
actttgtacaaaaaagttggggaccagcaacacagcctgcagcaggtggaaggtggcggttcctgcacatactcggtacacagccccagagccactgagcactggacagtcagagaggccaaacaggtgggcacacaaccccgagggcatctggatctgggagtgtgtgtgtgagaaatggcaggacaagtcataatgcatggaaaggtacctacttgtcacgggtatgaccactcatttgtctcctgcccccaaccgaaaccttttctatcttagggtttttccttttatctcttcccacctgacaacccgaccccctctcacttaccctgtgtgtcttgccccacaccctttccactactgtccttgacagcaggaggcagcagattgctgaggcccccacatggaggaggatgtagaacaggcggctgcaagtggatgcggtgagagagggccacctagagtggcagcagctggcacaaggagcaggcccacagcagcacacctgggagtagagcagatgcaaggcagcgaggtggagacttgctgaggaaaggcatacgttaatgtatgtgtgaggttaacccaggaggttgaattccaaaatttccccttcccctttcttccttttactcaagttctgtttcaagctgattccagccatttgggattgccgcccactgacaacttagtagggctttcattataagcaggcttgagatatctgacctttctctcgacctaaacacctggggctggaaacatggcgggagagatttacagattatacctggggcaacgaaccagaacgacattagaggagaaaagaggcctgtcgtttttattggcttctgcacgtcttcctccccagcttcggccactctccccttcgcaccctctcacctgacagaagggacttttcactaggacactgctgcctccgctgtgctgctgtgccaggcccagggaggtgccggggctggggccggccttggcacccaccatccttgtcccagggattaggcttaggtccaccagatggaaggcagatgagagcagcagttgcttctgtcctcagcccattggactgccactgtgttggggctgagcacccggtcccgggcagaatggagacgtccggaagagaacactgacctccaggttgcggtaaatgcaaatgccctgtgaaggagctttgtccttagggcctcaacactgcggccactcaggctgttctctccagattagggggcagtttgtctatctggccccctgtggattagcattctttattggtttaggattagacgtcattcaggttgaacggagttccctgaggtgggtgggtgcgtgtttatgtgttgaggggactattcctagtttatgaggtggttaaggatatcggtggggtgggctggagcggtgtcgggttaggtctgagagaagcctcgcacaaaacactgtacaaacccgaaaggaagtctgagagacgaaccgccttcctccctgaagcttctagaactggagcagatagatagtgtggcccagggccagccccgcctcctccccgggcggaagctgtgtcagttgccggaagtc

SEQ ID NO: 183054 - DNA, 1175 bp, Homo Sapiens
  misc_feature (321)..(331): n is a, c, g, or t
  misc_feature (1077)..(1101): n is a, c, g, or t
ttggcttgtaattgttaagtgcatgttcaaagctaattgtgtggcatttggttgctgcttttcaggaaaacttttaaaagcagagtatattctgagcagtctaataagcaacaatggagcaacgggtgagtactttcatatcttcacaatgacttttacctcagccccgaacagagcactcatttaataacaacttagtgacttaatagttactataccttagatgtttccagagctatctggggctggctctgccactgatgaatgaagaagctttgatcaagcagcttacatctctgtgtctctgttttctctaagttnnnnnnnnnnncaacaaagacaaggaacctactattggcctgcttccttacagagtatgctatctaatgaacaatcactgtcaaggcagataactcagtgggccttagaaaggttcaacagcagcttttaaacaaaattgtgattggaaataaaagcctctaagttcagaagagtctgcttcggctttatcaatttaaatggttcagaaaatggatttgatttttggtacataagaactttaataaaaacttgtttcaaaatggattttctttcaatatttaattatccatgaaaggaggcaagacctaatagttaggtaacaaataacttaaggcttcagatatcttgtctgaatttctgggcatttaagttagcaagtttaccaataagttgagcacagtttccattggacttttaaactcagcatgcttggatgtgaggtctcaaactgcctgaaacttgtggacatttctagtggggagacagtttggaatccaaatattaaccacacacccctcacttgtggccaccatcactaaactacagtatacactcttgtcatcatgtgtgtgtgcacacacacacgcacgcacacaaggattcaaagctaggaagaaaataaatattatctgatgtgacagagaatggtgagggggtagtaaagagtctgcctctatttttgatgtttgaccgaccactgacagttttcacgccacagccttttttacttttgcctcacactggacagtccgattnnnnnnnnnnnnnnnnnnnnnnnnngccctttcatccacacacccaaacccagcttacaggaacctttacccggccccacaccccaatcacagtgaaaa

SEQ ID NO: 183055 - DNA, 1422 bp, Homo Sapiens
gcaatgggccgctggcggacaccgttttggtttgctgtccacgatgggaggccaggatggttgcgtaaggtgccaattcagggcacagggccaaggagtggtgcccagcactggggtcaccaggattgggctgtaggccctgcatggacgatgcgccgcgtggcagtcttggtgactgggtgctggatagagtgctcagtttctgtcatgtccacagtataatgctggtccaagagctctgggcaggacacactcacaggtggctctgtggggctagagaaacagccctggttcctcccccacatctggttagtcagctctgggtagcagaggtcagcacacagggccactgacgtggccatatctaccacatagacaggcggccagtggcgggaagaggcaagcaggtccacatggtcacgggcactctcacctcgcacaagatacttggagccgcagaccacctgatgggggcacaccttgtagattttaccacctgtgaagtgacgtgggggccgtatagctctagctccattctgtacagattcgtagagggccaacaaggagaagcagagctggtccttggagtcttctgccccaaaggggattccacactgccttagcaggtgctgcagcttctcttcactgtaggagccaatctcatcaagcttgcaggtgccctcctggagcagcctcaccaaggcactgccactgccaggtactggctgcacatccaggtttttgtctttctcagtgttgacgaccacagctcctctcatgagtggtgggaagaagggggcaataacagacgcatcaaatttggtgatagggatgctggcaggaaatgccacctgctcaatcacctctgtctccatcgtggcccaaaagtcctccacatttacctcattagagcccaggaattcaggccaggtgaactccacgctcttcagtgctagcacattctcttcactcctctgagccatttccactttgggggccacaccacagatgccacagatcatgtcattgtagtctcggacagtgaggcactcaaaggcccaatagccattgcacagcagctcctgcagctggctcagctcctccgaggtcagagtcttctctgtctgctcctgcaccgacttcagaacaacattgatggacactctggggtcctctccgagcttgatctgatttctgattgcaaaaagcaagtccaggcttaccagcagcttgttccccacattaaagagacctgtgtagatgtctatgaagctgtgcagggccagacaatgggggttcagacacatcttcacctgggcagtcactgtctgcagacggctggctgtcagcagccagcactcctggggcccagccagggagttttgtccccctttgaataatgggatgctacagagaagccaa

SEQ ID NO: 183056 - DNA, 1607 bp, Homo Sapiens
  misc_feature (524)..(535): n is a, c, g, or t
  misc_feature (1042)..(1097): n is a, c, g, or t
  misc_feature (1542)..(1564): n is a, c, g, or t
ttggcttgaaagtcaaaccacggagttagagcttgaaaatagaggaaagtcattatttaaacttctttgaagcataatagtgggaggcaaattcaaaccatgaaatgtatgctaaaaataggagaactattgttctgtaatggaattgcaaaaattgtaagaactggattttcccattttctctaggatgattgcactttctgtattgaacttcaagatttcataaccaagtttcaactactcagcaagcagttatgtattcgttttcaaggtctattttaacaaagtctattttaacaagctgggtggcctaaacaactgaaatttattcccatagttctggaggctgaaagtccaaaatcaaggtgttggcagggttggctgcttttgagaggagagagggaaggatccatttctactgtggacaacccagtctcttttcttaactcatagatggctgtcttttctctgtctcttcacatcgtcttccctctatgcctgtctgtctctgtgtccaaaattcnnnnnnnnnnnnaataaggacaccaattacattggattagggcccactctaatgacctcattttaactaagtacatctcccaacaaccttatttccaaggaaggggtaattctgaggttctggggttcaggacttcaacatatgaattttcggagacacaattcaacttgttacaccctgtaaatccgaaaaagaattccctgaaaggaacctaaagtcacttagagtttatttaataaactcaaaatttttagacgttagatcagtcctatacataaatagctgatctcataagtggttttaaggatgctggcgggaggttgaaattgtattggtggagtctcctgccaaagaattcaaagttggaagatgaagaattcaggccaaagtatgataaatatcaatgaaaataagagagatttcacagataaatgagaggaagtattacagaatgggtaaatatgcaagcccttaatcaagtctgggtttcaattctagctccgtcatgtatttgcagannnnnnnnnnnnnnnnnnnnnnnnnnnnnnnnnnnnnnnnnnnnnnnnnnnnnnnnatagtcttagagtagctagccaagacctttagatttccaagtataaattaaaagactggtcaaatatgtctcccaaactacagttttcacatagcgagctttccaagtggtactgttgaagccctttccctaggacctaggtcagagggagcacaccccacccatccttcttgagggtaaatgaaactcataatataccaaaacctctctccaaaatgctcttctaatgtataactcctctcagtctctccaatcccctttattggctagagatgggtagttagcaaaggtcacaaaaccagttatctagtctcacacctcactcgggggacctccaccaaaattgagactaacctagttccattttatcagcctgctatactagcgagactgcagtgggatgggcatttcatatggcaataatagaggcaaagtaatttggagnnnnnnnnnnnnnnnnnnnnnnnatttgaaaatactcatgctctttgatctgtcagttccactttt

SEQ ID NO: 183057 - DNA, 1274 bp, Homo Sapiens
ttggctctgaaatgtaaataagcaaaacattttttacctgattatgtagttttttgaggtttatccgtctcaaaaaaattcatataaaagcggttatgtgaatataccatttttattctctcgtttgtttgccatttaggatatctccaatttctaattttccaccattataaataacactgccgtaaatgttctcttgtatgtgactttgtgcacttgagaaggtgtttcaccaggccaggggctggcaaaccacagccctcaggccaagtcggccacctgtttttctatagcttgcgggctacctgccctaagaatggttttcacagttttaaatgcttacactttaaatggttatagaagtacctgtctttattcttggccattcaggtttccttttctgtgaatttcctatccataattttcttacgaatttgtagtagttctttataaatttattcattcatccaacagatatttattaagtacctctgtcatgtggcagcgctgtaaataaagtgaacaaaacattaaatctctgcttctgtgtctcctacattctagtgaaggaaaacagctaataaacaaataaagtatttagtatgatgaatgtttagtgtaatagaaaaataatgcagggacagggaataagatatgttttagagggacatacttttaaataaggtgatcagggtaagccctttgaaaggtgacatttgaggggaaaaaaattctgaaggaggtaagaaggctagctatacaggtggcagagaaaagagagtttaggcagaagatacagcaagtctttaaagccctgaggaggaattcaggaaacagcaagaaggccagtgtggctggaacagagtaagctgggaagacaagtggaagaggaaatataacgaggctgcagaggccactatgaggaccttggctttcacctggagtaagatggaagccattggagcatttcaagcaaaggtgtggcatttagagtaacacccatcagcatggttgtgtgttttccctagtcacattcagcactgtggatgtaggcatacacaaagagatgactttaagctgggttgaggtttttccaagcaagaatgaagcaagagagggcaataattgttcatagaatttaaactgggtaaatagggatgtgagggtgaaatgaggtagggtcaaggattacagggtttcaaggattgttggagttggaaacaagctagatgggatgtagaagtcaaagaatgagatgcttgaaattgagactg

SEQ ID NO: 183058 - DNA, 962 bp, Homo Sapiens
ttggcagggttttccagagaaagaatcaataggacatttagagatacataagaggatgttcatgtttggaattggctcacatgattatagaggctgagaagtcccatgatatgctatcagcaaccaggagaaccagggaagttcatagtataactcacgctgaatccaaaggcctgagaattaagggagccagtgatgtgactctcagtttgaggttgaagtcctgagaatggagacttagcgggggtggaggtgaaagtcatggagtatgaaggcccaagaaccttgagttatgatgtccaaggacagagtaaatgtcccagctccagaagaaagagtgaatttacacttccttcgtttttttgctgtgttcaggccctcagctggattggatgacatccatccacattggtgagggtgtatattttgtactaagacttttgattcaaatgccaatcttttctggaaacaccttcacagacgcacccagaaataatgttttaccagccatcaggagatcctttagcccagtcaagttgacacataaaattctatatgataattagtactttgaagacaaataaaggataaaaggatggatagtgattggagtagtgtgctatttttggtgattgaaatcttttgtaagatggtattttagcaaatacctgaattagcaaagaaatgagtcatttgatatccttgggagagtcagcaggaactgtaaatgcaccagtgggaatatgaataagaagaggaaggagtgcagaatgtctggagcaagagtaaatatagggaatggtaggagaataggttcagagaggtagcagtttttatgtaaggggcaggctagacctagttgatgatacaatctttatagaccatggtcaagacttgggtttttactttgaagagatgcgaagtcatagagaattttgacagagttgccataatattacttt

SEQ ID NO: 183059 - DNA, 938 bp, Homo Sapiens
ttggctaacacacagtcatgggtgaaacatttcagacacctcaggcagcacttatggtttctaattgtgagaactacccttccatcaaacaaaaagggcaagggtgggagccccggctacttggttaaacattttttactacaaattcgcccagaaaaggtgaaatattttgttataaaactgtattaagcatggcctaagtatttattaggtatatgatctgtgtagtatgttccatcagaaatatttcttactagtgctttaagctccagagtaaacagtcatttaaaatggagttcactgggcaggtttcccctttaatctagatagaaatactctttatcagagatttaaggcactgttttgctaactggtaaataaaaccaaatgtaaatatgtaagaatgtttatttgttgcacataacttttttggtataaaataaatgtagaagttacctgtggaagttgtgctcccattattcttaaactgcagggttgcattccaaaagaactgaaatgaagtctttttagactcagtaggagccttatattcttgaagtcaatactgtaacctcatttctaaggtatacagggttgattctttttctcttaaatcatatgtaacttgcagaagattcagagtcctcagacctctagttcttggaattcctgtagtttacggtgtatgtgattgtcaagaattaatgacaaaaatgtgtcactgcctacagttctgtgaacactcagaatgtattaatgagctgtttttccatagttttactttagcttaccttgaatactccctgtataatcctctaaaaaggtagcatcggcaagaaagatgaatccgttggaaatacagctgagccatacttcacggaatagaacaagtgtgttctgtgctggagctcaagacctgtggaaagggactgccccca

SEQ ID NO: 183060 - DNA, 198 bp, Homo Sapiens
acaaaaaagtttggaaagccgggctcgggccgcaagcggggcgaggggttcggggagcggcgcggcctgggagacacagagccttcaggcgccggggcgggggcacaggcgaagactaaggcggcgccgggccccacggcagcagccgcagcccaagcgagcgcagcagcgcggcggcagccgcgggagcccctgggc

SEQ ID NO: 183061 - DNA, 1323 bp, Homo Sapiens
ttggatcaaaatcaagcacatggagatagacatcatcaagcgagaaacgacgggtacaggccccaacgtgtaccatgagaatgacacgatagccaagtacgagatcatggacggggcaccagtgcgaggagagtccatcccgatccggctcttcctggccgggtatgagctcacgcccaccatgcgggacatcaacaagaagttctctgtgcgctattacctcaacctggtgctgatagacgaggaggagcggcgctacttcaagcagcaggaagtggtgttgtggcggaagggtgacatcgtacggaagagcatgtcccaccaggcggccatcgcctcacagcgctttgagggcaccacctccctgggtgaggtgcggacccccagccagctgtctgacaacaactgcaggcagtaggcccccagggccgagaagatgctgggcacccacccagcacccccatctaccaacaccagcggctgggggcgggggcggaccttgtgaggctcagttgacccgttacttgcaacctgaaaacaaatcatgtttttgacttaaattcttttctctggagaacccaaggggcttggggtgggaagcagtctctccttgggattctgcggccgatgtgggatagaagaggtagcatcctggaagccagcctctctggggaacatgagcccccttcctcggggggctgccttgcgtcttagaggagggagagcagagagcacgcatccttggctcctggctctctgagcttcctgatacaggatctgagcatgtccctgggattctgagctgccaacagggccctgggtagtcacatcttgtactcccctttgctgtcccggaggtagtggcaggagttgggccagcccccactaagtggcaggggaagactcacgattgggaagctacctctttgggaatcttggatgtggtgatctcaagttcccacaggccacctccttctggccactcactgctgggacccaggcacctcccttctccatcctctctggattgtcagtaatgtcctggaacagaagcctgtgggatggccttgggcacggagaagccctggggtcagtgtcgtgcacggatggcggcagtgttgaacccaggaggctgaacccggcccacctcggaagatgagtgcatggcaaccgcctgccttcacgtcgctccacttggtaaccccaaggtctggagctgttctaggtattgctttcacgtgcccccaccagcccttaacaagagggcctggatccctgaagaaccaacccaagaaaggggccttgatccctccgccttgctga

SEQ ID NO: 183062 - DNA, 485 bp, Homo Sapiens
  misc_feature (251)..(263): n is a, c, g, or t
aaaccctaagggatgtagctttcctgctattggtctgttcaccatcattagttacgatgatgatgacagtggcagctaattccctgagcaggctctgtgtactgggcctgtgtctcaccccagcgctggcaggcaggtagagagaggagaccatccttggattccacgggctcagggcaaagtcctttgcctcggttatacagcgggccaagggcagccagggtctgaattcagtcctaatcatgagttcnnnnnnnnnnnnngttcgagatggagtcttagtacaatgaaagaagccagagacgacagatcacagtgtatgactccattcatatcaaatgtccagattaggctaatccataaagacagaaaatagattagaggctggataaaatgaatggaaagtgactgttaatgggtataggtttatttttggggtaatgaaaatgttctccaacttttttgtacaaagttggcttttatgg

SEQ ID NO: 183063 - DNA, 838 bp, Homo Sapiens
caggatatgcttctgggcctgacacccaaggcatccagacgctggccctggtgacccccttacctcctctcccccatgcagccagggtcttggcaggaagcagaattcagcccagatgattccaataaagagactttaatggaggaatgacttctagagagtagggtgaggggacccaacaaggaagtgggggacgcagaggccagcagcagcagcagacactctatggcagaggcactggggtggcaagggagctgggaagcaatgccccgtcttcctcctcttccctctctgccatcttctctgagtgcctcccattggctcaatcccactggaagccagaaggcctggggaactgggacaacagggaccaatacgtgtcagagaaggacagacgatggacctggtgggtgtgtggggcaaatggaggacctcctgtatacccccagcacccccaggcttgggactcttgctggcatctgcacctttgtagtggcagtgccctactggataaacctgtcagtccttctccacctggcaaactcctgcatcttcagtctcatttggacattcccgtttctgtacctccatcgtggtactcaacacacagcaatcaagactgcctgcccacgactctgccccctccctggaccaagctccttcaaggagtgaccccatcttttaattgttgagagcacgcagtaaatggcaatgtgagcaaggctagggtgacatgagtgaggcagtagcccttggtgtgagatttaagcgggggaggtaagggagttttgctagaaatcatagtaatcaagacaaaattattttgaatgctattatt

SEQ ID NO: 183064 - DNA, 1131 bp, Homo Sapiens
ttggggaaaagtgtcattccttctacttgctgcagagaaatccattgagaggacaggccctcgctgctggccatgtaccctttctgggtgcatgggcagagcctacctccctgggagcctgggtgcgccgggtggtgcagcttgggggaggagaggaggagggcttagcgtgcttttgtcttttcagcccctccaacctgtttgatcattttcctctgtggctatgattgctttaagtagtgttacttgtagattatttggaaaatacaagagagtgtaaagaagaccgtgtatggtgggcttctagggtcaggtccagggggcccggcaggggtcaggttggagccccaggtgcatgcagttttctctcccgcagcccacagagcagttcaacgggcagggcgccagcttcaacgggggcagcgtcagctacagccaacctggcctgagtggggtagggggcctggccgggaggatgggccgggaggctcacagggtgggcatatggagagagggcgaccgggcaggcacccctggggccgcctcctgtccacctctgttatcatggttcccagtgggtgcgccgtgaacagactccactcccatccaccctggcaatctgccttgactgtttgtgctcaaccctacagcctacccgttccatcccgggctatcccagttccccactgccagggaaccccacgccacccatgaccccaagcagcagcgtcccttacatgtcaccaaaccaagaggtcaagtctcccttcttgcctgatctcaagcccaacctcaactccttgcactcatcgccctctggaagcgggccttgtgacgagttgcggctgaccttccctgtgcgcgatggggtggtcctggagcccttccgcctgcagcacaacctggctgtaagcaaccatgtcttccagctgcgagactcagtctacaagaccctgataatgaggtgagctccgcctggcccccacctgacccccacgaggctctgttcctcctcccacactctcaaggcccgttttctgggtgtccacccatcttccctgagcagcctgacctggagctgcaattcaagtgctaccaccacgagaccggcagatgaacaccaactggcca

SEQ ID NO: 183065 - DNA, 557 bp, Homo Sapiens
cccaaaagcataaatctagaaaatgaaaaaactgacaaaatggatttcatcaaaatttaaagctattaccctcaaaaagacgtcattaagaaaatgaaaagaaatccacagactgagagaaaatatttgcaaatcatatatctgataaaggattcatatccagaatatacaaaaaattcttacaactcagtaagacaacccaatgggcaaaagatttaaaataaacacatcaaagaagatatataaatggccaacaagtacatttaaaaaatgctcatcattgctcattagagaaatgcaaattaaaaccacaataagcactttacacccactagaatggctataattaaaaagccagacaataacaggtgttaggaggatgcagagaaaatagaaccctcatactttgctggtgagaatgtaaaatggtactgccgcttcagagaagttttatagttttcttaagtagttaaacttaccatgttattcagcaattgcactcctagatatctatccaagagaaataaaacaatatccacaaaaagacttacatgcga

SEQ ID NO: 183066 - DNA, 455 bp, Homo Sapiens
tattagattattttgtggtcaggtgatggatactcttgaagttatgcataatgaggatagtacgagggagagttaggggggatttagcgtcaggatgccgagagggggccagagccgtcttataccagagctagggggtaggatggataggtaaaagagtcagaaaaatccagcgaagaaaaaaacttcataggtaataaataggattatcccgtattcaaggcctaggtatacatattataaaaggtggcctgtaaattagttttattaagttacatggtcccgtcattgatatatggttagcatggtgattaattggcataatatgaggagagctaaggagtggaagagaaataacaagggtaggcaggaggtcattaggagggatgagagggccccagttaggggtcagcgggagtgttttagtatatgatagccaacttttttgtacaaag

SEQ ID NO: 183067 - DNA, 1576 bp, Homo Sapiens
ttggggggaattttatggtaataaaatgattttgttgaattgtatgccagttcttccttctgtttttcaggctactgttggattgattcgaaatcttgccctttgtcccggagatcaggcacctttgcgtgatcacggtgactttcctcaaccagtgcatttgcttgttcgtgcacatgaagatacccctcgccgtacgtccatgggtgggacacagcagcaatttgtggtaggtaaattcttactgtgatgcctggctatctaaaatgaatgcatagatccaaaggatcctgaacttcgttctttggtcattggttccccccatccgtcttcctgattagctaatgactttgtaaataaataaataattacacatttctatggctgcttataaaatgatgcatagtgtggcccctctgatatttccttggacacgtcgttcgcatggtcaatcttacaaaggttgggttaggtgtttcataaagtgttctcatttaatttacacaaaggcccacttccttaggaagaggtagagtcataatttgagatcaaatctgtgtaatgtcatagcctcttacccttgcctcatcatgcattatgactataaatatttagcactccgttttattatcttttctgtgagttaaacttttttcatggacctaagaatattcagaaataagtagtagcatttctgtactcttaaccacaaaaatctcaacctgaagctttgatacaaagtttgtgtcttaaaagtagcttcattaaaagtatagtctaatgacatttctgatttctcagactttaagaccttattaggttagtttagaaaacaaagatggagcctaccagaacagatgttaggaatctcattttgctggttgctttgtgtatgtactcatattggggctttggctttcttcatttattactgttggtattggcccatctccatgaggtgacttaatagaacgttgagggcaccttttattttaaatctcttttctaggaagaagagagtttttgtgttcttgtaagaatcaagttatttataaaagctgctaaatgtagcagaataataaccccttttaaaactcaaatccagaaacaggagaaacagatggtacttacatattgcaaaagctatcttccttctatacatgaggctgtcagctgaatagtcttggaagagtgaggagtgaatttttctgctggcaactcggttagttttagcagttggtgctaaaacttggcaaagttttcaccaaatacatggaagatatacaaaaatagagggggcatgtaaaagaaaaacgttgacatagtctgagcattactttctcatcttctctttttatataccttttacccagaatgattggtgcccttactgtaggaaagttgtctttgggattcagcgctgtatggaagctctgttgcactgtgtatgggggaggggtgctgctttgaattagtgctgccaggaggcctcttttcagtgacattcaagttaatggaatccttcttccttcctgaactaattgcaagttacgggaacttcgggtatataatgtaa

SEQ ID NO: 183068 - DNA, 607 bp, Homo Sapiens
ttggagctacttgaggataggggcatgtctgaatctatttaatctcttgcacctgtttggcaaattgatgttttaagtatttaaataactaaagctctctctacagtacatactcacttttgatttatgaattggcaaaattcaacttttttccttgaatattcttaaagtgagatgaattccaaaggagagtgttctgtgtgtggccttcattgagtggttttctgttaccagaaagctcttggtggccttcctcttccctggtgtcaaggttgactgttataggaaatgggaggggagagggccgtttctgccacgcattgtcctaggttcttaacattatttaatccttataatgcaatgttatcctcattttacagatgaaacctgagaccaaagaacatgtaacacataaagtacattgcagagttaggatgtgaacccaactctgattctaaacctaatgctctcactctttcattcagaggttcagtcagttctttgtaggctgtagatccagagaagctgccgtagccaacaataaagttgttagtttttaaaacatctatgtggtaagttggtctggcacttaaaaatgtattgtttc

SEQ ID NO: 183069 - DNA, 710 bp, Homo Sapiens
  misc_feature (508)..(534): n is a, c, g, or t
acttttgtacaaaaaagttggctctatcggtattttttatttcatagtatgtcatgaacaattattctaggcacttgacatggaataatttgaaaaaatagagaatgagtcccgtactacaatcaataaataactcaaaattttttccatttttaggatgaagaatatgaatatagttctgttacgtaatatttgtgtttactgtgtgagacaaatgagttactgaatgtaaaaataattagtaaaactgccctttgattttggaatgtatgaagcaggcaaatgcccctaccttctatttttatcaatatttagataaggcagacaaataaattttaataagatatacagaataatcttgtatttgaagaatgctatgaaaaaagatagtttggaggagtagttagtatttggctcatataatgtgttaggtaactattctaagccattaaacatttgtatgcttaatacctaagagtttaaagtgaagaaatcaaagattcattgnnnnnnnnnnnnnnnnnnnnnnnnnnnttctatttttaattgaaaaataatagttgtatatatctgtctacagtgtaatattttgatatatgtttatgttgtaaaatgattaaatcaagttaatgtttataacctcatataatttttgtggtgaaaacatggaaaatagtctttatagcaattttgaaatacacattgtagtc

SEQ ID NO: 183070 - DNA, 910 bp, Homo Sapiens
cggagttatacttagccaccaggagtaaaaaccccaaaagcatgttcaatgaaaataaaatatacagcatgaatcccaatatacaaaaagttcaaaagcaagcaaaaattaaacaatatattaattaaggatacttttcatagcttgtaaaaactataaagaaaagcaagggaatgattatcacaaaagtcaggaaaagtgattacctctcgggagagggaggaggaggcaatcggagaggggcacataggagacttctaaggtactggcaatgttctatttcttaacctgggtggtaggtacatggatgttcactttattattagtatgtaaactgtacgtatacatttatacactctatatatttcagaataaaacattttaaagatactgtttaactcgcaactatccatcagggaaaggtttgtagagagacgtttactataaaagaagccaacacttaccagtgcttcttcatagggtttatatttctccagctgctgtagtgctttgttatagttctgaattactgactctggtattgggtcttctgaccattcttcatactctgcaaatgtggcctccatatctattgaaagatggattcagccccgtgggtcttgccattgggctttatcaacccaaacacagattaagccatgagactcaggtgccactagcccctcccacatctgtggcatggcagctcttactgatcaaattctgatttctgctgagcccaaacctgtctgtagaatctgtcttaaaacaatgtcccaggcaaccctcccagctaattaatcagtcaatgacactagtggcaacgatttaacaacacttacccagtgttacctatgttctaccacttcacatccactaactcattcagtcatcccactctacaagccaa

SEQ ID NO: 183071 - DNA, 1138 bp, Homo Sapiens
ttgggtttaacccaccggaaaatatcatttagtaagatgtaaaagattttttaaatctacacttcagtttatacatctttatcattatcaatactataagttactgtgagcattttagagaattccataaaggtactatgagtgtgtctgtatgtgtgtgtatatatagcattgtatttaatcatagactaaatttaatttgatatagaaatactactttacttgtacattaaggtcataatttctgctggactcttttatatttaattaatggggattatagtcttccttcataaatgcatttaaacctgaaattgaacaccagtgtttttctttttctacttatgggaagttgtctgcttccccctttagagaaaacagtatttttatattttgttaaaatattaactactttatgcctacacactatgctgtagatactgatcataattcttgggtgttcacaaacactcctagtgcctcttttttggcccgttgaaagtgttggtattactactttcactacagagcctttggccctctaataatgctgaggtgggctgatccttcccatttctgtcttcgggtcattctggtaggtcttctcctccactgtcaagtaagcaatcaggtccgtgacagggattggacatatgaacaaattaagtggatacacacagtgagaaagatacatgcattctatggtaacaactactgtcaataacatctgatgttacatgcacatttatatatatataattttaaaaactgaactatgagaagccatggtataaatgaatattgtggacatcatggacttgatatgatagaaatcaattgtcagcttgagaaagttgtttttaatctgtctaaatagttcatgcattactacagttaaaaatagtttcatttgtcttctatagacttaattttattccggttcagtataatctctgttaacagagtttcagcaaactgattggtcaaggtattaacatagcttctacttcctttacttaaaaagatgtggttttatgtaagttcttgattactgatgatcatcccaaattttgacaacaaaatcatatgtataaatttaatttctccctcttgttcatcatctttttgtaaaggtccc

SEQ ID NO: 183072 - DNA, 1212 bp, Homo Sapiens
  misc_feature (740)..(975): n is a, c, g, or t
agggtggcccctggctgacatgcacctcccttgggtgtggccagaccctctcctcctcgtaggctgctggccacctccaccctggctttagcctctgttctgtgcccctggagactcccttgctttgtacactaaagtcaccaggctgtgttcttgggggcagtggcctcaccacctgtagccccagaaggggacccaggtgcttctggcagggtctaatgaatgaatgccccttccctgcccaaccccacgcctcactggccacggtgagggcaggccctgagtctccagcctccagccctgtctagtgatggcttctcagcaagatgtcaggtccccttgatgccccaagcccttcagcccccatctctgcaggccaagcatcatggggctgagcaaagggccggaagtacctagtgatgaggatggtgggacacagccctgaccttgtgatgagggtggggggcctggggctgagcctcactcggtgggtagggcaggaatgggcgtatttgtccagggcaacaattgggacccaggatcctgggggagtgctagaaggggggttaggaggcccggtcagccactgtatcccctggctccccgctgagctccagctgggacctggcgttgcctctctgcctgatttttctttcttatttttttcccctcgagatggagcttcatgcaatctccacctcccaggcaatctccactcactgcaacctccacctcccagnnnnnnnnnnnnnnnnnnnnnnnnnnnnnnnnnnnnnnnnnnnnnnnnnnnnnnnnnnnnnnnnnnnnnnnnnnnnnnnnnnnnnnnnnnnnnnnnnnnnnnnnnnnnnnnnnnnnnnnnnnnnnnnnnnnnnnnnnnnnnnnnnnnnnnnnnnnnnnnnnnnnnnnnnnnnnnnnnnnnnnnnnnnnnnnnnnnnnnnnnnnnnnnnnnnnnnnnnnnnnnnnnnnnnnnnnnnntctcggcctgatttctcaacagggccgctggtgtggttctctcgccccgcctgatcatcagtttctacttctccttcctggggccagcgggagcctccctgggtcagttctggaggctgggtcctgactggatgtggccacacagtcagcccacaggtgcatacttgacactgcccaggaaaaagtgaaacagccccgccagggtccagcgcaggcagctggggaggcctgagccaa

SEQ ID NO: 183073 - DNA, 394 bp, Homo Sapiens
caaaactaattgagtacctataatactggaaattttacttgagctcttatgtaatgtctaatgacaattctgcaaattctaggcattctgtccctttaacagaagaaactcaagagactctcatttattttttttcttaagtcaggtgcatcttctaggatcaagaaaatatggtaaattccccaattacataactggtaaagaactacaacaggatttaaacctaactctgccgaagtccagagcccatatcctttgtgttactccagactgcctcttctaaagtacttttgtcttggaattgagtaaaagtaaattcatgagagaacggaggggagtgttcatttatattactaataatttgttttatttgcttacttaataatttgaggat

SEQ ID NO: 183074 - DNA, 596 bp, Homo Sapiens
gacaatagtgttaatatgattgtaaagctacttatttctctgagatataactaatgccttcattctagttatattttcttactgaaaaactatcgtatttccattttgcctctgaataaatgattcaataagcattgatatatacctcatgtttatcttgtctaaaaaatgaatctcattctaattttcggaaggttaccaaaaagagtttgggctcagaaggtttctgaaagcatctttcacttgttttcttacatttcttctcccatagtttggtcctggaatccctgtatcttctttctcatagtaccttaatccttgactttgcttccaatcaaaaaacagttggctttacatcttctatttactcacttagaataaagaataagaatagtagacatattaagaaaagtcgactgtagaacttctcttgaaagtcagtattccctggtacagttgccttggccaaatgttaaaaatgaatttgaggtttattatttcccataatataggttttgtctgacaacccaagtcttggaaagcaaccagacaaccactcataaagcccagtttcatgtagattgtgatggagcttg

SEQ ID NO: 183075 - DNA, 905 bp, Homo Sapiens
ttgggatactgttgggattcatcactgcttccacctggccaggagctcagctcccaccactttttgcctcctgtcacttcctgtcgctgctttgtgctggaacagcagttgacttcagcttgggccagcttctgtttctaaatagatgtgcccccacccgccccccagggtagcccatgctgcccctgacaccaggaagatggctagcccaagtgtttcagatccgacagaacactccgttgccaaaccaagacatggcattttctaaatgaatcagaggagcttttttcttggaacagggagttggtttgaaggtaaatacacttttttctttaacctgctgagcattaacaaagctggatcatcagcatattctgaccttctgaatccccaccatgtgttaccatggtgatgaggctaggcagagaacttactggagactgctttctgtaactggggcacaaccaggccctccccattccccgagcagtgacacagaatgcaaagggcactgcacacacccacctcttgggactgagggtcagttggcatggtagagtggacttccaaaaagaccagtgtgctaggctatgccagaagacagggaaggtgacccagtaaggagagttcgccttcctctcccatctcctcttcccccagccgacacagtgtgccccctctgtctctcccaccttcacgtagaagataggatttctttagaagtgtgtaacagtcctgttagattaccaagtgctaatagttaatatgtaatctgttctttttatgaaggcaaatcgaagggagagtgggttgagatttccagactccaagagatattcacggaaaaggttttgcaacaaggaagctgagattgacagcattcaccagttagttgtggggggcaa

SEQ ID NO: 183076 - DNA, 891 bp, Homo Sapiens
tttccaggcacaggcagaacatgactgccctcaggactacagtccacaggttctactccagccagggaaagtatggattccccagcacaactgggcatgcccccctcaaagtccaaagtccccaggaaggggctggatagccacagctggatcaggatcaagggtccagccctatttggggaactgaagccataaggggtgggggtcccactggactgacactcagagaccacttttgtgggtaaggaggcagtttggggatttgggaagaggccatgccaaagaggagtggccgggttcagtgagaggccagggcctcctggatggtacctgagaggtcagaggcgacccagcctcataccttcccccccatttctggctctgtgccagaccctcggaccagtgggggtctctctcccctcagagcttttccagactgtgctactgcagagccagagtcaagaccctggctgtgccacccactacattggcgagttcgctgctgctgaatccatgatcaggactgagagggagaaaacaggattgggatttctggggttgggcaatgacagctactgccttcttcatggttgacctcccagaccgggccatgtcttgctgcaactgaatccctggctccggaaaatgggcttatgccaccaccatgctgagcagctactgggagaaagatctgatgagcaaccatagggccatgtatgcaagagcctcaggaaacctctgccacagtgggaaaggcccaaacttctcaaagttacgtgggataagacagtgctcatcggaaaggagcgcacctggaaggctgacgtgcttactacttgtctcaccatctccatctcttccaccacttccaaatccaaactccgaatccaa

SEQ ID NO: 183077 - DNA, 736 bp, Homo Sapiens
  misc_feature (563)..(573): n is a, c, g, or t
ttggccagataaatgaaatgttttgccctcatttaatcctcacaagtgtgaggtagactctgtaatccccatttctcagatgagataacaggagtgaatccaggtcacatagtgcaaagcctcagtccagattcagggaatatcgctgatccctgtgctcttaaccactcagctggactgcttacatatagttacggagagaaaataggagagtcactgtaagaacactcatttggaaatggggagaagaggaagccctggccttaaagtgggttccatggtgagtcactgcttccccaggttctcctctgtgatcatcagcttacccattgtcttccatggctgcatgtaaggattcccattctgggggcgcacgtttgctgtaggctgaggggtctgaggactactctagagaagtctcaaaagcttgttgccaggctagaggtttctgtggcaacacccttaactagccagctacttgttgatctgactttgggtattgtaggactggtgagcaattccagcaaccttggaaatctgatccttgatctgaactctgctcnnnnnnnnnnnctcttagcaccaacacagcctattttctagttctcagtttactggctgcaatggtctggcagagattctctttcctgctccaatactttatgatggtcataatgcctcctgtggaattgcaatttaggcaaagtcacattctaaagtcatcacaggaagtcat

SEQ ID NO: 183078 - DNA, 1600 bp, Homo Sapiens
  misc_feature (79)..(90): n is a, c, g, or t
ttggattttcaggtcctctgggagaacttaaattcttccttctgctattacaattcttctcactcagttgcctgcctcnnnnnnnnnnnnaatttacttgtgactgagttgaagcccagcattttactttccttaatgatctgactttcataagttgataagtcatgaaatcattatcttacattatatgagatatgagataaatcataaatcatatgaaattgataactcatatgaaaaccaaccccaccatatgttcactgtctacttgtgtccatcttcgtcccacgcaccccacaaggaccttccccgccatgtgcctcaaacatcagttcctgactcagggcctttgtatttgcagtgcccgttgcaaagagcacaattctttattttatctgtggcttgtccgtcatgtctttttttccatgacacctccacacaggccttccctgcctgcctggtttaaaattccagccccttacccttcctcctttattcttctccctagcaatttccaccatgctgcctggtgtattttcctcatttctctgtggcttctacactagaaaatatttcccttttgttcaccactatgagtctagacccatgactgccatacagcaggcattccataaatgcacctgtggagagttgacccatgcttgttgcgtgacttctgtctgatttttttctgtgttgcagcataagaagcgctaatagggagaaccaaccttggctaaaacacaccaggctttttcacctctagtctgtacctgggctgtatcccttctcaaccctaaagctaaaaagtcattgtgaaccttttggtctgatgctaaagaagggaaaacaggtacaggaaatcccatgtggatgcttgcttccaggatttcctgccatgattccagaatcccacagctccaacatgattgcaaaagactccctgctcatttttcctcagcatgcacagcgctgtcctgtctcagttgcaactcgacagagccgcatttactccagaacccaatccacacacctgctcatcctgccccgagaggagtgcctgaagccaatagcagggaactagagcagacttgggtggatcttcattggatattaggtatcttgccctagataggcagcagtggccttacagatgctgacagatgatctgattagatgcacagttgctgggtggtgtctggggccagtctattggcagttctgggagtgggaactatttgggctctgcaaagatggtttcacctttaagaagggcagtatggggaggtgaagatggggcccaaaggatagaacatagtcaaagaagcagggccacaatgcccctttaattcccaagccctagttgggcagtgcttggtgacacatcccattacctcaccttagatcaatgtctactgagccatcattagctctgcttcctcacttcttcacagtatctgatggcccatcacatgctgctcaacatcttagaccaatgtctgctcacccattacctcccttcacctcataccagcactgtatctgaagcttcactattcttccttcagttttgggatattttgtgatacaacattatccc

SEQ ID NO: 183079 - DNA, 919 bp, Homo Sapiens
ctttgtacaaaaaagttgggacatttctggcgaccttgcagttctgaaggtgttgccctggacagggaagccgtgggggtgtgtgcccgagtaaccaacgtgaccgactggggactctctgatttctcccccttctttaaaattctcagtcgcagtggctgggatgaaagagggattgcaggggtacactgacaggtgacttaggagtcatttgctgataggaaccaggggtgggagaggcaagaggaggaggttatgtttcctttgaaaacaactccgaagtgtgctgtctagtatggaggcctgtgtgtgtctttctccccccacctccagttttaaacactatgatattgtcagttttggatttgaggcttgataacaatctttttcttccagtttttgccaaggagtgtactgtccttaatgtctgtctggtaccttgtctggggccccttcgttgtgtctacgtgccctccccaaggcccctcttgctgggttcagggcccagtggagagcactgtgccagcctggggaggggctgcctttgactgcatgtcctgacccctggctcagcccaggctggcccaggccctgcagggcgacaccactctgtgtccactctgcccctctgactgctgcccctttctttgacagccggcagagcacttctgcaggcaggaggacaggatgcaaggtgttctccaagaccagaactaaaagtgcccaacagcttgagaagagggcactggagagaggggcagggaagcgcccttctcctcggctgtgcttctgagtaatggctcccgcagacctggggagggcctggggagggtggccgcggtggttcctgatatcagtgtgtaaagtgcaatgcgtgctgctaacctaggagaaatttgggaaaatatttgtagttttc

SEQ ID NO: 183080 - DNA, 1391 bp, Homo Sapiens
  misc_feature (1104)..(1185): n is a, c, g, or t
ttggatatttttctctagtagttttctctcttggcaccgtcaggacatcttttcatcagagcttataaaaatagaggatttgttaacccttgtgaaattgctcctggttataattagtagaatgccttgtactttattcctctttaagtagttatgttcagatgagaaattaatagtatgagtctttattgccatccctaacccttagggcttttgactttgaagtgtctggtttttaaaaattgcattctgagcatcagaatgagaatcgctatttgtttacttttagatgcctgtcttagatgtcaagctgaaaacaaacaagaggactgtgttggtatgttgtaattttgttctcttgctttttcaactgaaggttttctctcagtagggatgtttgaatttgaaattaagattgactttatcaatacacaaaaataaactgtaaagcagtgatccattgttaatataaaatatgttggttctcaaaagagtttaatggaatgaacctgcaagtccttttattgccataattaagaagaattggttatatattccagacatggtcataataaacattttggtaatcaaaaattaaatattttctattaagaaaattataaaatcagaaatttgtcaaaacattatttgaattttggctatgttataggtcacttttggttctaataaggcatttcacttttcaatactcttataatacagtatttaactttaaaaccagagtagaaaaattctaagtctcaagtatatttttggaatgtggtttgtgtatcaaattttctttagagtcttagactacaaaagttgtcgtaggctaaatattttaggcagttcaaagatttttatgccctagttcttgaggtgatcaagtctagattgctatataaacatgtttatagattttcttagaataaaagattggctttgtattttgtgtttgcatggtgtacgtagaacacaaatacatggtgtacatagaacttcttaatattgattcttgcagttttgatccagttcttcctcctgaaacgcttagaatgtttcacccttgcttcctaccccctgtagccaattttcataggnnnnnnnnnnnnnnnnnnnnnnnnnnnnnnnnnnnnnnnnnnnnnnnnnnnnnnnnnnnnnnnnnnnnnnnnnnnnnnnnnngtcatatagctcagttgatcaagcaagggacagatgaatcccaaattcgagattgcattctagattgtgggatgatttcccttgttttaaagtttttctttcatgctgcttgtttaaaaagtattaatttgggaattgtgaggggcaggccactttctttggatcacagagagacctctctctccagccagccactttgaaaattt

SEQ ID NO: 183081 - DNA, 1042 bp, Homo Sapiens
actttgtacaaaaaagttggcttttcttttagaataaggaaacttaaaatctactttctaaagactgaacaaagtgctagctgcaaattatcttgaaatcatttggctcttttctagcatgtgtgtaatcatgttttcttctgattcctgaatgaccatggtagcattagtgtttagaaattgttcaggggaaaattgagctattttccatagtggctagcaattgctacacatccttagatactcctctctcccataggataaatgttacagcacacaaaagaaattttctcaattctgatttggaaaatttcacaggtgtcattattgtatatctaagcaataattatctgaatgttttggcataaaaaattataatgttctaacttgttttataagttgaatgacttttcagtcccttgattttatattgttgagtgataatcagactgatagtagcaaatctgatcatacattactaaaatagattgctgattgtctatttaacgaagacaagtgggtaacatttaaaatatataatacaaaaattttctctaacttacctttttccagaactacttctttaagcacttttcctattaatgcctattgttgattaaaaggtggttaattctaaccatcttttagtcttcaaagtggtgctatattccatcaagagcaataaagtttttcccaggtgtcacttattgtatatgttaccaaataccatgaattttctgccatagtactactatcaagcaccttgtcttgctatttacagtttcttcatttgtatatttttagcttttctaagtggaaatgtctacataattttgatcttgacatgattgaggatttagagctcttgtctttgtcttgattgcaatccaacgatagattaacttgattctcagggggaaaagaaaaactttattttatgagaattgtttggtctgttgaaactcactttcacctagaaacacattttcattgattcttggatctttattttatgtggtcatagttgactgctgagaaaaag

SEQ ID NO: 183082 - DNA, 795 bp, Homo Sapiens
  misc_feature (547)..(639): n is a, c, g, or t
cagacttccatctgctcctaccaaagtgctcggattataggcatgaatcaccttgcatgggagataaggacccccacatcaagccctcaagtcactgggatcctggactacggcactgctccaggcaggcctggttatcctgcttgaggcagcaatcctctggagcctatggaaatgcaactggctgtacctcaatgatgttgccctgagattctgccagtcgaggtattacttcaatctcctgagatcaccccctacctccagatccagggaggccaacgtgccatgcatccctggagcatgaaacccaggatgggccgccttccagcctcccacagctgtgatgcaagttgaacacatacagagagactgcatctgcactgggtggttttcctgagccttggggagcagaatgcatgaatcccaggtatctgccgatctgtatgtaacaaattcacttcatgtaacttactgtgtgtccgtgagattatctctcactcaactcagacacattggcaaccagtgtgcagtgaacctgcttcacaannnnnnnnnnnnnnnnnnnnnnnnnnnnnnnnnnnnnnnnnnnnnnnnnnnnnnnnnnnnnnnnnnnnnnnnnnnnnnnnnnnnnnnnnnnnnctcaagatcacctaccaatccttacagaatcagaatcatcatacaaactggtgaaagcatagtttcccctagaggttgggatgagggcaagaatgtcccctcttatcactactattccacacaatatgaaaggttccagccagtgaaataaaggaa

SEQ ID NO: 183083 - DNA, 502 bp, Homo Sapiens
ctcacatatctgtccaaccaataaacaaaaaagttatgatactcagggcaaagttttctctaactcctcaaaaggacttgaatttaggacatctttcttactgagacatacaaaggcttaaaagtatgtattacaatccaaaacactcaccactgtctaacatttctcctccaaatgagagcactaatagcctattcaaaagagtctctaattatgaatgtgaagttacaaagaatgtttttttgttcttaggtctatgaagataacacaaaggcaacaagtgaaaacacaatgcataaagtttcactttagtccccttataacagaaaacaagagatgaagataagagcacttttgctgtcctagaacttaaaatgaaaatctaagagagacccataatataaatacaatcatccctttggtatatgtggggattgcttctaggaccaccacatataaccacgtcagtgcatgctctgaagtacgccctgtggaacctgcg

SEQ ID NO: 183084 - DNA, 937 bp, Homo Sapiens
  misc_feature (243)..(266): n is a, c, g, or t
  misc_feature (388)..(408): n is a, c, g, or t
cctaggggacaagcatgggtgtttgatttcagaaatcagtacctggcgagatttttgtctcaaaacgactatttgaatttcaagaactgtgctgcgaagacactctgagaacatttgcaagtcaggggcattttccttgacccttgactgatgctatgcggagactgatacattttcttaatggacaatgttcaagccaggtacccatgcttgatctgtcttcacaccagacctcctcatatnnnnnnnnnnnnnnnnnnnnnnnntgtaagaaatcacatggctatttagtttcatgcacagttgcaatattttcttcaaaaataaaactctgtacaaactttgggcccgattcataagaaaaagaagtttgctattaacacgggannnnnnnnnnnnnnnnnnnnnggtctaaatttgaaattacttgcttcccaaattaaataaatttcatctcatttttttccctaaaccagcacccatctgccttttattccccaaagagttacctttcccagattagggggatggtatgtggggagcagatagcggatgcttagaaagataagggggaccacccactgctggtcgtgagaacagggagacagtgtgtgggggtgggacctcatctgtgtgcctggtatcctgagttttacatgtagatgcattcgcctatttgattcagaaaaataaactttcccaaatgtgtctgaaccacaagagcatacagtggaagtgctacctctaatctaaccagagcaccttcatggtggaagacacccaccaggtcatacaatgtgaacttttgtatctctgcagtggtttcaaggacaaatagtgtccaatgtattgggccatttttcctgctgtttttatactcaacttctcaaaatgaaaaaagcttttatttttcctttgacttatttgtgttgttctt

SEQ ID NO: 183085 - DNA, 877 bp, Homo Sapiens
gagcaatgcttttccccctatatagcgcaactttgtacaaaaaagttgggtgtaaataaaggcacctatccttacggggcttgtgggagggttgagggaaggactacagtctccttttatcttgtgtttatctttagttttagcaaacattctataaggtatgttttgtatcatattcagccacatgaaaaacacaaatttgcatttcgattttgttcacaaaatttgggacacaagtcgtttatcacttttaacatcctgaagttgaactggtgcagcagtagtatcgttatgcttgttagccttcataatccttcctaagcaataaaatacccatgtggtcgaatcccaggacacgttgaattacaagctccaagtttttccgctgcagcgtatccaagtgtgcttggaaagaagaacaaaattaaacatgctatttagagctttcagggctaactagattttgatgttgtcattgtagcaaatagttctagagtgtggaagaagttgaaaatgtttttatgatacagagatttttattgtactgcatatttaatgaattattttataaattgctgttgtgaagcatttgtgaatgacctgcctcctagctttcaatgctattgcccaggctgacttttattgcaactgttttatgatacagttttgcattgtatgtgtttactttttaaagaagcatttcctgggaggtttctttttctggttatgaaaataatatatgcttatggggaaaaattgggaaaatacaaacaagtatctagaagaaaaatcactcataattccagcacccctgttaatactttgtcttttcttacagtttccaaaatgtgcatgcctagtatatcaatgtggtttt

SEQ ID NO: 183086 - DNA, 1339 bp, Homo Sapiens
  misc_feature (63)..(91): n is a, c, g, or t
ttggcccaagtgctgggattataggcatgagccaccgtgcccagcctactttctaattaattnnnnnnnnnnnnnnnnnnnnnnnnnnnnncttcccaaatgagctgataaaaaaatgacgtgaggctgctttgccttcaataatacctagttttcagctgttccaactcgtttccaaataaaaattagctggaacacactacagtaatctcaaggaagggaaaattaggccttaaaagataccaagaagtcagcatggtacccaattgaaaccttttgaccttagtgggaattcattctatttgcactaaaagccttaacttgctgtattcaaagtccctcttaactgtgagtttctataaaactttactttttccactagtgcacagaaagagaaaggttatcttaatagtcggtttcatggaaatgaaggatgggagattaaaaggggggaaatgatttttactggcagctatattccctctctgttctatttgctttaacaaagggataaaacctggcaaagtgtacattattggaggactcaaatctgtatgtgacatgtcccaactactgtccgctaactagttatccaaattgtaaagctacagaagcccagttgaggggtaagtgtgcctggctcacacagcctgcaccctgtcacctcggcaatgagccagtgtggggcactggggacttctaacccttggattgctctttttgacctgtgcataccttctaattgtaaaatatatttcagaccgtgagtaccttgagatctgagcaactgtgttaatgaagtaatagcaatggtccacagtgaaagatgtgttggggtttgcaaaacaagcattccgtcacctctttaataatgtcacagactttttaaaagagaggctatcaagttgtaatataatctgtcatgttttatttaggaaggaaggtaaatttgtgcttgcacggggatcattttgtattatttttgctaatacccagttgaagctaaaaagcaactatttgaatcctgtgaattaatttataagaatgttaaacagctttggaaatacatgcatcttatgaatcatagccttatttagcaagatcaatgttaaagtgttgttatatggcaagtatttaacacattcacagtgtttgtttgatttcaactgtgaattgtcttacagtttttttcaacctagttgtttctatggacactgctctgaattgtacattgacttcattactaagaacaaaaatgttcatttttgtcccagtaattgagactgcttgtacactttcagaaaaatatgtgaaatttataatgattttgtagatactt

SEQ ID NO: 183087 - DNA, 976 bp, Homo Sapiens
tgattgtttactgcagtttgaaaacatctgagagaaaaaaggcaataaggacccaaaataatatcataaaaatgtattcccatgcaatgttgtgtcttctctagagacaaactcttaatgtaaaaccaccatcagagccaccctggagttatggcaaggccaccacagtctcctccaaaggccactgatatggaactgggaacctccctccatagaatgctaaatggctgatgtgaacttgggttaaggatctataattcttcttacgaaggtaagcaagctatacaaatactgagaccaaacatcccagtcaaagcccatttaaggacaagcagaatagcacaacagagagctcgtagctccatcagacttgaaatctcctcacctcaggcatgccactcatgcagtgacaagaattaagaacctctgtaggttaatgttgtcccagacaaaacaattcagaaatgcaggagaaggggtttcttctccttctttggctacttatatggatgatccaagtttaaagttgtttaaatatttgagcttagtaataggcataatagtacattttatataaattaaatccccaattgttacctaaacattttcatcaaccagcaagaccagtgtctcaaaaagtctctacactaccttcccaccctggagtacagaaccactaggataactcccttttaaggctgagggttttatcaggagctctaaaactgcggtcattttccagacctcctgaagttatcaaaaaaagaagaggcttagggaaaactgagcatagttacttcttaggtcggggtctccaaagtgctctgcagatgccaaaatggcttcactttcaccccagacaacaatcatgaagcccctgagagccaagtgtatgagaccctccaaaggtgcctgtaactaccaaatcagacaccaaaggagctactttcagaaagccaacttttttgtacaaagt

SEQ ID NO: 183088 - DNA, 403 bp, Homo Sapiens
ttgggtctttctaatttattgcacaagagtttgtgtgtttgtgatgaatgaatatacacacaatgatatctattactgtattacatcagaaaaacaccctcagtaaacctgccataactgaagactatggcagtgtacttttattcgtagtgtttgaatgagaaagaagataatagataataaacaagttgaacagttaaatattctcatctcccctctaaaattattttgtacagcatatatgtattcttaaactcatgtagattacttggggctcacttttctagtttctcatctaatgcaggagtataagcaacattcgttgagtattttgtgtgccgctgtccttagatatcactggcacagaaatcaaagacatgctcttttttcttaagaaggttac

SEQ ID NO: 183089 - DNA, 1710 bp, Homo Sapiens
  misc_feature (190)..(218): n is a, c, g, or t
  misc_feature (301)..(330): n is a, c, g, or t
  misc_feature (634)..(665): n is a, c, g, or t
ttggcatgatctgaattaatgtcctggaacatgaattgaatttgtgaaataaccttggcaagtgggaaatggtaagcctattgccaaatgctgctctgttttatgagagtgaactctacaattgtgtaacaataagagacgttttgccacctttacgtgttttcataagtgttattacattgtgggtacnnnnnnnnnnnnnnnnnnnnnnnnnnnnnttaaccatgatttcccttgtgttttataaacagtatgactctatcttttaaaatatatttttttaaatgccaaggacagcaannnnnnnnnnnnnnnnnnnnnnnnnnnnnnatggctaccaaattagttcatgtgaaaagttgttagttcattctcattctgattacagtcaaaagcaataaattaacttatttattagaagtcagcatttgttgccaaataacaagttttatcatcaatttagaccttttcaaggggaaattaaattccaacagttgagtttgtacttgttaagcaattcacttttccttttctatctcttcatttcttatggcatgactggtttgaaatacagaatcatattttaagaaaacaccaagcttctgtcaatgttatgtatatggagaggttgggnnnnnnnnnnnnnnnnnnnnnnnnnnnnnnnncccaatgagctatgagccagttattggggaatactgagcaatgtcaaatataaatgtcttcatcaagtgtcattcagttgttctgtaactttattggaatcagtactaacaaagactttgtgtctgtctatgctgagccctagtatgatctgtgaacattatgttcctactttattcctattcttactcttttcaacatgtaaacaatagtgtttttgtgtttggacaaccattctcccttttatttttcagtccaaggaccttggaatccacctaagtagtctggcttgtgttgtatttcacagacaaataaccaactttcttctgctgttggtcagcagtactgaagaacacattttaatttttcctcttctctaagtctccttcattttgctgtttgcctcaggttttctttgaccttttccttattatttactgcctcatcactttgactagcttccttcttgccagctttctttagcttgcttccattcagcatagtaattcactcttaatccacagatctgtttattgctgtcttctgattgtggtagcacctactctgatctccataattagaaaataatgatgattttcatatgtaactttttaatcatatttcgtgtgttctctaaaaataatttgactacatttagttgttttgaaagtgtattccttttgtgttaatttcactggcattttcttcagtgatactgcttattaatttaatttgcttttaatttgaattggctctaggtgtcacagattttgaagtttcagtacatagatataacctgtattttcagaatccatgcaaatgagtactttaaagaattcatgatatttatcttcataactttgtcttgtaacttatagttttgaatatcatttgaaaggaatactttcaaaatttctaaccttagctttttatcttttaatttttgaattgtttcaaaaactttattcttaactaccaaatgacacttttttgatatgcagtttgccatgcagaacttgaattggggacttgttttcaagcagtaaa

SEQ ID NO: 183090 - DNA, 718 bp, Homo Sapiens
  misc_feature (503)..(553): n is a, c, g, or t
ataaattgccaactttgtacaaaatataaggacatgtgaggattagtgtgcttgaagacctagctcaagtgtctcttctgcagtgtagctttttcaagttgagttggtttccacctgctctgaacttcctccagcttacatccaagctccgagacggttgccaaaagaattgtcttttgcccttttttccgagccttattttgctcttcctgtatattgccacctttttccaggctcactgcttgcaagtaactctccactattagaggatccgcaatacaggaagagtagcagcaaggcatcatttttgagatgagttcatcttaaacaataatatatggcaggcaccaaactaattaagagccatggatacaatgaaaattaagacacaattcttatccattagtaatctactgtctaatgagggaataaacaagcatatgaatctccaatttctaatcccaatataagcaaggtcattctaggtaagtacaatacttagnnnnnnnnnnnnnnnnnnnnnnnnnnnnnnnnnnnnnnnnnnnnnnnnnnngatgcttcacacatatgtgcacctttgctggtaattatgtatcagccaataattcatttgcagaggagctaaccaaaaagagaaaatgtgtcatgttgatgtcattcaagaaagcaatttcaaaaagacgataaagtgcataatccctgatgaatatcaagataa

SEQ ID NO: 183091 - DNA, 476 bp, Homo Sapiens
atctataatgcaacttttcaaaatggcatttggaaaaatatagaaaccaaaacccagagaaaaaaagcatcaaaagcatgaaattataaactactgccaagctgaagtttagggagaagttaagaaacacataccttttactttctacatatatggcaagatatttcatttatagttgtgaaggtgacagggatgtgctcagagtttaaattagctagtaagacaaactgggtataaatgctgtatcaaccaggagcacagggccactggcaccattcaaaatgaaattcaaatatgtcttgacagtcttaattgcgtgactacataaaaagcttacttagaagagaactgaggcagaggtatgatatgctcttttaacatttcattagtaattcaattgcatggtaaattacagaatattcagtgtaaaaactgtaaacatatcctctccccgaataaagttaaataatgtccaa

SEQ ID NO: 183092 - DNA, 1047 bp, Homo Sapiens
agcaatgcttttttcataatagccaactttgtacaaaaaagttggctgcagaacaagctgcaagtggtgactcggacgtgatcaagtggtgactcggacatgatcaagtggtgactccgacgtgattgccttgaagttatgcatggagtaggatgactcaccaatcttcggggaataccggactagagtggatccccataaaatgagtgaagccataatatgagttagagactactgaaaaagcccctcctgatgatgaaggacctgtcattggagaatcgaccaaaactgacagtgataacttggaaggcacctgacattacctggggacagctaaagaaactggaccaacagggaactatctggcttgcatctatgggagcccctgaaactgcagagaaccagtttcttatgtatctgatggtaattgggggagcttctgagaaggcatctgcaaatggctctgtgctgccactcaaccaactatgaccagggaagaatgatagaagcttactttgcattggataatccacatgttctaagaattaaagaagggggaaatgtgaggggtgtatgacaatacattcaagcttatgtacaaggcatttgaggttgaggcatggaaaaatactgaggcactgtgtgtatgttgtttgtgcatgaaactgtaattccttgaccctgaaaataggacaaggaatagaatttgtaataaggagtgctgaacacagcctcctaagaatgtggtttgagtgcttttagatgttataaacaaggccatatgtgcctcatgacccgaccccaaatagccaccttgtagatgtttcttgtttgtctaaattgtagttcaactagccttctcaataaatacttggcagatgaatcttaaagcagcactgtcttggaggagctgctcccctccctttcagctgtaattgtctgaatacttatttcttggtgttcactgcagagcaagctgcagcaaagctgccggcattttattcatgcaaaattccagcttgcttatctatgtctgcgctcaatttt

SEQ ID NO: 183093 - DNA, 1042 bp, Homo Sapiens
  misc_feature (571)..(827): n is a, c, g, or t
agaacagtatgaagtgttaacgccaaaatttgttttagctatcatatataaatcataagcatattatttggttggttggtgttagttcattccttcaatcggatgatttaaaataaatgtttttcaagtatcctctgtgatgtatcccaaaggttagcttagaaagaaaagtacttggtgaaccattcctggtgcggagagccctgtttctgctgggcttctttggcttgggccgtttcaccatctggggtcctaaaagcaaaaaaaggtttttttatatggttttgaaaactatgcaagaagcagcttaatacccaccatcttttcagggaaagataactgcttgtttactcttcaaaaacacccaaatgggactggccaacattagtagtgggaaacaaattgtaaaggatggggctggggagggagtacctaatcctcatttggaaaacagaaggttcaccattgtttggttctccattgttcctttgagacttagtggttgtagctctaataatgcaggattaaccaaacctacagatcaagagactttgtttttattttttgtgannnnnnnnnnnnnnnnnnnnnnnnnnnnnnnnnnnnnnnnnnnnnnnnnnnnnnnnnnnnnnnnnnnnnnnnnnnnnnnnnnnnnnnnnnnnnnnnnnnnnnnnnnnnnnnnnnnnnnnnnnnnnnnnnnnnnnnnnnnnnnnnnnnnnnnnnnnnnnnnnnnnnnnnnnnnnnnnnnnnnnnnnnnnnnnnnnnnnnnnnnnnnnnnnnnnnnnnnnnnnnnnnnnnnnnnnnnnnnnnnnnnnnnnnnnnnnnnntgagccaccgcgcccggcaagaaaggattctttgtaagatattaaggcacctagagaaatgctgggtgcaagtgaacgcccctcccgggggagcccgcagtgcccggccaggtgcgtgggtgaggcgccccctgacagcctcaccgtgagctgcttgatgatgtcctctctctccttcaggcggatctgtggcggccaatgatctgaaggtcctc

SEQ ID NO: 183094 - DNA, 499 bp, Homo Sapiens
cacacaggcggctggcggctccacctactgcctttcccaggctgcactttatgcccctggcgccgccctcaccacatctgctctagctcaggctggtccagagcatgtctcagaaccgtgcagtttctagggtcaaattagtccaggtgtgtctttctggaggaccataatcacatccaagcaaaaccgcggctaaaacctcatgtcacacaagtggctcagtgttcctggcaattagggcttttggggcaaacaggaggatgctgggggctccccacaactttggatgagccccccatgcccgcctgcccctgcttttccactgtcctgggggacacccattcttcacaggccgtaacctactaccgtctgtcaccatcctggaccaccacattccccattcactgtcgtcttggaagacccctaaaaaactagaagttgtgtaaagattttggtcaacattcagtgaaccagcacagaagaaaaacaaattctccaa

SEQ ID NO: 183095 - DNA, 931 bp, Homo Sapiens
ttggcattttatagaagtttaccacgcgtgatctaaggtgtgaagagcctctgcttgtcccctgatctgttcccgtcctaggtataatttattaattacacttcttcagtgtgtgtagctgtgcacaggaaatgaatcctgcatgctgttagcggcgagagttcctcctcagggccgttgaggcgtcgctgcagaggcccagccggaaccttcagaggccctgggaacacacagctatgttgccagaacatccctgaagagccgagagtctgctccggattttcaaaccacactgtcagaaatgctttgcaacgctgacattaagcattgctttgtgatggtatttaggaagcaattctgtctgagagatccttgcctatgtgtgacagtaaaatactgtcgcctctaagatctgccccagcagctgtttgctgaggagaagccagctctgtgagatccatgttcctgtgggctgagctacacggcacctccagagctcctacacctccttcctggtccttctgaggctcatgcgaagcccaggcatggtcagcatctgtggtcacgctggggcctcggtcacgttgtagcttcacatgccacagagcctgctacagggctggctgcatcctgcatcccacccttcccgtcactcagaagagagacccacgcttgtgtgaagatgaggaaggactctaaagtgttatgagagacaaataggatcagaaagccaggcacaaaactgtccagagaccgtgagtcccatctgtagacagaaattgttaaaagggactcaaatcaatatgccaaaaaagtaaacattagtattttatgagtaaagtgtaggtaaattgtaccgtatacctaccatgcaccctatactgtacatactgtatgtcttcttttcctgtgccactgaaagagggaaaaa

SEQ ID NO: 183096 - DNA, 975 bp, Homo Sapiens
ttggagagtttgcagagggatggggctgaaagtataaagggggatgaaaaatctataaaatcattatttttcttgaagaccagaaagtttagttgaaaaaagccaatgtttatgtattttcatgaagaaaataaatagaaataaaatcccaactttgttttcaaatataaaagtaaaattcagtacacattacttgaaaagatgactggcgcccatgaattctgcagttcttcggtttgtgcatgggcattttggtcttgatttctgtcattacccagagagtttaatggctatttacatgacatttagggtatacattagataaagtctgttttctgaccgatttttaaaaattaacctgcacatcccaataaaaatcatagaatttaaaactagaaaaaacttagaagtcatctagtacaaacatttcatttcatagatgagaaaaaatgtggccttgaggggttaggagacctatgcaaggtcaccacacagttgatgattgggtttttccatcataggggtgtttttatgtgcaccgactctaacagtagtgccccagtaatgggacagttttcagtgagaaagctattaaagtggtttgtgtcctgaacagtaaaacaaaatgacctatttttactccctttacagttctgaaatctagagtattgccattcatttatttcgtgatggacacctggagtctaaaaaaatttctgtcattacaaagccatgaataataggtcagagatccctgtggccaagtgggcaggctcttccagggtaacacaggtcataacttctgctgcctgagccctgggaactgttaaaaatacagatggttggtgtttcccatttgtctctttttcttacacttaagttcctttaccatttaagatttataaagtttcaccaacctccgatgagtgattctcagaatcactgaacatataattgaaaacactttataacccc

SEQ ID NO: 183097 - DNA, 930 bp, Homo Sapiens
ttgggggaagaaaagtaaaatcaagtgcaaagcaatcgattgagcctcaccagaaaagtccattattagattataagaactaatgagagaaagtaactatgagagaatcagataaattacttggcaattggactgggtctttttgaaaaacatccaatagtccatgaactatgttattagaataaatgaatgatttctgtaaataataatttagattctcttattccctattatcaaatgctgactaatgagcacaggtgattcctcaagattacccaaatgatctgatacaggattccgtcttcctgagcattatttcacacccatggctagtttctctgctacaggatagaggaataactcctgaggtaacttatcttaactctacctatacttgacctctaaaaccctttgggaatgcttgtgaaagatataccagaagaatactttattcttactttaatgcctactgcccaagcaaaactaatacctgttattattatgtcatttaacatgataatatcatgttcacctacaaatcctttactgattctctaagatagaatttctcagttttgaatcctcaaggcccttgccactttcattcccacagggatttctctgacttctattagtagtatttacaagtgtccaaagggactgtgacttgcctttgtacctcttgtaatgtacatgctttacttttttaactatggatatattgaatcaatgcctgtcgtcttgagttgaactttagatcatttatgggcaatgatgagaactgctacacaccttacgataaacttggtttcagcagtaaagtcatgggttacccaagacatctctagactctccagaatgtattgtcatggtattagagtattctaacggtgcctagtctgcagcccactcttgattaagcatgtgata

SEQ ID NO: 183098 - DNA, 1298 bp, Homo Sapiens
  misc_feature (376)..(420): n is a, c, g, or t
ttggattgaacatgtaaagaaagtggaaaaattctaagttgccatggatgtttggcatttttcctactatactaaaatctactttctgccccaagcaaaatggtttcagagattccaataaaagggggtggaagacagtgagagcagaggtctggaatcagagtcttcatgaaatgtatttgtattttaattatttgaatatgatcgacttctgtttcaccctatttcacttggcttcctgtggtaaaatacagctcctttgcatttcataaagcttgtaacttctgtaaatgaacactcacgtgttttatcttgttttactcatccttctacaaaatgataactgtagcagaattcagcatctatggcttaggtnnnnnnnnnnnnnnnnnnnnnnnnnnnnnnnnnnnnnnnnnnnnncttagaagagggaaagcttgagaataaatcagcaatgataaaaattttgttctgtttttggagttttcaaaaattctcataattttaagaaaatgcagaaagcattcatattcagaaaaggagccaaggaatagtgttagacaccacttcagatttatccaatataatatttacaaagtggtggctttttttcttagtgtaagttttaatctattggtattagcaatatctgcttttctcctgccttgctttacacagattcatgattttctaaaaactgatgttttactcaaattgaggtaggttcttttctactgtcttacataactttgggtgcatagaccaagattatttatacactgtaaaagtcgatggtattaaatccgctcaagaagtaagagaagtcagaggctaagtcacgaaaaacctttgtcaaaagactgtagggtgaatgtggtttttgcatccaaagctttacctgtgggtctaatatagattctgtgcattcatcttctgcagggaccatttcagtagaaccttttaagacacatgttttggaatacagtcaaatgcgtgctgctgtatgaccagcctatttggtaaggattgcccaaaacttctgtcttgtcagatttagatgtggagatcttattgaagaaattgcatgtacaacttcttccatgagttctgataggaacatgaaaaacatgcttctgataaacaaggtagacgtctgagtactttgagacactcatctactactattgttgaagtgtttctttttttgaataaaattttaaatagtattactattaccctaattatactatttatttcacagttaaattctttgcatctctcttgtcttttgagaaaaa

SEQ ID NO: 183099 - DNA, 1292 bp, Homo Sapiens
  misc_feature (433)..(739): n is a, c, g, or t
ttgggtgaaattttaaaaaccatcagaaatactgaatagggacaaagttttgtctttgaaaacacttataaaaatgaaaaacatccatggtactaagaaaatgcacagataatattcagaataaaaagagggattacaggcttgagccactgcgcctggcctctgaatggtatttctaatggactcatgggtgggatagatgagattacaagaattgcaatttaggatccgcaatttaggtttgggattgaaactcccctcccctcacccagtataccctaggactaaaggtgaatccagaatcgacagtactcatggggactaaaggccagcttcaaataatctcattccctacgtagattaagaagacctcagattgccggcacctctactctagcttacttgccataattaaagatgaatcttctatggnnnnnnnnnnnnnnnnnnnnnnnnnnnnnnnnnnnnnnnnnnnnnnnnnnnnnnnnnnnnnnnnnnnnnnnnnnnnnnnnnnnnnnnnnnnnnnnnnnnnnnnnnnnnnnnnnnnnnnnnnnnnnnnnnnnnnnnnnnnnnnnnnnnnnnnnnnnnnnnnnnnnnnnnnnnnnnnnnnnnnnnnnnnnnnnnnnnnnnnnnnnnnnnnnnnnnnnnnnnnnnnnnnnnnnnnnnnnnnnnnnnnnnnnnnnnnnnnnnnnnnnnnnnnnnnnnnnnnnnnnnnnnnnnnnnnnnnnnnnnnnnnnnntttttttaaaaatataatatatcatccagtgctttaaattatccctataatttttgtatacagtgacgagcactagtacaaagagattcgttgtctgaaaaaccaagaaaatcagcaaacaatagaaatagacccacaggagatctgacattaaaactatttaatatgttcaaggaattataagatggagaaatttagcagagaactagaagctaaaaaaagaaaaccctagaactaaaaagtacagtaactgataaaaactcactggatgatttaacagcaaactggacacagctgaaggatttgtgagcttgagaatagatgagaaaaaaatatacagaataaagttcagatttaccaaaatgggacatagagattaagatatgtcataagatacagggaaaagatcttataaatataaatggagtttcagaaagatattaaaagagaatgaagataaatcaatatttgaacagataatggatgacaatttttaaaaattaacaaaagacattgtagattcaagaaaggctatacatctcaagcaagagaa

SEQ ID NO: 183100 - DNA, 640 bp, Homo Sapiens
ttggcaaacaaaaacccccttatatatatagttaagttttgccacataaacaattttagagaaaatacctgacaatagttaatgattatttgttgtaggcaataatggtctaagcactttatatatattaacatttaatcctcacaactactctatgaattagctattcttattgtcctcattgtacagatgaagaaatagaggcacagagtggccaagtaacctcaagtcacacacacaagctcaacttttaagtatttaaatatacttcaaatatatttctaaaggagtctttaacagaaaaaagtactgactccatgtactttgctgctgcttttgtgatccctgttgaagtgacttcaagaagtgacaatgatgccaggcatttggttaagtatgatgtggtgagttaaccttaaaatagaaaatttggtcaataagcatttttattttggagccagagagctattttagggacctgctgcctggaaaggatatccttgggacagcagatcccttagttcctaaatgaatagctgcatcaccaacacagcttctcctgaccatggtagggccatcagcagggtaactcagcccagcttattaacccttctgttttctttccagctagccacagtgc

SEQ ID NO: 183101 - DNA, 747 bp, Homo Sapiens
tttcttcatgtgatatttatagatgatttgaatttgaaatgacttcagcttcttaaacttttgttgtccttataaaaatacccttgaatctggagcatggctggttccagtcttatgacagcatgttgcgtgaggccctgtaaaagatgaggagttgtccctgaggttatggggcttactgggaagagcacatgatctaggtttgaagacagaagacgtaggctctaccttggcatccataatgtgtgaacttgaacttgatttcacatctttgaatctcacttttcttactgtaagatggaagtggacgatgaatagtactagctgccatgaaggtcatagctttcccctcatcctttattgcaccccacaaggtaggtgctcttatctccttttgacaggggaggaaactgaagttcagaaagggtaagtcacttacctaaagctacattgctagaaaaaattgaagctaggatttgaactctgtttttctgtctctaaagtcagctgaaattgtttttccccactcatcatgccccttgctaatttccctgcctacctctgagattattgggaagatcaaattaaactggtgaatgggctttagaaaaatgtcctaaaagatacaaatgtgtaatagatcatgaattctcaatgaaacacgagcataaatggaagctccagaaaaacactcacaaacatctgtctgggtgcttatctgtctgtttaaatgaagtgaatatcaca

SEQ ID NO: 183102 - DNA, 964 bp, Homo Sapiens
ggctttaaatacatgccaattagcacacctaatttggaatgacttataaactgttactattttatgtgtttgaagcagtttttatggaacactaatgatttgcattggcctgaggatatattctcagacaaagcatggtaaaaatcaagttaatgagtctggtggttggcggtgatcaacagttttcctgtgcaatggggtttagtgggatagaaactgaggttttaaagacaggcatagataggcagaagagaagtcatcccctgatgtaactcttcacttcctatgtatcaattcctccctggttttttgagactgagatagggagactcttatggaatatctgtcctttcccttcagctgcctgactttcctgggctactggcctacacatgtgtaatcatggtcacctccacattcatgacaaacagaaggaagcaggaccaacaaactgcataccctacatgctaacctgaaactatagtgtgtgatagtattagtttatgagatatatcagaagttatatgattttagtccttttaaatttattaagatttattttaaaagctaacatatggtctattctatagaacatcccgtgtgtacttgagaggaagtgtattctgtttttgttgagtggagtattctatagatgtctggtaggttatgttgtttaaatcttttatttctttattgatcttctgtgtagttgctgtatccattattgaaagttgtggtattaaagtctccatctactattgttaaattgtctatttctcccttcaattctgtcagtttttgcttcctgtgttttgaggctctattagatgcatgtgtatttataattgtaatctcttcctgatggattaacccttttatcattacaaaatagccctcattgtcttcagtaactttttttgtcttaaagtctcttgtttattttgtctggtattaggatagttgc

SEQ ID NO: 183103 - DNA, 730 bp, Homo Sapiens
aaaaaggggggcctctggaggacaggaatggggagtaaaagagcttcccttgcaaaaagcagccccaatttcacaacagtcttcgggctgcctggcaagccttcctctcccgtcagtcaaatgtctggcttcccccacttggcattaatcctccccgccaaggagacagggtggggaaaggaaggaggaagccccttgatagagcaggtcctgctgagactgcaggggggccctcagacttcaccgattctaggatccaagccaggggcccccctcccgttctctgcacaggcgccaggatgggcgcgccactcaactcctcagcctggacctctgcactgcccagtgcgatgcccaatgaccttcactgggggcagctgcaccaccagccttggctgccctacaggtgagggctgggtcacttgggaagagcagggcaggaggaacctagaggaaggtgagctcttcagaacggtatggaggccagagaaagacaaagagaaatgatagaggcatccaggctggacgagaaggtccagtgcattgagctgtaggagcagcaacacacagccagctgcgctgagccggctgggacaaacctgagcagggctcagacccaggttcctgggccccgagtaccctggtacccaaggaaaaaagtccggagggcctgctcctggattccgctagttgttagaaaagggttcctctggctgggcacggtggctca

SEQ ID NO: 183104 - DNA, 996 bp, Homo Sapiens
ttggctggagagcgcaccctgctggtgcctccactgctcgtgcccccccagcgcccccgcaacgtgccctgcgtgactttccgcagcgcctgtcgggtgttttccactcagcagcttgttgcgaacgtctctgcgtcctgtggtttctctgtcacgctaatgattttggagccattatttcatacttttacaacaatgtctgttgctggacgtttacgtcataacagtttttcaacttataaactgtgaacacttgaaggtaaacttttcacattccttatgattttctgtggattaatttccaaatcgctcagtcaagggaatgtgtcttttagagccatagtgccccagaaaagttgtgctgatccccagtcccagcagcagggaggaggccgcctctgccccgtgtgtgtgacagccccaggcagttttcactgttgggagtgcagacagtgggtccctcagtgagccactaatactggaagccatgcgagaggctctggttattcttaggaagctcctggcaggctggcaaaccaatggtcaccgagctggaggtgggtttgtttctagaatctctgtagcacccagtttctcccaaagagttccaagccaggtggtctgcaccatggctctccgggagcacctgctgcacagcaggacgcgagtctgtgcttttgccgggagacagagacagatcgttataaagtcacttggtgatgaatgaggagaaaacccaaatcctggcggcaccggtgccttgtgcatgtcggggtctgacgggcactggtgccttgtgcatgtcggggtctgacgctggctccctgttgcagagtgtgactccagctgtgtgggctgcacaggggaaggcccagtaaactgtaaagagtgtatctctggctacgcgagggagcacggacagtgtgcaggtcagtgacggggtctgtgctggacgctggtggacccttcccaagtgaccatgatgtgaatggcccc

SEQ ID NO: 183105 - DNA, 1287 bp, Homo Sapiens
ttggctcacatctgtaaaaacaattttaagaattgcaaataaattacagaccaaagattgagtaaagtcaaataactgttagtaagttgaaggatattggacaggaggacagtatttcagaaaaggagaggttgacagtcatccacaaggcatagcctccaagtatactctcaaatgtatgaagcaactggggtgggcagaagacattttagaatgagggctttagtttaaattaaagtcatggtggagaagactcttgcttcctccaagtgtttgaaaacacaaaatgcgatatgaaaagaagaaatagaatttgtataggttgcattgatagaatgggaagctataatctttgaataaaccttacatctcaatatttaaagaaaaaacatatatatggagggaaatatagagaattaaagtacctagatgccatagcactgaaaagtaaagtactactcaaactactaatagaagactattggtcagtgttttctattatatttgttttctgccaggtgttaatgaaaaatttgtaaaatgcttcaacagtgttaataattttaatgaatattgaattgctgcatgtctagtccttgaaatggtcaaattctatataatgagaataacaaggtgagataatgcaattgacaatcccaaacaaatccagtgtcaaaggaatttttagttttggaagctatccctcataaagtcaacatcagagtttgcaactgatggtggcataacttgtttgaaagcactttacaagtagagcaacatggggctgtatgttaaggcaagaaagaaccttagtgccccgtggaccataatgacaggaaattttcaggtcttgatttcagttcttgcaatgcctatgtagattgaggatttgtgagaccttcagagtagcttcactttacccaatctctggccactaagatcaatgaagaaaagctgtatttaaccttccaaagcagtgattctttttacatgttcagttttaatgcataggattatagaaaccaaatcaagaagaaacctactacacctccttattttgaggaaagagagggttagcaaagttctcacttcatcaggctcaaataacatccgttttagattcctacaagacaaaatctaaaatatgtcattactttattgaccttgttaaacaagatcaatatcattaaactgaccaagatggaaattacaggacttgtaccagacttgaacttgtagcctaatgatacacatttttacatatttcttcaccatttagttttcttt

SEQ ID NO: 183106 - DNA, 383 bp, Homo Sapiens
ataagctcatgtcacaactcactcatgtcacatgacacaggtaactattacctccttgctaccacctctcttttatttttggtaatgtagaagaatggagtgagtaaagcaaacctgtagataatcccaatatcctacttttatctctataattgccctttccagcccttaaaccttttccataataaacgcataggaaaatgaatgaacacacttaaagctgttcagcctctggaatagatgttaatgagtttgaaaaagaacaaaaggccaaaggaaatcaatcaaagggcaacaaataagtcagttcaaaataagtgaattatttttccttttactatccaaaataacattatatggtatatgaaatttgtgacagtgtt

SEQ ID NO: 183107 - DNA, 1272 bp, Homo Sapiens
ttggcgtgactggaggcccagtctggagacgcctggaggcccggccatccatcccttccccaaccgctgtctttgtcccggagaccgccagtgtcctccgtcccacccggaacagcctattgccccgcccgcttgggaagcactcgcgcccaaatcccgccgactaacttctggggccgcctctctgtccactccgatcacctccacgcctcggcaccgccccctcgcagggttctagcaagtgatctcacccttgtgtgcacacgctcccgggtctctgctccctacactgactccggcaccaaagtgatcctccctcatctcttcccgcagctcacacccctttgtctttccctaaccctcctctccccacaacccaaaccgggtcacacattggcggcaggtgggctgggattcgaccatagatgggttttgtttcacttctggttcaaaaacctattgacttgggtgatgtcttgcacacaggtcttattagtaggtaagaaacagctgctcctccacctccaccccagccccatggagcttgctttttccaggccaccgtagtcctcaccactgccactttgcttcgaggtatctgaatttgagacccttgtccttcctgcgctgaccctcctctgcagctgccgcccctccctgtgtccttccaagaagtgccacatgcactgatctcttgtgtccccagatggtcatcatgggccagtgctactacaacgagaccatcggcttcttctataacaacagtggcaaagagctcagctcccactggcggcccaaggatgtggtcgtggtggcactggggctgaccgtcagcgtgctggtgctgctgaccaatctgctggtcatagcagccatcgcctccaaccgccgcttccaccagcccatctactacctgctcggcaatctggccgcggctgacctcttcgcgggcgtggcctacctcttcctcatgttccacactggtccccgcacagcccgactttcacttgagggctggttcctgcggcagggcttgctggacacaagcctcactgcgtcggtggccacactgctggccatcgccgtggagcggcaccgcagtgtgatggccgtgcagctgcacagccgcctgccccgtggccgcgtggtcatgctcattgtgggcgtgtgggtggctgccctgggcctggggctgctgcctgcccactccttggcactgcctctgtgccctgaaccgctgctcactcatggcacccctgcttcaaccgctcc

SEQ ID NO: 183108 - DNA, 1096 bp, Homo Sapiens
actttgtacaaaaaagttggcaaaattgtaaggcaattttatgaaacaaacatttatatcaatgtatatctatttcaaaactgtgggacaattattcattcttttcccaaatagagtaaaatattaaagagaaaaaaattcgagtgtttatctgttattactgtatattcagaaattacagttctaaggaattattgtcatcctctaagtatcagaatgtattccattttaattatattctccttaacaatagaaaattagaagaaatttcttgatcataagatgaatagtaatttgtaccagatcttgtccatcatttcattagattgcatatttttagttttctataaaatttgcagccattttccaaataaagtaagttataatatttttcaagtttaaaatggacctggttgaaaagagatttcattgattctttttaatgatattggaaaatatttatgcaattttattttttaaccttttctccatttcattagttatactattaactttgataatcacaaaactatgtggaagaaatcattctgattatattttatgaaagagaggggtagagtaaattttttaattagacaatgttgatatgcagaaatctctcaaaagaaattgcaaaggaaaaattacgttgagatgaaatgttgagaaataaggagtatcttaaaaacctaatttcttacactttttagggcaatcaacttctttccaaattattatttcatgctgttgtttccatgaattgtgtttttagcatagtatatacttttctaccacgttagcatttacactctaattactgaaaataaaggaagaagttggtgaataaaagccagggaaactgggtttattctcattttccaatagcactaatgtataatccctttaaccttccatatggtgctttgtgtgatgagtatataacattcatatacgttattagtgccttatttttttcacttgactttatttcttatctaaagagccatatattttttgtgagtgttctttggtccctctatttaaagtgctaaggagaagcatatctttagggatgtatataggctgcgtttgctac

SEQ ID NO: 183109 - DNA, 965 bp, Homo Sapiens
gatggtgatcaccatgcacagggatgagctgctgatggtacacttctctgagcgtgaaatgcatctacagaagggtcttctacgaggcagaagtggcacgtccggatgtcgggaacaggaactggggaggcagaaggagggatggaggcactgggtcactctcaaataccctgggccagtaggaagcccgattatccatggccacgctccacccccttcctggactcagttacccttcctccctccgtgcccctgggccccacttaccctttctactgtgaagcccaccatgaccagcacacctacaagcatatggaccttcattttggaattctggggagatgggcagttcctgaggggatgccctgaaaccccaccttcctgtgaccatgctccttaatcctaagctgcagggtggttttgacaaggtctgagcaggagctgctgtaaatgcagagctatattcctacttggggcaggatcctggctgggaaggaagttattacttggcaggagggacagcatgtcctcacccacaacgtctggttcctgagtgtgggagtaatggcccagatggggtaatacctgggcactaccgggttctttatccagtgtctacctttgtcttgcataccctccaaagacctattccctcccttggaaagtccatgggttagtatctatctctgccaccatgtgctgtcttcgtcatacaacagggccaatccccactgtgctgggacaacctggccaggaaatcaagcatccccatccttctgagatgagcagtctcagctccaccagcggcaggcacacacacatcactgagcagcaattccggaccttgtcccacctcgttccaccctttagttatactgactttaggctacttttcctttagaactaaaactaaaagatggagctgctgattaagccccttacagtataaacagacagtcatccaa

SEQ ID NO: 183110 - DNA, 713 bp, Homo Sapiens
atttaagtaataataaaactggtctcctgcatagccagctctgcgtgaatttctctttctctactgcaattcccgtcttgataagttggctctttctaggcagtgggcaaggtgaactgttgggtgggttacaacattgtgaattttactttgttgggtgctggatatttttgtattcctgtaaatcttgagctttgctcaaggatgcagttaagttacttggaaatagtttaagcctttcatctcttgcttttataatttgttaggcaattatagagtggtgctcagcctaagactgattgtttcccactactaaatgctctacccaatgccccatgagttatgattttctttccagtctggtgggaagaacaggcattattcctggacctgtgtgagcaccaggttctattccctctggtactttgtcctgtgaaccctgtcttgatctttatcgactctcatcttgatctccctaactcagggagtgttctagactcaagagcagttcccttttcccgtactggagcctggagactctctcaaggcagtaagcaagactcatcttgtttgtttcctgtatctgcttaatttttaaatttttttgtcattgtttcaggtgggaaggtaagtcagaccctttaactccatcctgcccagaagacttcattatttttctttctccctctccctgccttctttccaccctcttt

SEQ ID NO: 183111 - DNA, 1358 bp, Homo Sapiens
  misc_feature (675)..(690): n is a, c, g, or t
tcacccccatccctgcaaaccctatatatagtggtaactcagggacagataactataatacattctctcattcagaaaaaaaatgtgatactgagcaatactattcatgtataataatgatgaaatactgcataaacattttgcggcccatctccttgaaactgaagaaagttctgatgaaactccaattctagtcttcaggagaaactccctgtccagtctttagtacagctccttatacgagcttctgaaatgttctttttttgtccatcattctccatggccacatcctgtgtgggtactggggagctgttaaggttttatgctctatttttctacttatgcaagcttggggttggacagttaccctctgttttaacacccgaacaatgatatttgagccagatttagtatgattaataaaattcctctaaaaatgtagtcttctgattgatttgcttctggtaactacacccaaagttctttcttacataattatcaagcctaatttactgctttgctgccttgctcctatgccagttcctttagacctttatcgtagctatcttgaagccatctaaaataatgactttgaatggaaagaccaaacccttttcctgatctttgttgcaggacttaatctcaagggtaactatactcaagacctcttctagnnnnnnnnnnnnnnnnattagaagtcttataaaagtcaacttttccaacccttcctgagaaatattcctgtacactctcacttctgtgaagtatttcctgagtttctctctttagtaaaaccttactaaaagtaaaatgtaaaattcaacacagtattacttttgctcttttcaatcatttcctctggagctaatctaaacagataggtgatctgattttgaattatttcaggtgacagttttactaattactttgccactgcaaacatgggcctcctttttctagcctccaaatcacattctctaccacctgctgcatcataaataagctgatgtaacatattttaggttattgttttagcagtactccacttcttgtaccaatttctggactagctatggtcattctagctcctatacatataaattctcaaatctcaattttttctcttacagtaagtgcaaaaaggggtgtttctaattggggtggctgtcttccaagtactgtttcagccactcattcttctcttttctggctttggcatctccaatacatagttttgaaggtcaccatgctcaaaggcatcaagttgacgaagaaagagtaagggagaataggaggacttcattaaccctaaaaatgagcacatcatttccattcatatttaattggctagaagccaa

SEQ ID NO: 183112 - DNA, 1558 bp, Homo Sapiens
ttggcaaattgagggtaaaggaaagatgttatctggcaagaaggaggtaaatggtgacctttaagaaaaatagtttcaactgagaaattctcagagctttgagctcctctgagcatctttgtagctaccttctacgcacgttcttctccctgccaaatggtgcatacccactgcctctctcctcagcacccactaactcctaaactctctacagtctgtttctcgcccactcacaaatctacaacctgaaatgacatctcttgaagaaaaaaagttctctcccatgagagaaccaattcccatgaccctttcttgagcttgtctctcagtctctccagcagcagtgagcaccttcctttcttcttaatcccccttccttggtctccatggcatttcacaattctggtcagagctgaaactgggaaaggaggtggactctctggtggtgacaatagagagaatgagactgggatctgaacttgggtcaaccctgacctgtctcctgagctggtggactacatctccaactgctgctacacacttccatttggagatatctaaaacaaaagtatttcctctctcctgaaaaatgttctacctactgaccttcctacttctgataacactaccatcattctcttagttactcggacttcaaaatacctcaatgtcacctctaataggtcctgtcacctttaacagcccccttttcctcatcacttcctgccagtcagtcaccaagacctgtcatttctttattaatccatgggattaaaactttgacctcacacatggataatacagttgcctctaactggattatctgactcatgtttccccctcccccaaacctactggcccacaatgaccattttaaatcagaatctggccttggtctagcttcccagactgacaacttcctacctgttctccccacatgaaatctgtgctttggtcaggctgtgttcagtactgtgttcccaactgctttagcccacactgagctttctctcgcccatttattctttcatcgaatatttattgaatacttattaggtacctcttctgaaataaatgtttactgtctagacacactcatttggccttcattatgcactgcctctttggttaactttttattaccctcaagaaaatagttctgtatttaactgtatttagctatatttctgtatttgactgtatttaactgtatttgtgtatttaactgtttttaactgtatttaactgttttaactgtattcctgtatttaactgtttttaactgtatttgtgtatttaactgtatttaaggaatcatgtgtgttactctcacagagccatggtaaaaagtagatgctgaccactagcatcctgggagcagaagccagattatgggagactatagtttggagaggtggctagtaaaagcaacagatgcagaaggtacttttcatggagtctgcagccctattattaacattaaccttcttcactggttcttcttaaatgagcagaaagccctttagagaaatacaagctgcataaggccctttggttg

SEQ ID NO: 183113 - DNA, 880 bp, Homo Sapiens
cacctgccaccgcttgaggggtttcctacccgaggtaagcaacccctgcatggatggaacaagaaaatgatatcccctggacccagacttcctaacaaacatctcagaagggataaagggggatggtcagggtgtggcccctcccaggctgattcttttcaagaactggggacacccagggcaacaagacccctgtgagccagggtagctccagaagtccaagatggccagggctggaaggatcttttcagggcataaagtctgaacccatcccccatttcacagatggaaggcctgtggcctaaaaaaggaccttcctagggccacatagccttgtgaagcacaggctgggctctccggactcccatagaggaacaatggcaaccctgaattactgtgcgcagtcccagctgggctctgtgctacgatctccttgccacaaggaattctgcccaatgcctcaggaaaggcagctgccctggaagccttgggctggggccacagagagacccaagactggccaatatctattcggggccaaacaacagaaggtgtgaccagctgatctatgtggccaggaatagtgtcttccttgcttccaccctgcaggggagacggggccagggtgcccaggccctgccacagattgcttggggccccacagtctcatccttgcttggcaaaggctgagagcagagatctcacctgaaagcccagttgccgcgcatctcaagaccttagtcttggcccactgtggggcctgggctgcagcccagcctctctgagtagagatttcctatctttacaagggggggtcctggaggcaccaacctcatggccttcttgggaacagagaaagtgaaggggaactgagagccaa

SEQ ID NO: 183114 - DNA, 863 bp, Homo Sapiens
  misc_feature (352)..(445): n is a, c, g, or t
ttggcttataatgactcacatggccctttcccacccactccaacctcactttccacgattcccctcactctgctctggccatgctaacctgcttcctgcatcttgcatttgccaagaatggtcatgcttcagggcctttgcacttggcgttgcctccccctggaatgtggttctcccagctctgtccatggttgttgttttctcctccctggggtttaggaaaagaccccttctcagagacggcactctcaaacaccagcccctctatcggcagcctgtctgaagttctttgaagcccctgtcactctctgaaatgttctgtcttattcattaagtgattgatggtccctannnnnnnnnnnnnnnnnnnnnnnnnnnnnnnnnnnnnnnnnnnnnnnnnnnnnnnnnnnnnnnnnnnnnnnnnnnnnnnnnnnnnnnnnnnnnnacgggtctcagatgagagactgcctgggaggatgagctttgctggaagctggggttggaggtgttgatgggggaagggcccccagccctggctgagtagtgtgtggccagggcagctcagcctgtgcaggtgtctgcagtggagagagggggagggcacacatgtggaagcttcggaaagctgatttccagatgagctgtgggtggtggggggatgtgagggtgatttacccacaaatgtcctccccttggagccctgtgggcctgtttacaggagggcggaggctgccttggggcacagaggcagggccgtgagtcaccccatgaagtgggccagcttccaggccaggaggggaagcacagaataacaaatgggggtttcccaaaccctgcagcctctactacatccgggttctcct

SEQ ID NO: 183115 - DNA, 859 bp, Homo Sapiens
  misc_feature (630)..(644): n is a, c, g, or t
ttggagaaaagggtgttccttggtcactggattagtatttttacctagtggttggaaaccactaacagttctggaaacacattccttacaagcagttagagtttgtttggattagtccatagaacagaaacacagacccttaacagcaataggaactacctttgttggaggaccttatcatgagagatggcatcattctgtccatgcctagtttaaccctggctctgtcattgtctaatgagaaatattcttaggatttatgatcttagaaggtccttcctccctccttttttttcttaagataccacctatctacaaaattttttaaatatacaaataatatttcctctctggttatatgaagtaacataaagtcataaatatctgtggaaaggaaaagatgaaatattacacttatactgagggtcagattgagggcttcattagtagtagtgtctcctaaaaggaaaaaatttgcttaggactcataaggcaaaatagagaccttatctagtttaaatataattacatatggctataaaattatttatcttactattaagaatgatttttagttttaaagtgatgtattcaccagtgaattttttctgtatagctcatttgaaagannnnnnnnnnnnnnnaaagaatggctctttgcttttagaagaggagatgaagcttggtatgaaaataagggaatgagtcaatgaaaacttgataagaagataagtgaaagaatgtatctaattagaatatatagcctactgaacataaaggaagtttttgtgaccagtcttatgttgcagtgggggaagcaagggagacaatgagttgagcttgctttatgcttgtcctc

SEQ ID NO: 183116 - DNA, 735 bp, Homo Sapiens
aggatgtgccaagcctcaaatttctatctcatatcagacttctctcccagtctctcatattgaactgtctacttgacacctccacttagttatctggcatttcaaaatcaatatatctgaaactaaattcctgctaaccccttcaccagaaagaaaacatacacaaatcctacaaccttagcctttgccaaccatctcatttaatgacaattccatctttccagttgttgagactaaaacccaggagtcatccttgattcctttctttctgcagtaccctacttccgatctatcaggaagttatatttgctctgttttcataacttatccagaatcagtccacttcttacgaattccactaatttgactataatgcaagccacattatctcttgcctagattatattaatagacccctaacctgtttacgtgtttcctcccaaagtgctgggattacaggcatgagccaccatgcctggccagaagatattttaaaaataataataaaaaaataaccttttatcccatcatacacataaaaccactgttaatattctacaatattttcttcctgtactgatgtatttttacataatcatgatgttgaatgtaatgttttttcactagatttagtaaacatttttcaaagctgttaaatattcttcaaaaacatgatcaatggctgtgcaatagttcatgttgaaatcatccattacactattactagacaaattg

SEQ ID NO: 183117 - DNA, 1540 bp, Homo Sapiens
  misc_feature (754)..(835): n is a, c, g, or t
agacccattgacttttttcggtttgtgactcactcccagcagagtgggtgtgctgcttttatttttgaccaaggggaaggattatgacagtgagtttagagtgtgtggtcagggtgtgagatcacttcagaggtggtcccagagcgtgctggttttcccattgggtgagttgtttaactgctgccgcccagcctccctccccaagttccctagtaagaaggaaaacggaaggacagaacatggcctgacttcctgaaggggacatttttggttttgtttgactttgaggcgtctgaagtcgcctgaaatccccgaagctttcagggaactcccagggattctgacagttgcacaactgtctacatggaatcactgtaagagtcaggacaagttaggttatgctgtagtaataagctccacagctgagtgccctgcaataacagactcctttctcgctcacattacatgccttttgcaggttggcaagtgctctcttctcatcagactcaccatgtctaatattgccagtcactgtgccaaagggagattgagagagcctggaggatcccacatcagcatttaaaagctccagtcacttttgctcacagcttattggccagaactagtcatatgaccccactctacaaacaggagcagatgtaaaattctaccttgtgctcagaaggggaaagggctggaaatatttggcaatcagcgctaatggccagtgcaatcttcaagggcatagagcagnnnnnnnnnnnnnnnnnnnnnnnnnnnnnnnnnnnnnnnnnnnnnnnnnnnnnnnnnnnnnnnnnnnnnnnnnnnnnnnnnnatggatatgttcatgaagcttgcatttagtgaaagagccagacaataaacagacacaagagtaatatgatatcaggttgtaagcactttgatgaaaatcaagcacattaaggggatgaaggtgatagaggctactctttagattgagtagtcaggaaagacctttctgaggagcagacatttaagcagatctgaatgaagcaagccctttgtcaatctggacaagagtgtcccagactaagagaacaacaggcacaacagccccaaaaacttttcaagctttatgaacctgagtttgttcaaaatgcctattctgggacctgaccctctgattcagtatgtctggattttggccgggattttgcaagagactttgattcagatggctcacagactacactttaaaaatggggttacagcagtaaatagttaaaatggtgtgaccccctccacagacatttggaaaaaaatgcccttatcttggttagctatgaaacacaggtctccagtgctgcttcctttccttcttgggcagcatgttgcatgcagagctcagctttccaaagaagtgagtgctgcttgcaatgtgtgatgggggtcagtaatattttacattactagactgagagcagggaccatgacaaaatgttgttggaggatcaaaatgtgtttgtgagagaaatcccttgtaaagtgccataagtta

SEQ ID NO: 183118 - DNA, 438 bp, Homo Sapiens
acacacacatcctgaggcatcactcagtctccttgctgctcttccaatgctaaacggagtccctggagctgtaggtgcagcaggagggactgtgggcagccctgaagaaggacttccagggaccagggagtgggatgctcgggtctggggggtggtaggcaggcttggtgggtggaggtgggtctcacagtccacgtggctctggcggatcctcgtggcgtcttgtccgtggacaaactggtagcagctgcggcccaccagctctgagggccccaggtccatgtggtcgctgactctggggggtgacagagaagaggggaggagtccaagaccacggggttgggggagaggcagagttggctccagagtcccctggggttcacacccttgctgtaaaatgggtgcaataacagtgttggcaggcgcggtggctcacac

SEQ ID NO: 183119 - DNA, 516 bp, Homo Sapiens
  misc_feature (360)..(370): n is a, c, g, or t
aaatacctatgcaaggtaattttatgaagaaaaacatagaattatgaagtatactaaaatttttttaaacataaattattgaatacatggattatcttgaaagagttatttctccctttaagtaagatatcacagttttctgtgttttaaagattgattgaaaataacaaatagggtggggaagagacaaaattttcatgaaggtaatctctgtatgttatatcatttaaaaattttgaaaaagtattttttctatataagcatttaaaataatgttggatactatttgaagtttagaaatatttgcctaaacgctggaataatatgaagagttggtgtgttttaaatcagcagttctannnnnnnnnnnattttaattacaaatactttccaagactggaccttaagctttttgaagaccgcaggagttgaaactttgttttaatacacaccctactgggaatagcattacacagagtccacctctcatggctaagagaactaaacaggaaataa

SEQ ID NO: 183120 - DNA, 944 bp, Homo Sapiens
  misc_feature (255)..(406): n is a, c, g, or t
ttggtgaatacatgaataggggagtaataagtgaatgaatataagagttacatgatctcatggagctcatgtaagaattgtgatctcatggaacttacaatctgcatgttactgaataaaattaaagaaattctaatgggggaaaaaggagagagaagaaataaatccaaaaaaggcaagcacagaaacttgtgagttttccacataacagaaatgggttcagctaagaaaagccagtctctattaaaaacagannnnnnnnnnnnnnnnnnnnnnnnnnnnnnnnnnnnnnnnnnnnnnnnnnnnnnnnnnnnnnnnnnnnnnnnnnnnnnnnnnnnnnnnnnnnnnnnnnnnnnnnnnnnnnnnnnnnnnnnnnnnnnnnnnnnnnnnnnnnnnnnnnnnnnnngtagaaggaaatgaaggtaatgcagtatcttggaagcagagggggaaaaggtcgagaagaatgaggactgtgtaggactttgtagttgttgacagggatcatcatcatctcctttaagagttaatatacatcaggacccatggcaggaacattaccagttccataactggtttcagacagatgcaaggatagtgtgcagtgaagcatgtctgtgtatcatgcataattcacatgatgtaggcacttaagagcaacaccatttctgtaaatgacaacagaagagaaaaaacgaagaacctggtaaaattttgtcattgaaagttttgctgaagaatccctagtaaaggagcattgtggggcagtcctgcttcactcaatttgaaagccctagacctgtgtcctgttaaggtcagcgtctgctctgtgggtgacagcttaagtgctcattgcagtctgacatcagtcactactctcatatctttgatttgacttttatcagtttttaaatttggtttttccatttcaattcaacaggttc

SEQ ID NO: 183121 - DNA, 982 bp, Homo Sapiens
ctttgtacaaaaaagttgggtaaagtttagtaagtcattggataatgaaatgattatgtttctgaagaccatattatatttttaatttttagaggaatcatgccatcccccaaaaaatcaagaaatatttgaattttaaattataagttcatttgttaaaagacatttttacaaatgtctgaaaatcttaaaatactttacatctacctttaagtagtagaatacagagctgtaaatttccatgccttttttcctgatattaagttttatagtaaaaaagcaactagtgattgcacaaagaatataaaaatccactctttttacaaaggtgtgaatttaaataacgttattgattggaatatgaaaatagaccaatcatttaagagctttttagcaaatgattcaattcttactctttttctcccaagattgaaaagcataatgtatttctctaaagtaggaatctagagagcccctgtgagtggacaaatgtcagtaacacttgaacacatgagaagataagtgttatgttgtgataatttaaagttaaatttgctttttgggtaggatccctaaatagatgggatttttaaatagatgatatatagatgacaattgcaattgtcattttcattattttccctacagtaaagaacctagctctgagcagtgaaattgtaatggcactttaaaggaagtaagccgttaactgttctctagtggagcgatctccaactgttttggcactagggacgggttttgtggaagaaaatttttccacaggactgggggtttagggggatggtttcaggatgattcaagtacattacatttatcattagattctcataaggagcatgcaacctagatctcttgcacgtgcggttcacagcaggattcgagctcctttgagaatctaatgccatggctgatctaacaggaaactgagctcaggcagtaatgcttggcaccgccccccacc

SEQ ID NO: 183122 - DNA, 1520 bp, Homo Sapiens
ttggcaagctaaaggaagcagagtctttaatgagcatgctaattttctagttttgaggaaaaattgggtcctttaaatgctattttgcttatcgcatcagtacttttatgcaggtctcatttgactccgtgcttaggtagatgcgggggtgccttgaaaacttcattttaaatgatcttaagcaagaaatacaatattttacgaaacatttggagaatgtgaccgtctgtatgacccgtggaagccccaggttggctgttggtttggaaggtcccgagtgtaacccaggtgattctgatacttggcatgtgtgaatcttcctgatgtatgttaaataaactcttcccctcatcaccctttggtaggaaagccattagatgaaaggagaaaccaatacaagctaaaagcatgcgacgtctgtcccccagcccaaacagccttggttcatcagtttctgcagtaggagataggctgctgagaggtgagtcaagaggcagtctccattggatgtccccactccccgcagaatggcgtttccagagttaggcggtgtggttgccgtgctcaagcccatgctgatttgtacactacatgtctaacctatctcaaatctcagtcattaaaattagcatgctttagacatatatttaaaaagtaactatgcacagctctttatcccccccttgctgctgaagctttcttaaagagaaaaatcaaatttttattttttactggcactatcattttttaagtcctaaagatgattaacagacatttttatcatgagaagaaaaataaagccattgcaactaaagaacctaacagcatgaccaagttcgaagagtcatattatagcaacggaaatcgatggcgtcttagtcatctccccagtgtgccctgtccacggacaccatccacgtgcagtgcaaacatttggttccttttctgctctgttttgttttccctgcctgttgcgtgcaagggaagtgcttgtaaagttctgtgctacgagatttttaaaataaaaatcgcttcgcagcaggttctcacaaaataactggtgctagctcaagaaatcatcatctgaccatcagaaatcttgactaaaggtgttgcatggatttgggggtctttcggtttttggttttgggtctggcttttagcagggccaatgtttcccacaccccggcttcatgggtactgctttgccttctcaccaaggtgacgatggtgtgcgtggaaagagatgataccccaccgccccctcttggtccttccaccagcctcttttgggaacagtagtttgcagagcaagggatttttaaagcgctaaaggaaagaagtagcagagcttaactgctttgtaccacacagcagtagatgtgcaaggacggttgacaatgagtcgatgataacctaatttcattgagagaaacccagccagacttgcttctagaggtttaatcaccatgagatctcaaaccaagcaaagctggtggaaaactatatgatatccctga

SEQ ID NO: 183123 - DNA, 233 bp, Homo Sapiens
  misc_feature (65)..(181): n is a, c, g, or t
actttgtacaaaaaagttggctgtctcaaaacctcttatcaataatacaacaatttttaaaaatnnnnnnnnnnnnnnnnnnnnnnnnnnnnnnnnnnnnnnnnnnnnnnnnnnnnnnnnnnnnnnnnnnnnnnnnnnnnnnnnnnnnnnnnnnnnnnnnnnnnnnnnnnnnnnnnnnnnntggataccaagggacaactatatgacctgtagaaaacttaaagaaaagcaca

SEQ ID NO: 183124 - DNA, 807 bp, Homo Sapiens
ttgggtgacttcttcacgcagtcttctgcaggcctctccagcctggctcccgagatgtcacgcatgggtccgtgcagcccagaaaagaccctgcagggggagaagggtcactttggtgcctatctccccagctggcctgtgggctgggtgcctggcagatggggctcccagggaggtgcccccatagacttgggctccacagcaggctgtggggctggcattaatgtggctgggagagcctggctgtctttttagccatttgtttcggaggccctgggggtcatacttgtgcttcctcgtgtatttttagatctcttatcaccgtacacaccacctccctatcagagggctgtcatattcacatatggtaaaataagacgcaacaatagaactcgagtcgtggttcggctttctaggattaggacaaggaggcaactttgatagtaaatggaatctttttttcccagccatccccaccctcaaagagtatcttgctgtaagacctagttcctgtaaaactctgtctgtggggtccctggccaggatgggtgggatcccagggaaagggccaggctgtgtgttctgaacaggaatggttctggaccaaccattgtgggcattcctgagaagccagggagcctggatcttgtcagaggagctcctccctctgctccatcctaaccccgcgggcagcagcaagaactgagagaggacacggtggggggcagcgctgcaaaacccagcagcgggccaccttccagcagcagaaagcatgagttttggttttggggctcttccatttccttc

SEQ ID NO: 183125 - DNA, 488 bp, Homo Sapiens
gaggccatggacggggcgaccattttaatcatggctatatccaaggctgcagccttgtttcctgccaggtccatgaggtgggcagctctcagcaccagcagccgtgcctgctcaatctccacgcgcgactgcgcgatgtccgccagcactgtgccctgctccaccaggggcttcccaaaagccaagcgggacttcacctgtcgacacaggagatgtgcggctgaggacatgctgggctgggggtggccacgagaggcgggggctggtggcctgcagagctgggtggaagcagacaggacagggcaggggaggagagtgaaaccaggactgtgcatcttctcagccaaggtgcctgtgtgcagccatgcgccatgtccagggagtaggtctgacacacaaccttcacgtgtgccacagccagccacagcccacagggtgcctgtaacaaattgcttccaagaaccctttattccagccattgcacccaa

SEQ ID NO: 183126 - DNA, 523 bp, Homo Sapiens
ttggtgaggtgatgatgggaaggacattcccactgggcccgaagtggtgaaactggtaaaactccctttgtaagtccctcttgttcaacatgagtgtcactcccatgtccctaaagtagaacggagttttattgaagagagaattttaagagtgataaacaaaagagatggaaatatctcctgtgccaggtcattgttaccattaaagactagaataaactgtaattttgcagattttctttttgtcttatgggaaattaaagacttggttatcctctctcggaggaagatagaaaactactgggcctgctcattaacagtttagcttggctgacatttttcaagcacttaccatggtattatagctgggctgaagctaggtggagcagacctcacttaggtgttgcctagctccagaatctgtcttctggtggaattcccttaggcttccagacaggagtggcaacaaagcagatgaaatggaaggtaggccagggcatctgctcgttcgctcgctcgcttg

SEQ ID NO: 183127 - DNA, 514 bp, Homo Sapiens
  misc_feature (178)..(240): n is a, c, g, or t
ttttgttttctacttaagtgtgatatattcagtaaacaatgcgtatagtttcccagtattcactccctgcactcatttttccctaactgtaaccataatttgaattttataccagaataagtttatattttcattaaaataaaattatattttcctatattttattccctgattggtnnnnnnnnnnnnnnnnnnnnnnnnnnnnnnnnnnnnnnnnnnnnnnnnnnnnnnnnnnnnnnntcataaaatcataaaacattaaatctggaagcaattttcaacattaaatgtgttgaaatcagtgcttacagtcaaagaatataaaatcttaagatgctggatttgttacttgttctagcacagagagaagctaattttggtgtttctttgttcatcatctgtactcactggttttgctcttcacaactagaagactttaatgtcatctagatacctcactaggaagaccctcctctttcagatcatttataaagacaataatcacaacagatgt

SEQ ID NO: 183128 - DNA, 246 bp, Homo Sapiens
tgcacacgtgagctcccaaacacatcgctccttggggttacactaggtttgtttccatctggcttgaggctatttgcaggcgagagtgcagagtctgtaatgaacctcccagattctctgacgaaggggtcccctaggttcccatctgtcaaatggcatggggtgttgaaatgtggggcactggactagatgatctcaaaggtccttttaaaatccttttaaaaacttttctgaaggactgtatgt

SEQ ID NO: 183129 - DNA, 923 bp, Homo Sapiens
gaacttaacagcagtgatgtgtgttgtaatatgcaactttgtaagttacatatcactccccaataccaccttctcagtcacggagtagagatcttacttcacaagaagtgagactcagagaggtgaagtgacctgtgcaaggtcacctattacagtgccagagttggaactaaaggaacttcagtctgtgaacttcagtgtctttccagtagcatatttgcagcagaagagtcaagaatgttgtgagctgcaactctcactagaaccaaatgaccttattgggagatgttagtccagccttaaaaacaagctcttcacctccatgaatggcaagtgtctgccctcttcaggccaaatcgagaatgacatctataactgagcaaatcctcagaacccaagtcagaccttggattattgcttttcagtaagttctggtcctggctgtgtctctaactcttgctgtgggaccctcagggaagctacccacccccttcaccccacctgaatgagatgatttctgaagtcctcagcagccctgattctaagcctcataaggaagagtaggtgttaatggcatcctagggcaatggtaggcgcctgatgcagatctgctgtgagccatgtgctggcatcacaggggtggtttattaatttcatttatcatctggacagccccttcttataacgtacatccttgcctcttctgaggctctaagatccccaagggtggctcctgtatccagaaaccccttggccttccctcccagttaagcaagatctctcttcaactcaggatgctgagagattgaaagtgaactacacacaggaacagccaagataggagttatttctatagcaccatgcttggctgatgttctttacacgagtgggcaaggattttaaaacagcgtttgtgcctttta

SEQ ID NO: 183130 - DNA, 776 bp, Homo Sapiens
ggattttgaacttatatgggaccagttacccctattttcttgcctgttttctcttttggagtaggaatttctacctgtgtctgtcccaccattatattttggaagtattatagtagacttgtttttgatttcacaaagctaatggaatttgctttaaatgtttccttgcatctcacccatatctggtttagacaagactttggactttcgacttttgagttaatgctggaaagagttaagactttggggaccactgggatggaataaatgtatttttaaaatgagaatcacatgaatttggggaggtcagaggtggaatgctatggtttgaatgtgtcttctcaaaagttcatatgttggaaacctggttgccatcatggcaatgttgagaggtggggcctttgggaggtgattgagtcataagggctccatcctcacaaatgaattcatgctaccattgagggagtaagttagttatcatggaggtggctttgtcataaaagtgagctctctgacagatgctctctgcccttccacctatctgccatgggatgactctcagcagatgatggcaccttgctcttggacttcccagcctccatagccatgagccgaataaacttttctttatatattacccagtctataatatataagactacgacaacttgatattattgatgttgatcataacagctaacagtttttgagtgttaaccatgggctggctctaatgtccactgctttatgtttcacagtggtcctaggatctgcta

SEQ ID NO: 183131 - DNA, 781 bp, Homo Sapiens
aaatgagtgtgagtgatgacagggtcagaatgtgcaacaaagaaggccaagtgtatgtgacatccatgtgtgccgtgggtggcttaggttgaagccaggccaggggagctagggggctccaaggcaagggtggagcgctccctctcccccttacctgggtgttgcccttggcagtggaggccatcaaaggtctggggcaggctgggatggtgcttatgtttgccaggcactctctggatgccatgtgcagagtgactcgtgggagcccatggagatggctaggataggggccaggatggggagaaggtagcagtggcaatgggaggccgtggtgaaggtctggagctgtgagggtggtgcagtccaaagagtgaaacgcacgtgggagggagtatgagctgttcaccccagggctctggactggggtttaaaggagaagcccacatttgtatctgagaagcatgacattggtgacactaggggaagaggctggcagaagagcgagctgggccctggacttcaggcccagagcttagagggtgcctctctgcaccctgcctgttgctgctgcgggctgacacagtggtcacatgaggcgcccacagaaccagggcctgctacctcctggagctgtggagctggggaggagagtgagcaggggatggatagggagtcccaggacagagactgatcatggaacgaactgtccccatcatggcagggctgcgtgacctttgagacgtgaccattttacttctcccaggaggagttggtgctcctc

SEQ ID NO: 183132 - DNA, 521 bp, Homo Sapiens
aggcttagggcttgctaccagcatgtctcccttttcgtttttgcaaagcgataaagacaaaggcagctttgtcacggtgggctacttctcgcaagatttgggatctgcatcggcagactacacaaagacagacaacacagattaaaagcacaatcatcattgaaatcacagagcctccaagtgtcttgatccactttaatgggttaatagctgctaatccatctgcagctccttcaagcacttcagttcctggcattagcgtcagatgtgcctgagaggcttgaaatacttgtttcttcagttttacaatatctaaagataaattttcccgtatgacccctttaaatgtctcctaactctttcccactcgtgctctgtttcattatacagatgagggagtaatgcaaaaatcaaagtattccaatcaccattgtaactgcattctgtatttagactaacctactcaatctcctagccacattacagtttgtcgggaaatcattgatttgattagctagttc

SEQ ID NO: 183133 - DNA, 779 bp, Homo Sapiens
ctttacccacttctcctaaacaacccctaaaaaactgctctgaaaagcagggaatatcattgtgcaaagtaagttgtttttttccacggggctgtctgcgtaaaacttgccacttagagccctgcctgcaccgtcgtcacggcccagcctgcaggtgagcttcctcgcgcccccgcctgacctgagtgcccctccctgagtcagacacagtgtcgtcgccctgcaggaagccagggggcccgtctgctgctcgtggccaggctgggccttggggtgcccgaccccctccagagcaagccccttagatgcccggcagggtcctctctaccctcccatcccctgggaggtttccccacactgtgtccagtgtgaggctgaagttgagatcatagcacaggaggctctggggtccttgaagaatgaggcgcttgatgatgagcaggatctgagtgctgcctggaggaggtttgaggtcatcaatggacaggcagcttgtcccagtacttggaacttggggcagcagagctgcctagctgggcacaacctgggccaccccacaaagggcaggagtgagaggggccaaagatggtgctctcaggccgcctggacctttttgtccagctggtccttgggcatgaggcggggtggcactgagggtgggggtgcccgtaaccggagtccatgtttgccacacagggtcgggtgtgctgacagccggctgttaaaccctgccctgctccgcgccaaaggaaagtgactgctgcccccagccgtggctg

SEQ ID NO: 183134 - DNA, 772 bp, Homo Sapiens
cactgggagtcccagtttgtaggaaatcattaagattttattatttgagctccagaacgagtgaggatgacctgataattttggtttggctcaggttgtaatgtgtttctgttttgctcgatgactactagaacagttctcaaactgtgtggtgggtaagaatcacctgggaacttgaccaagtgacatgtctacaccacccgcccctacaggctctgattggggggctgctgtggacccaggggttggcattcttaagtgctctccttggttctgattctgacaacccacccagcgcttcagaggacagctggactagatgtgcagtcagcggcgaggaccctgagcccggggacgggtgaggtcccagctagagggaggggttggggtcactggcatctccggtgtttagaaccaagagcctagaggaggggaccaggcagaggggctggtcccacgttgagccctgggtagccaagcagctggagcctacggaggcaaaaggggacagtgagggaggctgagggctccgaggctgtccccacagctggcaatgcagcccaaggcagggcgggctcaagcaagaggaggctgagggccggccaggcccacgggcagcatcgggctctggtaggtgctcacgtagtttttggagtttgggacagtccctgagctcattataagctcctgtgtggggtctgggaccccattttccttttctgatggtctttcattttggtggggactgacgacagactctaaagacaccctt

SEQ ID NO: 183135 - DNA, 914 bp, Homo Sapiens
ttggcaaaattctgaaagcaagtggtttatcatgtctgccctgtaatagtggtgggaagaaaatcatgagaacctctaagctgactcaggattttagaagcacacatttggggagaagggaaacaaaaattctggagaagcaaaaagtgtcatatggtatagaagttattttaagctactggggaaaattcataatttacttagggatcttgagtgtcaagcattggtttagagacaaatcttatccatttcgttgaaagttccttgatcttgtggctgaagcttgggcctagggttttattagtgtacatttaggggatggtttacagggtgtctttcaaggtcatacaggtgcctcttttggggtcaggcaggaggaataggacaaactctgggatacgaatgtacaaccatttggctcctagggcctcagtcctttagctccttgcttctggtgacttcttggagacaagagtagactttttcagaacagcgagatagttgtgctgacaaaacaaaaacaaaaacatcatttaagatgccttcagatgcaagtacatgtcataatagaaatatttaaaaattagtagagtataggcactagctaattcaaatgcttggttgtaaacaactatgtcttgtaaatgagaataaagtttattctctcaatgacgatgataacatctttctcactcacttttactcaaattggctttattgggcaggagagacagagatggagttataggtatcatgattgaacttaagctacaacccatctatgcatcaaaccatcatgtgtctcgtgtgattgttatctgttgtgtatattttgggtatatccctatctgtacataccagctgatatttctgtaagtaacagaacaatcagctctcataaaatattacctccc

SEQ ID NO: 183136 - DNA, 977 bp, Homo Sapiens
ttggcctttgtcagtttctttgaaatatcagtttctctggatgaaaaatggggataattatactgtcttaacctgcttcatcaggttgcttttgaaagtcataagaaaatatataaaaaatatgtgtagatacatacatatacatacatgattataaagtatattggggctagaaaggaagaagaaaagggagctaatatttattgaagtctaactatatatccagcatcctgcttagttccttatgtgtataattttacttaagctgcacaactgtatgaaacaggcattattatccacaagtgagaaaatgaatacaggttaaaatttatacaattttaagttgctttcttaaggtaagaatagcaagttatgaaccatctcattccagaccctcagtcatcaaatacctcttatgccctagatattgtgctatgtaaattagcttagatgcaagaaaaaatgaaaaatttcatctaaatatcactctttatcaaatatttaataaaagaaatatttatagccttaccaaatatttaataaaataaattaaagtcagtttatttttaaaatagcctggtccatgaccaaaatatcttagaactagtaatcagttcagttttgttcaagtagagagcagatttaattagtctatatcattagtttttctatcaagccatatcattttctaaattgttttctaagttatcttttatttctctctctctgtgtgtgttttttttaggtgcttttaagccctgtgaatatttactgggaagctggatgattcgtcttactgtgtggttcattttcttggttgcattatttttcaacctgcttgttattttaacaacatttgcatcttgtacatcactgccttcgtccaaattgtttataggctttgatttctgtgtcttacttattcatgggaatctatactgggcatcctaacttttccttgatgctgtgtcctgggg

SEQ ID NO: 183137 - DNA, 1340 bp, Homo Sapiens
  misc_feature (183)..(194): n is a, c, g, or t
ttggccccaccctacctcactttcagatctatccaatagcttcaaagggcaagtaattataatcatttgtgggaaaagttttattaaaaagtgacaaacttgaagctgtatatagtatgttctatttcagtttttagtggtgaatacagaagtcatcaaggtggtacttggtgccgctggaannnnnnnnnnnncctaggcagtcttgctctgtcatacaggctggagtacagtggcatcatcatgcagctggattttgacagcagaacttcaggcagtaattggagtcctaatgtcagttcttccttatggaggcctttatttggcctgagattttattcaactactttatagatgctgggtttattcatactatcgccagtttttataaaaatggaaaactagctcatcctttttgcaaaagaaagcaaagtggggagtcagaatgagaagtggataggggataactaaaactattctttactctcctttcattgcctttgagagctagctcttgcacacactgactttggcttccttagcgcataggtaagggaattgcctttccctcttttgtgaatattctcatttctgaaaaattctaagtcatgagaagataagccctatcctttcttacaaggattggatttcttgggtgacactgtggtgtggtggaagccagcggcttctttcaggttcataaaggccatcataacaacttcaggcttcatggtgtggacagggatccaggagagctgagtggatgtgtgaagtttctgatagattctgtcatcattccaaaggaatgtagtttcctccagctcaatcatttgaagtaatacacattgccaaatctgactgtaacctgacattttagacctattggagaaataggaagaaagcccctccagtggaaggactggacttggaagaagttctgcaggaaggtgcatgcaattggatagctgttcatgagtgaaacgtggggaacattgctatgaaattgtaaggtttgcacttcatttttcgtagtttaaaaattgctctgttctggctgttgaaaacacttggtgtgaggtttgaatgaggattatataatcattctagtattcataggaaaatgattactgctctctatttgtaaaacaaaagaaataactttcggaaacagtattttagacatgaggaaattgtttgtattaggcattttgatctaacagaatcagctaaggatagtggatcctggctttacacatttctttgaccaaacccagctggcaacttgaagttgttactgtgtggcttccagattgcctagaggtgaatcctaccaacatcac

SEQ ID NO: 183138 - DNA, 1477 bp, Homo Sapiens
  misc_feature (305)..(578): n is a, c, g, or t
ttggtttggctttatcgcctgctccacagttctttacctttacttggcttagagaaactgtatctttgttgcttcatataacctttccccaaccccactaagctggacataacttattagtggtcctcccgtcactttatttgtagaaatctctctttcacatgagcaggggttctttcatgtggtttagctgacagcagaactagtgattctagacattttgcatggccctcattcagtggctcacaaacatgagggagcatcagaactacttgaggggcttgttaaaacccagtgcgttagannnnnnnnnnnnnnnnnnnnnnnnnnnnnnnnnnnnnnnnnnnnnnnnnnnnnnnnnnnnnnnnnnnnnnnnnnnnnnnnnnnnnnnnnnnnnnnnnnnnnnnnnnnnnnnnnnnnnnnnnnnnnnnnnnnnnnnnnnnnnnnnnnnnnnnnnnnnnnnnnnnnnnnnnnnnnnnnnnnnnnnnnnnnnnnnnnnnnnnnnnnnnnnnnnnnnnnnnnnnnnnnnnnnnnnnnnnnnnnnnnnnnnnnnnnnnnnnnnnnnnnnnnnnnnnnnngtgattttctttggagactcctagattttctgtggttttgaactgaatttgttggatgttggcaagtgcctcttatgagctgtttctttatcctgcatttgccccacaaagacttatctggaggtgagcaaagtatgtttggtagtgaggtcacaaaggcaatcagccccttcctccccactcccattgccatcttctcagtccttctccctttctttccaagtagtttacccacccctcctctttcctcccctgtccctaaaataatccacgtgtcttcctaaaatctctctttgatcctgtcctttgataacaccgtcagtgcctactactgggtctagacagacctctgttgagcagtcagagtcttccctgactccacaatgcccctttccttggctgaccagtatgactactggtccccacctttcccttgcctatccctacctccctcctactaggttgtcccatccctctcttcacccattcattcatgaccatttttcactaccaagctccccccctcccgaaggaggctgaggtttttgtgactctctagactctattgtgggatggaatgaacattgctaaagaatcttgtgttcgctttactttaaaaaggtatttttttcctaattataaaactgatgtgtcagttacggaaaatttagaaatgcagcacaaatacatgaatattttaccacaaaattgccatataatatcttgtcttttttgggggtgtgaatttttttgcattgttctggtcatattctttatcatgtaatttatgttcttttttactaagtattatgtgtggttattatagatttttcacaaagatatattgctggtaatatatttttattgtggtagtctcataaattaacttaacttctttc

SEQ ID NO: 183139 - DNA, 736 bp, Homo Sapiens
  misc_feature (210)..(223): n is a, c, g, or t
gaaggggcataatttgtggatgaggattggatataaggtaaaggatgggacattcttggacttacagatggtgtgattgcctggctagaagaagaattcccggtcaaaaagaaaccatcagctttccaagtgtgaaagagagataaatctgtgaagattatagggactacaggaaacttaatctttttctttgaaaaagcaattgtagcnnnnnnnnnnnnnntttcttactgtcatctaaaattgacatggacatcttagtggactagaagttaagggcataaattctcccagtgatttttaattttagcattgtgattaacaccttctaaaattgccagaacttaataaataattgcttttcattattagtatgccatcaaatttagtagctgtttcaggctttaatgtgtcaagcctaaaatccagatttttgaggatcttctccctcttaaaagagtattcagttaactgccgtagaaatacacatgtatacaagggcactgtatacatcagtctaaaaaataaaaatatgtatacgttctggtgagtctagcacagcattgcccaatagaaatacaatggaggtcacaaatgtgacccatatagttaattgtaaattttctaatagccacattaaaaagaaaacagcacaaataaacaaatgagaaaatctatttaactcaatatattcaaaatatttcatcatgcaatcaatataaaaaaatttcttttt

SEQ ID NO: 183140 - DNA, 478 bp, Homo Sapiens
ctttgtacaaaaaagttggctaaagaatgtgagtgttacactttgatgaactgaatattttattaacttgtttgtttggaattgtgaaatgttgtttattcagtttccctttttagcacctgaaagaaaggcagtttaccatatgtatatctatatataggccttagtattcttaggatctcttttccagtcttcatattgtgcaagctcaagaatgaaatgcagtagttattcccaggttgtgaaaggtgtcttaggtcacttataagtagcagaggttggagaaggaatcaatggcccttccatgtggatagtggtatagtcttctgagaagatactgtatatgtcctactgcccacataacatactattttttatttttggaatatattcttccctggtttttagaataaattgcaaggcaggacaggactcatacaaccttgatgtttttaatttatgttattttttgagacag

SEQ ID NO: 183141 - DNA, 831 bp, Homo Sapiens
ttggactgaattgaatctacaaaagtgaaccatctcagacctttactgatactacaacttttgttttctgatggccaaaataccaaatgcctgttgtatttatggattaaaaactgcttataaaaccctgtgttactactcctactcttggagatgataatattctatgtggtcaaatatttggactcatttaggacttagatatttcagtgtacttgattttttaatttaactctttttcacagccacgctaagggtaaaaaggaataatttccttctgtcttccttttcaagtatttctgggtaagggattcaaaaaactaaaactgtttttgtttgtaatataaaatatggaattgatctttccagggtcagagatgattaatgtttttgctatatacttttatacattattttcttatcaaactagttaacaagtatttttatatgtttgtaagcagatatgctttcatagcataccttgtgtatatgtaaagataagtatttaattctcactgttcacttttaactgacaaagaaaaacaagtggaaactacagaaactgtggtagaacttttacttgctggtctggtcttggttgtacccatctttggccagtcacataactactcaagaaaccttcccaatagagtacaacaggatgagactctgaaatcactttcagtattccctgctagatattgattgttatttcaagtattaagtgtaagcttttaatggataattagtataactgtggatggcatctgattttgtttttatttctgtggattgtgtttaagcaattcaatagtatgttcctgattttga

SEQ ID NO: 183142 - DNA, 925 bp, Homo Sapiens
gaggcccacacgtgttcatggctaacagtgaccagtgaggccgagcccatgggatgggcacttggcagggaaggctcactgcctttgtctgaggcagcatccacatggaggcaccagggtcgaaagccttagtctcagcctccgggcccagccagagcctagcccctgatgcaggcctggcccctcagcagccctggtagaaggaatcttctctcaaatctccaggcaagtcctcctttgcccacagccaggccgcaccccagcggggctggtgggtggtaagaagccccacgagctactgagtccatggcagggaagccaggctggggacgctggctggaactgcggccctaaaacctgccctcctctcaggatatcagactttcaaaggccaggatgtgctgagacgggtcccagtggctgctcggagacctgctggggcatgccctagggtcactgcctggaggtgttggggaagcgggcacctgccttgcctggagtgccaagagggagaggcctttgaagaggcctctgtgctggctgcaagatccttgtcccagccactgccaggcagctgcacagggcagggactcatcccgtgccatgcagggcccctcgaacaggttgggtgggggtggtatgtgctgtcccctcaaccctggcaaccctgcccactgggaaaggttatttcagatctctcagaccgtagcggggtgggtgagaggagggttataggaggtgcctgtggagatcagagctgggaaaccagcttctcagcctccttctccactcctgggcatatgaagcacagccaggccacccgcctccaaggctcccacgttgcagagctgactgacaccgggaagctcaggcttctgcagctagagaggacttctcagccatcactctgctttacagaagccaa

SEQ ID NO: 183143 - DNA, 439 bp, Homo Sapiens
ccctcccaatccccccaccccctacccaccaaagatgtgcctgtggaattcacatctttctattgacataaaatagtctatgtataagcagtgtaaaagtttgggacgacatataatgaaatatcaaaaaatgattctgtggatgagaaaggatgatttttctatctgaattttctaattttcctgcgatgaacctacattctttatgtaacagtgaatcatgacgtgtggaagggatttactacagtgtttatggtggttaccttgggtggtggctgtgaagtggttttcatagtttggtattttttccagtgttttggaggagacacatttttataagtataggaaaactttttgattatttttcaagtgaaaattagaaatcaggggatttttcaggccctgatctaaacaaatacgtaagatttcaatatgccaa

SEQ ID NO: 183144 - DNA, 827 bp, Homo Sapiens
  misc_feature (505)..(574): n is a, c, g, or t
  misc_feature (688)..(738): n is a, c, g, or t
ttggattggctttattcatgattctagaactggcaacaaatcattccataaaatagaataagtgttcccatgggctgagcagaggggattggctttatagacagagaagggctgaagaaagcaggaacaaggaacagtagcctgctagtcgtttcaaagatacttttcttgggggacaggcagagggagggacggggaaacagaacgatggaatatcagatgagttaacatgtcatgtaaggattaaagccaagggaactgcattccatggctactgaagatttcagctggcctatttgggaaattggctgttacctcttgtgacttctcagaaggtcagataactacttagtttgggtttggtgaaggggaacttaagcatgggtgactacttttattttcagtctggtctcatggggcctaatgcaggagcttaggcccgaaacaaaggcctcctataatattaatttgacatacagttctgttgttatggacacaactcagnnnnnnnnnnnnnnnnnnnnnnnnnnnnnnnnnnnnnnnnnnnnnnnnnnnnnnnnnnnnnnnnnnnnnnggtagcactcccagcacaccagtgtgctcagcagcccggaccctctcaagccttgtgttcaatagttcgtattgaggcttcattacttagatgactaatgaagattgattaaannnnnnnnnnnnnnnnnnnnnnnnnnnnnnnnnnnnnnnnnnnnnnnnnnnatgtggttgattcctccagcaaccaggctcatcctgaagaggccacaggatggtctagggccacacgctatcaaactcagtcatggctg

SEQ ID NO: 183145 - DNA, 1555 bp, Homo Sapiens
  misc_feature (213)..(249): n is a, c, g, or t
ttggccatattaaagctaaaatttaacttttgctgaagaatcagctaattcaggtaatccaaatatttgtggaaaaacatctggataatttattgaacacattagtattgtgttagctttgatcattcccatttcataggtttttattgtggaatagtcaacttaatatagattcactttcaatttgcatgtataaagtaatactcaataaannnnnnnnnnnnnnnnnnnnnnnnnnnnnnnnnnnnnttcttcctgtactatcagtaaaatcctgactatgagttttacttttgaagctaaaggataatgctggtaatctaattatgtacctcttacagaaaccatatgcagcactttaaaaatctttatttggtatattattttaggtggacaatgatttaagactcaaagccatcatattaaggtctaaatacattagtggtggggtttctcgaataaatgaggaagtgcacaaaagttcagcctgactgaaaattttaattgtgttttaaaactacatgaataatttcttgattcaaaatcagaactcttataaactaaatctgatggtgtccaaagaatttcaggtccttcaaagtttgtaaaagataagtaggggcctaggaatataaaaatttagacttttttagtaaatggtttacataaccttttgtcttaatttgtcattcttcatacacaggcacaagctaatcagtcttctctacttctagaactctaaatcttctcagtaatgtcatacaagtctaacaagaggaaaagcatccttaagtcagtctatttagataaactcttcaagtccctatataaggacgtattccactagcaagccagtaaatttttccaaggtcacataatcttacatgaaatggaacctttcatcttagacttcatcaaactcaattttttcccttctagattcactttgtgtttatgcatgcatgcacgcgtgcacacaattctatcagcagctgtaaactacccacatattttcttaatctcattttttcagtttttcttcatctttaaaagaggttacatttcattcctggtcaactcttaaaaagaattatgtaatgttgggccttcatattaaagagagagactggttataagatcctttacagtccattcattttattctgatgtctaaccagatagacactagcaagcaaaacttccctcttaatcctggaccaaatgcataattttactgtcactttcaaaaatctgttatgactgaatcaaaatccttttaaagaaaggaaaaagctccttttgtgtcaaatagttgaacaacatgaaaacagtatgagccggttaaagatagattgaatttttactttacacatatgaaaaacagtaagttttgactgctgtgtatgttattcatgttaatatgtgctcagttattcactattgttaatccacatataatcagttgctatccctgggttagacacactatggaacttgaaatgcacaatatttacattgttagaggctctatccaaatatctgcattcctttaaaa

SEQ ID NO: 183146 - DNA, 570 bp, Homo Sapiens
  misc_feature (322)..(331): n is a, c, g, or t
  misc_feature (395)..(404): n is a, c, g, or t
ttggatttcaaatagaagcccatgcattttttttctacatatttctgccagcccataatcccaggtcgtcgcaatttgaccagtgaatagacaggaggtctttgcccggaagatctctcggtttcaggtcccttccagttctaatgtgccatgagcctcatggtgtccgtatggatcctgattctgtcaagcaatatatttattctccttcatgtcctcaagtttgatacacccttgaacagagggtggcaaactatgtcccatgggaaaatatgacttgctctagttttatacagccgttgagctaaaaatgattgtaaannnnnnnnnncaagaaaaacatgtgatggaaactgtatgtaagcctaagatagttggcatctggctacaaaaannnnnnnnnngccaacctctgttctagaagatttccattaagggtgccagaaatgcataggacagcaatgcagtgctaagcactagaacatgctctcacatggacatggttgcattttgtgcaattcttcagttgcatagaaatctctcttaaagaaactgttaacatcattccgc

SEQ ID NO: 183147 - DNA, 905 bp, Homo Sapiens
ttggcttactattttcctttattacatatatcttccttaaatcctgtattttaatgacacactaaataaagtaaaatctcaagaaatttattaaaatgatgtaagaattaaaattttagcgtacttttatgcaatttgctattaattacattttctacatgaaggtatagtgctgagacattcttttacctatgtctaacacagtgcaaagaaaagtcgaagtgtcaattatctgtgtgattgggccttcagaagctattttctaaaatattgacttaaagaaaaaactaattgttttgccccataccttcacttcattctcttatttatttttttgacttcatttttgctacctggataataaaatttctattcatgtcattgggatttaatgtagcccagctaatatttctcatttgcctcacatatatgttgcatataaagccctgttcccaatatactatacttaacactagtcagagctcatccagttgagagtttcacagctactcatccagaaattgggtttaagaaaatgtaaatgaatggatattaatctttttatatatttattaagcattatcacaatgcatacaaccctactgtggttttaggacacaaattaagaaaaacagccctggtttctgacaccagaagttaaaacctaatagaaacagcaaacacgtccatatattttggagaattttgaagaacacaggcctgaataggctagagaaaattttaataattgcttacaagcacatgaaggattatgatgttgatgcattatgtaatgttcaacagatcttcactgagagccaattctatgctaggctcaattcacagacaagccttgccctttaaagcactctatttggtaactacagcttcattgctttaaagga

SEQ ID NO: 183148 - DNA, 877 bp, Homo Sapiens
ttgggctaagtcttgttattctagctggttttcctttgtttagtcttgttttcatcatgttttcttttgcttgtgggaatcattttctttcattgattcacactgttaaatattagtgcttggctttacacttgcatgaactttgaaatgttgtattttttgttcattgagttttctgtttctaaaaacttaattactcgattttctttatatttaaaaaatggaaatttcaaaaaactggctgcactgaaaaattacactgccttgaagtacgctaaactataccaactgtgtactaaattcaatctgatgataaaatataaaagtacattaaggagttattgtactttattgacaaaaatggaaggtgggaaatagtacattcttttaaagctttactagttcttcactggttgcctttgtaaaaacgataatcattgcaaccaaagtttcatgaagcaaaaatatatataggctaaattttaatatttttagcctcggagacttgatagaattttaaaaagagattacaatcttgtcatcttcagtattcatattcttttttaccagctgctgaataaaaagcccaatttttaaagtttcaaaaaataatagattctataaagaaattaagaacagtatacctttaaagggattggaaaaaattaaagatgtgtggccttttagcctgtttcttggaagtgcgttgatagagtaattagaaatatttaatatgatattgagttataaatcacagaatttaattagcaataagcaataagaaacagacatgtatatatatgtgtgtgttgaaagtgaaaggaaggggaaaatatatgccatagaaaccttttttttaaaagcatgaagcactttt

SEQ ID NO: 183149 - DNA, 696 bp, Homo Sapiens
acattccagctccagtccacactctgggtatgctttcaccacaaactcatttctgaaagtaaaagatcagttccaccagccatggccccaggaaggacaccctcaccctggtcctcttacttggatgctaccaggacagcctcttgtctctccatctgcaggttggtgtggttctgcaagccccagcgcagggcagtgaagcacaacgggaagaagacgcaacccactgcgaacagcagggtcatgcctgcctcagagggacaggttggaagacagaaagggaggttgatgtttctcctcagcacccagaacctagacaagaaaatgtggaagggaggaaagtttacaggccatgagctggttagagtcaggcccgagtctcactggaatctggactctctcctacatttcttcctttccttgtcgatttcttcttgttgagagcaaaacagtccaaggctgcacaggcttgtcgttctctgttcttccaggttctgccgcccacaggctgtttcactcatcctctccaccgggtgccaatatccctgagcggcaggcgtttctcccttttgcagatgctcagtggcttggccggagatacatccaagtggtgggtgtagcctgggggttcaatcctcctgtggcgccccagaacccggtgcctcctccaacgtccggcatctgatgaggatccaa

SEQ ID NO: 183150 - DNA, 753 bp, Homo Sapiens
tcccttgggagtcctaagcatccgacacaggtggctgtcatcaggccactgcttggacatcgccaaggtcgaggcgctagctgcccggcctggcaggcagcctcttgcgctgctggacagcttctagctgtgggaaaagctcacgaagggcctagaacagtgccggtcgcggggccgaactcggtaaatgtgcttccaagtgggtcaaaagctgcctttctagaacttaaacccactggtcctgcgtgagcccctggagccccgaaacacagaggcctctcgggtatctcgggctgtaatcaggcccctcggccctctccttccaggtgcggatcccggaccttcttcgccgagcctgaaccggcagacccctccccaggcccctgaagacccaggagtgagcaccaatgggggaaaggccgcggtcggggttgtccccaacctcggttcctcgggcagaaggggacaaagggcctcaggaaggcgtatcccccgccgcgatctgggctgtccccaccactgggcaagccagcccctgggacccccacggcgccagatgacaggccccccaggatcccctcaggctgcggcgtgatgggccgagctacgccggggacctcggggctcggagattcggttcgacgggtccggggtgcgatccccgctccgcggagctcgctcggccgtggctttacctgcgtgtgattgactacaggtgctcagctcgcccccagtctggccaacttttttgta

SEQ ID NO: 183151 - DNA, 1399 bp, Homo Sapiens
  misc_feature (488)..(836): n is a, c, g, or t
  misc_feature (988)..(1115): n is a, c, g, or t
  misc_feature (1156)..(1218): n is a, c, g, or t
aaactgatttctctattaagaatctgggatgttttcttcctattgttaacattaacataatcatcaagaggcttactgttacagaaacttgaaaatgaccagtttactttagacattatcacatttggttgactgaaactaacaagagtctttgaaggggaatggaggaagaaggtctcacaaggttcttctagcaaaatgaaaccaatcctcaaaaaacttaagaggaaatgataatcagattaaaattgcataaaaatttatggcttagagtcaatggacagacaaagaaaaaaatagcagaaatgaaaccaaatcaataagcgatttggctgataattaaaaaagaaaataaaattaacggaactctatctgagtagtactgagttaatacctgtgaagtgcttaaaacacacctggcatgaagttagtgcacagtaggagttagctattattattattgctatttagaactgaaaaataacccnnnnnnnnnnnnnnnnnnnnnnnnnnnnnnnnnnnnnnnnnnnnnnnnnnnnnnnnnnnnnnnnnnnnnnnnnnnnnnnnnnnnnnnnnnnnnnnnnnnnnnnnnnnnnnnnnnnnnnnnnnnnnnnnnnnnnnnnnnnnnnnnnnnnnnnnnnnnnnnnnnnnnnnnnnnnnnnnnnnnnnnnnnnnnnnnnnnnnnnnnnnnnnnnnnnnnnnnnnnnnnnnnnnnnnnnnnnnnnnnnnnnnnnnnnnnnnnnnnnnnnnnnnnnnnnnnnnnnnnnnnnnnnnnnnnnnnnnnnnnnnnnnnnnnnnnnnnnnnnnnnnnnnnnnnnnnnnnnnnnnnnnnnnnncctttttgaaagaatctgagaaggattggtattagttctttaaatatttggtagagttcagccatgaagccatcaggccctagggttttctttgatggaaaacttattgatttcatctccttacccattggtctgttggattttctatttcnnnnnnnnnnnnnnnnnnnnnnnnnnnnnnnnnnnnnnnnnnnnnnnnnnnnnnnnnnnnnnnnnnnnnnnnnnnnnnnnnnnnnnnnnnnnnnnnnnnnnnnnnnnnnnnnnnnnnnnnnnnnnnnnctttttttctgattttgtgtcttcttggtgtaactaaagannnnnnnnnnnnnnnnnnnnnnnnnnnnnnnnnnnnnnnnnnnnnnnnnnnnnnnnnnnnnnnctagtctccttcaattatttctgttttcatcttgtttccttccttctgctaactttgggcttagtttctccctccccccagttccgtgaggtataatgttacgttgggatctctcttgctttttgatgtaggtgtttattgctttaaactttgcttttagaactacttgtgctgtatccaa

SEQ ID NO: 183152 - DNA, 918 bp, Homo Sapiens
  misc_feature (105)..(414): n is a, c, g, or t
aaagttgggtaaacattaactgatttatttcatcctgagtgttatgaagaacaaacatgttaaggtatagtcagagatacataggtttaaaaacatatgaatcannnnnnnnnnnnnnnnnnnnnnnnnnnnnnnnnnnnnnnnnnnnnnnnnnnnnnnnnnnnnnnnnnnnnnnnnnnnnnnnnnnnnnnnnnnnnnnnnnnnnnnnnnnnnnnnnnnnnnnnnnnnnnnnnnnnnnnnnnnnnnnnnnnnnnnnnnnnnnnnnnnnnnnnnnnnnnnnnnnnnnnnnnnnnnnnnnnnnnnnnnnnnnnnnnnnnnnnnnnnnnnnnnnnnnnnnnnnnnnnnnnnnnnnnnnnnnnnnnnnnnnnnnnnnnnnnnnnnnnnnnnnnnnnnnnnnnnnnnnnnnnnnnnnnngtatcgtatgttagggactttttatgttttctgtgtctgaattttaactttttgtagaaattttttcaatactctgtaatcctatagaatattaaaactttaccggatagcgtaagaatattctgtaaattcatataattttcagtattgtctgagatttatgaaaaccaatatataaacactggctgtttaatcacagcttgatttagttgttcacccatgtttatgtgtaaataatcctgagttaataatagaggtaacaacaaaataaccaatgttaattagaaagtttcattttagccttttaaaggtagaaaaagtcttatgtttattaaaaattctatatttgtatcctttttctaccttgtggtttaatcaaaggaaaaagtcataaagtcatctttttaaaactgaaaactttcaaacagtactaatgtaaaaacattaaagagtctggttttacattggactatgattattaaaggaaaatgaaatttaaaattt

SEQ ID NO: 183153 - DNA, 1597 bp, Homo Sapiens
  misc_feature (777)..(788): n is a, c, g, or t
tcagttgggagacataattgtctatttcctcaccaatagctgtcaacatatctttctactttaagggcagatacacatggggagggaaggtagaaaagaaaggcaccaaggaaacaggccactgatattctaaaagggatatgagaaatcaaatgatccaaatgtttaatttttcagctaggaaaattgtggtccaaagaagttttgatttgttcaaaatcataggactaagcagaccatagctgatgaattctcatagttctatgagttattattatttttattttactgtagtgaatggcttcacataccctgtctgagaaaaccattcaaagaataacctctttgctccagtcattttgacgaaaggaaaacactgtataacagctaataacaagatcagcacattaggagaccttctcaaatggtggtcatgtaacccataatcgcacacactggaaatgcaccagcagtggatttgcccagcaggaaagatggtgggatggcttggatgctattccactaacacagtatttggtgatgtccacatggcacctaaaattgctaaaatcactttttaacaaaattaattcagttgacgaaaactatccaagccagtttgaggcattatataaataatagtgtgtgacaggcttaaaatttcaaccatcattttaaaaaggacaaaatcaagagaatataattccatcaaggtgtcttcaggaaaagtcagaaagacaccaacatttttgtctatagcagcttgtagcaatttcnnnnnnnnnnnnagtttatcaagaaaatgagagtctataaacttgccaagccagagtacttttttgcaacttgtaaaaatggttgtatttccttatcttagaaaatgatatgtgtgatttggtgacagtaatgacatttaaaaaatataactgtcctcattttacccttccatcggccaagccattattgggttaactggttatccaggaggagggggaaaaatgccaaaatcttaagttttacaaaactcccactgactaaatcactaattcccaataaataatgaagttacaaaaaccactgaatgtaattacaaaaaaagggaaaactgacccaaacatagactgctatgttactcaaagtttaaataaaagaaataaggaagtgtatgtgtgtgactgtatgaacactatgctccttctatcactaattttataaacataatgatttttttaagtacccataactcttaattgttttcagcctaaataggaatgggttagcaaaacatatgatttctattgtaaaagatgaaggttgactttcttctagaagttgtgatgttaatttgataaagcccagaggtcaccaatcagatccctttgagtttcgcaaatattcataagataattgttacagttgttgctgtcttctctttgtcaagttacattctgtctgaattttcaccaaccctctagtcctaatgccccgcaagcaccaccttttgacaataggttcattatttccaagtctctaaagtagctttctggtctttaagtacaaactgtctaaaataatttctaaggtatactgttaccaa

SEQ ID NO: 183154 - DNA, 1383 bp, Homo Sapiens
acaaaaaagttgggtctctgcccatcagttctttttctggtcagaatctgaatgtccgatgcaattggtataatgcaaaccaactgcaaaggtattttgaaagagaatgatttgaattccaaagatttaaaagaggcccttggaaaaaattcatgaaggcttcgatatatttacagaaatggccctctgcaaaagtcagaggggacgtaaggatgtctattatgccatcctgcagccatgcagagtgcctacactccccaaaacagcacctgataatgttactttgaggactgatgcagagtgcaagtataacctcaattttgaaagtattatttttaattgacacataattataacctcagcttttaaagacgaaacttcaaaataaggtcctattcaacctttgtgccacaaaaaactgaaattttggtccattttctttatagattcaatttgagaggcctttttcaggcatagttactctcaacaagaacctcctataaattatattgtcacaggaagtctcttatttttgccataattgccccatcatggcataattgcaggtatttcagctgccaacacaccaggccaaactgccttgttggagtgctgtgtttctagaccctttggtttgtctgcagagatctatctttagtggcctcttccacaatattttgtatgagcactggtctgttttctcagcccccactgtgggatgcagctgcctcctatgcccctccttcccttaggatgcggaagggagagctgtttgactatctcacagagaaggtggccctctctgaaaaggaaaccaggtccatcatgcggtctctgctggaagcagtgagctttctccatgccaacaacattgtgcatcgagatctgaagcccgagaatattctcctagatgacaatatgcagatccgactttcagatttcgggttctcctgccacttggaacctggcgagaagcttcgagagttgtgtgggaccccagggtatctagcgccagagatccttaaatgctccatggatgaaacccacccaggctatggcaaggaggtcgacctctgggcctgtggggtgatcttgttcacactcctggctggctcgccacccttctggcaccggcggcagatcctgatgttacgcatgatcatggagggccagtaccagttcagttcccccgagtgggatgaccgttccagcactgtcaaagacctggtgagcgggggctgagaggacagtatgggaggcccaagagctgcccctcatgctctgggtctctcctagatctccaggctgctgcagtggatcctgagcacgcctgacagctgagcagccctacagcaccccttctttgagcgttgtgaagcagcc

SEQ ID NO: 183155 - DNA, 698 bp, Homo Sapiens
tttgtacaaaaaagttgtccccgacgaaaccgcatgacagaatgacatctatatgcatatgaggcctacgttagttgaaagatgctataaagatataagggatttgttacttgtctttcttgaaatgttacagttggggtgcggttgcttctatcttctggacctctgcccattcagcatacagctagaggaatctttgggcagatccacattctttagcactagctaggctttgactccaaagctatctggtctaccttgatgttctgagcaggaaaactgaggacctcaagaaccattccaaatttctactcattctccctaagacccatagcagacccaggacctaaagaaattacatcatctctattttcccttggctccagcccactcttgtttgaacctcccacttttgttgttccaactacttcttgagatgaaggaagggcagaacattggccctcttcactgaagtcttcaccccttaatccagggttcaatttttagttcaccttagcctgtttgagattagaagctgggccttaacttacaggtgtgtccggcatcattcaatcaacctgttagatccagaatccagcactgtgacgctacataaccatgggctctgtccttccagttcctttagtgccttccctcactggtaggttcactctgagggcttccttccttgaactcca

SEQ ID NO: 183156 - DNA, 790 bp, Homo Sapiens
cgatacagagtaagcactatatgttgttaaataaaaaccaaggcatttctgggctgcagtaactggtctttcctgttgacttgttaattgtcctggatgatcttttgctttggtcatagatactttgttaatctgatttcatgttactgtgtctatgcccctgttcttgccttgatcatctctgttctgaaggcctttaatttgccagtttgtttcatccggtcctttacttttatttaccaatcactgtcagtagttaccaagcactctccagtagttattatttatcagtcactgtcatagcactttacatgcattatctcatctaatccattcactgtaaagcagaactactgtgtcctcatttttcagatgagataagtggggtttcaaagagataatcaatgcaaatatcacacaagcctagcacattaacaaaactgccttccaaatgagtggaatctgcagtgtttttgcttcttcagacctggtgtaaaattcctatgtcagcaccctaatgagacaaatgacatcctaattcttccccttggcttgccagtttgtaggtactagtttttcagaagttactctaaaatatttctgattgcagctccttcctaaagagcagtatgagcagcatgtggttatttatgtattcactcttttctcctacttctgtggtgacctggaacaaattctcttatgtatgtaaagattggacagcccacctgattccgatgtcacttagatacactgtttttgtatcagcctcttctcttagaaatatatc

SEQ ID NO: 183157 - DNA, 471 bp, Homo Sapiens
gaagttctaatctgtggtacttcagaatgtgatgtttgcaaatagggcctttgcagttcagatggggtcatactggagtaggttgggtccttaatgcaacatgactgatgtccttataagaacagaagtgacaaagacacacagagggaagacagccatggtacagtggaggaagagacaggagtgacacagccagaggccaaggtatgcctggggccactggaacctggggaggtcaggaaggaccctcctgtagaactttcagggtgagtaacgccctgctgacactttgatttcagacttctggctttcagaatggggagagaatccatttctgttgtttaagccacccagttgaaatggcagttccaggaaatggatacaggttttggcaccaggaagtgtggtgcttaggtaacaaatacctaaaaatgtggaaatggctttggaactgggtagtcagtagaggct

SEQ ID NO: 183158 - DNA, 883 bp, Homo Sapiens
  misc_feature (282)..(332): n is a, c, g, or t
ttggcttcctgcgaaagaggggcgctgccccgtgacctacacagactgagacacgatcgccatgaatggagacctctggaaaagctcaggagccgaggcccacggggcccagcagaggcctgaggggagaccctgggcgggggctgaatcactgcctcccgacagtcccccaatgcccgggctttggaggggagccgggagcttcccatctccttttgcaggggagggttgtcagtctggcgggatgtgcactgggggcactccaacctctgctagctaacnnnnnnnnnnnnnnnnnnnnnnnnnnnnnnnnnnnnnnnnnnnnnnnnnnnaaaaaaattggatacattttgaataaagcgattcggttccttatccggggactgggttgctccgtgtgattggccggaggagtcacatggtgaaagtaactttacagggtcgctagctagtaggagggctttatggagcagaaaaacgacaaagcgagaaaaattattttccactccagaaattaatgatcatgagctcgtatttgatggactctaactacatcgatccgaaatttcctccatgcgaagaatattcgcaaaatagctacatccctgaacacagtccggaatattacggccggaccaaggaatcgggattccagcatcaccaccaggagctgtacccaccaccgcctccgcgccctagctaccctgagcgccagtatagctgcaccagtctccaggggcccggcaattcgcgaggccacgggccggcccaggcgggccaccaccaccccgagaaatcacagtcgctctgcgagacggcgcctctctcagcgcctccgcctccccgtccccagcaccgccagctgcagccagcaagcaccgac

SEQ ID NO: 183159 - DNA, 175 bp, Homo Sapiens
gtaaaggcacatgccaccacacccggctaattttttgtatttttagtagagacaaggtctcactatgttgcccaggctcgttgtgaactcctgggctcaagcagtctgcctgctttggccttccactgtgttcggattacagatgtgagccaccttgcccagcgcatttatcacc

SEQ ID NO: 183160 - DNA, 680 bp, Homo Sapiens
gcgccacccacaccgggccgtctccggagctgagagactatagctcgactcgcctgctcgggtgggagtgctccccatccactcacccccaggttggagtccagggaagagccccccacccacccagctcagcgcgctatttgagcccagggacctgacagggctcccgccgcgcgcctagctggacttctgccaatcgctcctttaatttctgcccgtatcgccggccctcgacttttgccaagttgccatggcttttttcccccctccctcccgtccccaagttttgcatctgactctcaggaggaccaagcattcttgggggagacaatttaaactaccaatgtacacccgcaactccctctcggagtgcccttacgttccttcggctggcccctcgccccaaaggagcccgctggcgtgggccggcggcaatggggcagtggcgagagttgctctctgcagagttccagatcctctctcctatttcggaagaggtgcgtggccccacgccccgcaggagctccggcgaggctgggggagttgaacgctttgcggacgccgccacccgcgccagccagagccgccccgcggccacccggccacagggtccccgcagcgcgtagcgagaatgcccgcagcgctctcccggccgcccggaagggctccaacttttttgt

SEQ ID NO: 183161 - DNA, 955 bp, Homo Sapiens
ttggctttttcaaaagcatttgcctgagttaactagactttatttttcacaggtttgttttttatcagtgtgttgtacagagcgaatggcctcggaccttcaatggctgtgcactgctttctcaggactttccctcaaagggaagaactgacccttatctctttcccttttctccaccattagagctcagagatcccaagaggcaaagcggggaaaggtgggtgactaaatcaccaggaattccctgaggtatctgttctgtgttgttcccttgtgacaatgatgggtggccttcacgtgtctgatgttgtcctatcatcagaaccagggttatcctcaattctcaggactaactgtaactctaatcccttctcgtgctactgagaaagcataacagagtacaagggagtgaaaatgatattattttaggaaaaatttaaattcctttagctcagttaaaaatgtagaaactttggagctttatatgttatgaatgaattaactgtgacacccctaatccctgatcaagatccaggggtgggcccaacaaggaatggagcactgctgcccttcccatgccaccttgttaggatttcaagggtgaaatagctctcctctatcagctaattgagccagaagggactatttaggaaaaggaaggggaggtgtcttttactcccaaagatgtatattcctagtttccttcctgtagtgaagatgattggatatttttattttataagggttaaagacttcaaacatattcaatattttctgtctttttctttttatcttattctctcagtaatcttcagtcatctattaaaaaacaatagtaaagggagagtaagattactatgaatgactttcctttatacatgatatctggctgtggtttttcaattgggaaacagattttcagccttctggcaaggtttactgagtatacatttga

SEQ ID NO: 183162 - DNA, 755 bp, Homo Sapiens
aactttgtacaaaaaagttggcttttactttgagaaagtggtaacttgtagagaggaaaagatactgataaatgtaaataatccattgcaaatggctgagtgaaaatcctggaaaatgttttaattgaactttattgatgtaatataaaactattcaaatatctgtcaataaagggtaggattgtatgaaggctcattttagaaacttgagactaagtgactgatctattattttagaagttaataagttgtatagatatatggctgtcaagctggaaacaacatgtactaactttccttgaacgttggtatggcctctgaggttttggcagtggattgtgaatagaagtcatgtgtgacacctttgtgttttgccttaaaaagcaatacatgagtactgccccctacctgtgtcctcttcttgtgtactgataattgatgaaaactcgagtccgcagaatttggacccagagattgaagtatgtgttgacctgcctcaccagctctacacagcttatttctagactattacttgagaaggaaatcattttctatcatatttaagccatgtattttaggatctctttgttacagggtcttagcctatatcctaactgataccttttaaagaacagccaaacagatttaaaaggaaccaaatagtacttctaaatatgaaaaagggaattgaaataaaaactcaatgggtaaatagggatgcctagagaaatggttggttggttccaggtctggga

SEQ ID NO: 183163 - DNA, 895 bp, Homo Sapiens
agatgttatggcagatttaacccaaactcatgggattctgagccccctgggaaaggcattagatcttataggtcagactgttaccatggagaacgtccgtgctgaaggattaatagatagccgggtatcctgaaaaagtttgtgtgcttcatacacagataacattagcatactcataaaaaaggctctggccaaatgggatcatttgggttttgaaactctagatatttgggatatccagtggaataatacatggggatgaggtgggggatgggaattcaaatgacaggcccttgtgccagagagacactcagaaagtcaagcaagcaagaactgagatgtgtctcgagcatattttgcattatttggttccagaatagcaacaagagctgggtgtagctactgtttctcaggctgggttttacgtgcttttgttagcttcataagccccaaatcctttcctgggttcaatttctataacatggacgtcttctagactcctcgctactactgcaagtttggtccacggacaacatggacctcatggaatcagattctgcatttaataagactgccaggtgatttgcatgcacactaatgtttgggcaggattgatccgcatgacacgaacatcacttttaatacctcaggagcagctcggctagaaactctgttttcctgttagaggccagaaaagaaagaaaatagctcctgcatgaagaaccaaaaagagactttttatgattggagaggagagaaaaaagctaaattaagtttcagtgttggtgatcgtctgcaactcattgccacagttaaactgcagtggagaaaggttttattttgtgtgttttttaagacattggagtgatttctggaaatgttttctttaagccaa

SEQ ID NO: 183164 - DNA, 919 bp, Homo Sapiens
ttggcaggtttcgggttttagaacggcctggggatgactcaaaatccccacgactgccctgtctcctggagggtctagtggctatcagtgcctaggggagtggagcctcctgagggagcagctgaatgaataatagtggaggagatgcctggtatgctcttcatctacataaccaatacttggggtgctcagcttctctctcccaactccagtttccattcattggagacacatgaccgtcagccaattggatgttgctattgaggaaaaggagaaatgattcctatcttctggattgtctcatctctgaagagagaactcagagaactcccaaaagacaaggaaaggccacttcaacggggtggagcaatagcctgcaaagcaaaatatacatgggggtacacaggggacacaatgccgtgttggtgggaaatagtcaattagcacttctcctttcctctatgtgaaatgttcagagaatcaccaccagacactttcctgtcaaaatatgcatgcttctcctccattcatctgttctggaaacagattttatcagattgtcttttggttgaggctcccctttggaaacttcaaagggtgttatgtcttcagcgcactctcctatgttttcttggtcctgggtggcagaattggggtgacctaatatgcccacagttgccatgtctcttggagggtctagtgagtatcagccggagtcactcctcccaggggacagactgagtaggagaatggggactcccaagagagcagctgaatgccttgtgatggaaggagactcctagtatactctgcatctagatagccaacccctcgagatgctcagcatttctttccaaaccccagtttcctgaacttggagacctatggctggtcagccagttggatggtgctattgaga

SEQ ID NO: 183165 - DNA, 519 bp, Homo Sapiens
ttgggattcaggctccaactgttttccccaccctggaggttcaggggtgggactgaaaattcaaagtttcttattaaggcttggcctttccggcaactagccctcatcctgaagctatctagaggcccaccaagagtcatctcattgaaacaaaagacactcccgtcaccctcagtactcagaaaattcttagggaattaggagctctgtgccaagaatggggacaaagaccaaatatctttctgtgataccacatacatacacttacacacagttatttcattatgtacggaaaagtatataaatgataaacagctcagtaaaacattgcaaagtgaatatatctatgagatgacctctgagtgtaatgatcaagaaatagcacattgccagcacccccagcagcctttcttattcctcatgctccctccttgtcacaaatccgtgcaaagtattcattattatgacttctgtcaccgtagattagttttacctgttcttaaaagatattttttgaat

SEQ ID NO: 183166 - DNA, 906 bp, Homo Sapiens
  misc_feature (354)..(444): n is a, c, g, or t
ttggatgaagttaaaaccaggtactataagtgcttacctgatttttggttctcatgaaggtgttttttctgtgtgatagttgttaatttggtgtccttgcaggaggatgatcaggggagctttctattccgccatcttgctctgtccctttctatagtttaaaatatttgaggtatgttagggaaggtctcatcttgtttttcagaaagcaaaactgtttttattcattattcctataacatttggtgaatatgtatcactacacacctcagaatggctaaattccaaaatataacaccaaatgcttccaaagatgcaaacaaaggaacattcatttctgtggtaattcaaatnnnnnnnnnnnnnnnnnnnnnnnnnnnnnnnnnnnnnnnnnnnnnnnnnnnnnnnnnnnnnnnnnnnnnnnnnnnnnnnnnnnnnnnnnnntcacaaagtgatcccatttcacacaaactacaaactagataggcaaaaatacattattccacgactggcaacactagaattatctaaatatacatgcaagagtggtgggacggtcaattcatgtactccattgggacttggtggcaatcttaaagttgctcagaatctacaacccagcaagttttctctaatgtatagagaatttactgtgcacaggcacatggggacttaaagtatgattagagcagcattttccataagaaaaaacacaaaattggaagcaacatgaatcctatagatactggaatggatgagcaaattgggtagcccaagccctcagacaccagcatgtgtgaaacaactgggacaaaaaccaaaggagacgcccatccatgatttccttccaccaaaagtgcaagaagggcaaacttaaacaaaacactgcttggtgataaataatgg

SEQ ID NO: 183167 - DNA, 786 bp, Homo Sapiens
ttggctcctatctatatgcttccaaattttaaatctacacttctatcccagatatgtgttcagaacagtggatataaatatccaactatttattgaatatctccatttgaattcccgaagacctcacgaactcaacatatctaaactgcattcataatctttcatttcaaaaaaattttccccctggtatattctgtatcttgatgaatttcatagctctttttaaccattcttatttttaaaactatatattgtataataagttcacacaattgtcaaaaccagaaaccagagaattattttggtgtcccctttctcatcctccttatccaaatagacacaagccctataaattctgtttccctattatctcttgatacgtcctccttttccacatctttattgcctttgtcatattccagtgttccattatttctcacctagtctgctgcaacacttttttggttgatgtctccgttccccattttgcttcctacttatcaattgctatgtttctcctagagtgagtttaaaatgcaaagttgatcgtgccactctcttggctaaattcctttattggcttctatgatcttcaaaatgcattccaaactccttagcggagccactttccaaccctcttgcctcatttctcacactctttctgatacatccagtgctccaactaaacctaaatacccaggcacttcatgctgttctctcttcctaggtctattttccttctttctgtatcttgctaagtactatataccatttacaaattcagtc

SEQ ID NO: 183168 - DNA, 718 bp, Homo Sapiens
actttgtacaaaaaagttggctgcaggcatcaacaatggtagaagggaatcccagtgagggtgatggccctcttgaacacctgtgacacaaggattgggaggtcccacagaagggttaggacacatttgacttgcaacacttggatgtgcttctgcaggactgtgctttagtagatttcaataatctatggcaaaagagttggacaatccaaccagaagtatcttgaggtcaatgatctttgtataaggagaatgatatgctaggcttctgctgaagaattgcagaccaagcaaggtatcagaaagtgtagtgaaaaaaatacaaggaggcacctgttcttgtcacatctttttggatatattatataaaactttcaaaagatacttttaaagtgttaattgagtctttctaagattttatttctactagccagtgtaaccattctatgcaaagcagattttgatgatatttgtgtgttttaggatactattcagtattagaaactctgttacattatggaagcatgttttttgtcatctggtgttaaaggcattcagagatacttcttgataaatatcaagggcatcattgggaagatacttattcttattgcattgttttttcttggggttgcagatatgacactgtataaaagaaaacgtgttccttgcatgggaaaatttctttttctttgagatggagtttcactcttgttgt

SEQ ID NO: 183169 - DNA, 922 bp, Homo Sapiens
  misc_feature (506)..(516): n is a, c, g, or t
tacaaaaaagttggcatttttttctttgtaaagttcaacttgtttccctcataaggcaatgttttaattcttaaggtctttcctttttaagtcttctaagatgggtattttccccataaagttttggttctgtttggtagatcgcatcaggaaagggttactgcccaacatgtatcataagtggcaaggtgaagtgtgatcatggaaaatgccttgcattttagccttgtataactatatttaaggaaaattggagtttttcacaacttaactcactagatggtgacataaaagactgagtgggatggacagtcttggagagatttcaaaagcaatttcaagtctgtttacttgcacaccaaagataatctaagtgctgagctggctgaacattggctgacagtgtttttccctgggagcattttattttctaataatcccacagggaaactcttcagatctacacctttaacctcctttcaacctgtggttttgcaggccaggannnnnnnnnnncttttgtcattggttagttatttccccaaaatgatggaggggaaggatcagggtctgtacttccaaattgccaagggtgtcctcacaggggctttttataagcgtctgagaaagctgctccctttgtggtccttagtgtggatttatagcttttttctggcatggttttgggaaagagtcaaggattttgtctgtcttacgtaagcctcattttcccatagataaactccatctggccagcatagtagtttttccagatttaccctttagatgtttcaaggcagtaaggtctcatgatatatcaagggaaaaacaatattgggtgatcaccaaatttaccaattccagattatacaaaaggagggaaccataaacatattcttggtttaagttaactgaataggga

SEQ ID NO: 183170 - DNA, 930 bp, Homo Sapiens
ttggtgcaaatagtgaaagcctgaaacataatggtttgccatgttttgaaaaaaaatgcatatttaatttcttcctcatgagataggacagttgctgttctttcttacctggcaatgaccctaaaatgtatatcctctttcctgaatatttagcagagacacacacacctgtccagagcgtttttggtatgcaaagtactttgacattggttgccaaagtcctccattttatagatgaaaaaactaaggctcaggaggcttgagacttgctaaaaggtcacacagcttggaagtgattcttcaaatcctctgctctttctgctgccacctgctgggtctcttggcaagcatggagggaggggctaactgtactttatagagctgggaagcccagtctctgagctgagcagatttgtatgaactgctttgggccaggacctgtaatgagccctggggagggacccagaggcacatctaactggcagcacaaggaggatgagaatttgcaactaaaggcctcacttggacaaaacactttggggtcacaatgcccaggaccgaagacatgttcaaggacagcacgaggcatctttctattgggagacccatgtccttggtaagcctgcacacctggcttcctaatccctgagagcctgcccactgtccagatccagtgagttggtacaaaacgtacagactgaagtccctgggcttgcttttcccatgggtgaggaccaaaaccagactctgagcatccttacccctggccacccgaattgttccaagtttgaggtaccccgttcccagagatctgggggtccttctttggagggcttgctttggttctgatggccttcaaaaaggaatcacatgaagtataaaaggacaggcccttggtcaccaagattttggctcctcatacagatagga

SEQ ID NO: 183171 - DNA, 510 bp, Homo Sapiens
tgaggcactgcgtccggctgacagtgtttcttagaacgttgtcatcatccctgaaacaaagcaaatatccgttagcagttactttctctttcccatttcctgtagcccttggcaaccaaaattgaattttctgctgtgtggagttgcctaatctggatgtttcataaaaatggaactgtgtgtgaccttttctgcctggcttctttttcttagcataacatattcaaggttcatccatgttgtagcatgtatcaatatttcacttgttttttatggccatataacatggtgtatagatatactacattttatgtatccatttgtcagtggatggacgtttggttttagttctacttcttgactattatgaataattctgctgtaattgttcacgtataagttttcacatggacatgtattttcagtcatttcaaatatatacctaaaagtaaaatgctgggttataatgtggactctgtgtttaactttcttgggaactgcctggccttc

SEQ ID NO: 183172 - DNA, 429 bp, Homo Sapiens
tacaaaaaagttggcgatttaattcttttatttgataattgacctattcaatttttattcttgtggggttaatttggctttctaaaaaatcatcctttttctctaggttttcaaatgtgttgttacagagtttaatgtactttcttatataattatttaaaattgtctcatctgtggttatgtctgttttttcatttcaagtcttgtaaatatttattatttttttcttaattagacttgcaagatgattatctgttttatttctcaaagaacaatttttggctatttcattaattccagcttttatgttatcaaagcctttcctagttctttttagttttatttgtggttcttttccaaatattttaagatgaattttaagctcatttaccttctcacctttgtttattaatactgaagacatttaag

SEQ ID NO: 183173 - DNA, 1005 bp, Homo Sapiens
ttggggttgtattacttttagttagaactgaaagggctcaactagcatttgctgtgaccagtatgcggagtctgtgttggctttccagaattgactttttgggttgtattggcaaatcacagtcctaaatgatgaatgttgaatgatgcactatgtttttgtttaaatgagatttcctgaaaatagttaatttcagaattaagggaaattgatgtcgctatcatgaggcatcataaaaatatgtattttacaaggtgaaggcatttcaagtagatatagttcttgatgaagcaggaagaacatggatctgggatttggaagacctggcttctagctgctactaaccaactctgtgactctgggaaagggggactcagttcttacttctgtaacatgaggacaccggactatttgaattcagaacttagaaaattggaagggaccttaaagccctctaagaaagagttcgggaatgttctccattgctgtcagttttcctccaaaaataacctggcttggaagttattggtccagtgggaatttgattccccatagaaactggagaaaaggtaatgcaagtagagaggaacagctgtatttctgcttgagtaataaacccactaacagattctggtacgaattgtggagacataaagagaatgagtgtatgtactctaagtgtaccagtttcttcactctctcctggcagaagatgcaacacttttagtgattctgggattctgggatgtgttcctattaattctaatacagatgaagaagatgtggtagaggaaaagatgggtagcagaaggagtgaataaagaggcaaacagcccgctaaaaagaaaagaaagaagggtttgcgaattaaggggaaaaggcgtcgaaaaaaattgattcttgccaaaagtttagtaaggatttgggatctgggaggcctgttgcagaatgcccctgctttgttagcttccatgaccctgagcaggatgaagaaagtctttttga

SEQ ID NO: 183174 - DNA, 605 bp, Homo Sapiens
ttttatatgtgtgtaccctttactgcgtttctcccccccctgtgctcgcctccacaaaagaccttcttttctctataccgggcgacatctcccctcccttcttgattttttcctttttcccgttctgcgcgcacacaacaggcttctttctgcgtgggtgtgcttatcccacaggagatattgacatctcatatgccttgagcacctgatatctgtctctgtctcctgtgactgtgatacactgcttcttatcatacctctttttgacatacttctggtatacatatcactatatattctcataccgcacaaatctccgcgcacatacacatactgtgatctggggtttattaaaccggatacccgcgccgtttacaccccccctgcgcctcacctcactacagttgtaattctttaaacattctccccacatggaaaccctctcacacggcgtgagaaaactgaaactcccccggcatctccaccttgtctccctgtgtataatatattcccctgtggagaacaggggcgaaaaaattgtctctattgtcgacgtttatatctcaactggtgaaactctcccacggagtggctgagacaaaaaa

SEQ ID NO: 183175 - DNA, 836 bp, Homo Sapiens
ctttgtacaaaaaagttggcttgagaccccctccaacacagaaggattacataaaggttgatcacccacgctctacagatgaacaaattgagacccagagatgctaaactgctctgcaggtcacaaacctgaacagcagcatagccaaaatgggaacggagctcttctgacttcaagcccctgcacttttttcttaaccacattaattttatgaatatctatgtggtcaaagtctcttttgtaaaatctgagtataagctgaactagatcatgtctctgtaagctaagatggcagaaacacattgtcatgttagtttggaggagcaaacagatataagtatgtgttgtaatgttatagtgagctgttatgtatcccccagcaatgtccaaagtgatcagagctactagatgacttattacaatgttcagatcccactccttcattcctcctctctcagtgacctgtctacccccaagctttagaactgagctctctccaacttagaactcattagagtttgttgcattagtgattggatctcctcatgaaagttttttgaccaatgacagtagagcccctttaagctagccaggcccaagatagggaagcactgctggtttacatttctgctctttctaattcagttgtctattgcatgcagacatcccctgcccgacttctccattatggaaggctaaggccatccttccttgtccagtttctctacctacacactaacatgccttttccccatggagtgaactctgccagttgtctttgggacattttctgcagatgcaagctcagttcttgctcttttgttcccacccacttc

SEQ ID NO: 183176 - DNA, 802 bp, Homo Sapiens
caactttgtacaaaaaagttgggatttctaaggatgtccattgactataaaggtcccattaatacatatgctatggacagattctctccttgaacacaggtttatggagcacctactatattccaggtgctgggcagagtgctaaggtcacaaaaatgaatcagctgtggcctctacagcctgttcccctcttggcatagatctgcccttccccctccacagtctggacaatcaaggacctggagtaagcacactctaggggccgcgtctcccagcatatcttttgttttcgaaagttcaaaaaacagaagaggaggattctgaaacagcaaacttgctgggtcatccatagagtatattaactggctatcttgctatctgtccataacttgctacctgtccatagtgtatattaacttcctgggagcccactcactgcctgacttcctgttctgcgcatgggcccaagggaagttctcgcaaccatagtttcctgtgatatccatcctaccacatggcttcctgggaaacccattagcttttttgtttgttttagagcccaagggaatcagggccttgaggggattttttggtgtggggggtggtgcaagcttctaacactgagagtgggtgcttttctgattcctatgaaggtggagtgtaggtgtcgttcctggctcagcagagtcagccctctcatcctattcaggccgtctctgagctggctcctgtgcccaagcccttcctcactccctcagggcatgatcacagggcatttccttagcattcctcctttctcccc

SEQ ID NO: 183177 - DNA, 965 bp, Homo Sapiens
actttgtacaaaaaagttggatacgttcaagcccgtgcagggccggccatgccctgacaggagctcagtggctattattcgtgtctgggcctgatttcaaaagcacttttctaaaatggatcccaagagcctccacctggtgcctgggcagacacacaaaacatcattctgaatttccgattctagacgtgcctggggatttcccctgaaaatgtagctgttaaacctctggacacagtattgaagtggcagaaggacccacagccccaaactccctgacaacataccccaggtagggtaggaccacgaggctggcgatgaggacgatgatccgcagcacagagctgggggcaaggacgaaggttttcttcagtgtcatcagccacccggtgagatgcgccctcactgtgactgttgggaggagcaaaggactcgtcagccgtgcccgccatccactccccatcctgctgcctctggaccagggcagcacatccgagagccaggggctgcctaggaccctggccttgctgttgagccgctggccacctcatcttcctgccagggttccccatccctgctcctgagcctaggcccgcctcggctccccgcctcctcacagccctttggatctaaatggctgggaccaggcaggctcctttctccactgggacagcatcttccaggcagcctagctgctcttgtccagtcctgtccccacacttggccagcctcgccctctgatcatctacctctagaagagaacactcagagaaaagtggcactctagtgtgatgctgcgtgagcagaaaagctggcatcagaagccatcttccctgcctgcggtcagaggtgtggggaccaagcagtggggtaggaggaggaagctgctcgtccccacttccctctgttctttcctggactggtcctgaccacttccaccgaggtcactccctttctccctccta

SEQ ID NO: 183178 - DNA, 855 bp, Homo Sapiens
agcaatgctttttcattatagaaaactttgtacaaaaaagttgggaacttgaggctgttaccttaaattagaagagggctcctagatctgggggaaaaatggaaaagaataaatagaggacagattagagtcagaacagaggaattagacccaagcagttactgtttcttattctgtaagtataaatattttagtttaccatataaaactgctgtatggctgacaaaatatgaggccatattttttctttggaattcaaagtatctaggtaaaacaaagttttcttggttcttttcaagaaatagttcagatttcttcatttttggaggatattacataattcagctttaaaaatttaatgtcatgcatgtttggaattattttaaaaatattcatatcagacaattactaatttttattcatcatcaccattcattataaacttgatattgtcactttttttagtaggtattaaaagactggacattttatgtaggttttccttgctaggtttcaaagtgtagtgaaaagaggagccatttattttagagtcagataatcgggttttagttccagtttctgttctgtgggatcttggacaagttattttatctctttaagtcataattttctcatctattcaatagggatagtaaaaattgcttcactagcttgttacatagaagaaatgagacaatgtaggtaagatttaggaagtattaaactgactttaggaagtattcaacctctgtattcagttctttatgtgataacattgattttatctctccttgtaataattgtgtttattatccctccacaagtccttgtttcagacataagaaattaaaatat

SEQ ID NO: 183179 - DNA, 914 bp, Homo Sapiens
ttgtacaaaaaagttggctccatttcctagtctttttcttttctttatcttttctcaagtgggataagcaggtagatacacaggtttggcaaaggtgtgggctggaggactaaatttggaatttcatcagtttacagatgataattgaagctattggggcagattgttttgcttagaaagaaattacagtgacagaagagaagagggcctcaagaaactggaatctgtggaggcaaagcaaaaaaagtgttgccggcatagaactacaagtggccggagaggaggaggggaactgtgggccttagtttcaggggcaaagggagtcgtccattttgttcaatgcagctgagatttcaagtgagatgaggcctgggtgtgtgtcctgcagcttctctatagggaggccattagtcatctctgcaagaacagttttgtggggcatggggcagaagccatattggcgagaattgagggagcctgagaggtgaagaaggaggaacagaaacatggctccagtttgactgtcaaggaggcaggcagcagagcagcagctggaggaaggcagggctctagaggagatgataggtggatcccgtacgtttttaaaaagagagaggacctgaacctgtttagaaagagcaagagagatggcggagtataggcatggcaggatcctgaggacaggtggagtgattggctttagattgttttattaactttttatagactttaaactcagaaggaaaagattgacccacgttcagctgttgctgtggtctcaccttccccccaccatcctgggaccatcctcctcacatggggcccactgtactcccacagaaaaggatcctggctccccattaaaggctgttcctcattccaccagatgaactccagcatcctttttactttga

SEQ ID NO: 183180 - DNA, 909 bp, Homo Sapiens
  misc_feature (771)..(779): n is a, c, g, or t
agcaatgctttttcataatagcacaactttgtacaaaaaagttgggtcttcctttgagaatcatctgttcagatcttttgcctatttttaaatcggactgttaggatttttttcagtagagttgtttgagctcttacatattctggttatttattaatcctttgacaaatgggtagtttgcaaatattttcttccattctgtgggatgtctcttcactttgctgtttcctctgctgtgcagaagctttttaacttaatgtgatcccatttgtccatttttgctttggttgcctgtggggtattattcaagaaatctttgcccagtccagtgttctggagagttttcccaatgttttcttgtagtttcacagtttgaggacttaaagtctttaatacattttgatttgatttttttatatagttagggatacaggtcaagtttcattcttctgtgtatggatatccaattttcccattaccatttattgaagagactgtcctttctccagtgtatgttcttggtagctttgtcaaaaatgagttccatgtagatgtatggacttcacggacttatctctgggttctctgttcttttccactgttgcactgatctatgtatctgtttctataccagcaccatgctgttttggttactatagctcggtactataagttaagtcaggtaatgtgattcttccaagttttattctttttgcttagggtggctttggctatttctgggtgttctgtgggtccatataaatttagtannnnnnnnnctatttcagtgaagaatgtcatgggtattttgataaggattgcattgaatctgtggattgctttgggtagtatggacattttaacaatattgaatttgctaatccatgaacatggaatatctattttttt

SEQ ID NO: 183181 - DNA, 592 bp, Homo Sapiens
  misc_feature (208)..(323): n is a, c, g, or t
ctttgtacaaaaaagttggcacacaggcacgccatcctgcttgggcctccgcctgccccacactcaccagagcatgacaagtcagccacccgggatttggctgttctagaggcactgttccatgctgccaggcagacctgggacagctgggctgagggctcgggggagtagagggaggtgggcaccgtgtagtgcggagaggcctagnnnnnnnnnnnnnnnnnnnnnnnnnnnnnnnnnnnnnnnnnnnnnnnnnnnnnnnnnnnnnnnnnnnnnnnnnnnnnnnnnnnnnnnnnnnnnnnnnnnnnnnnnnnnnnnnnnnncaaccctgaccccaagcagctgctgtgtagagttaacaagagcctcatatagccctaggtcttatttcagtgtcgaacccctcttttcttcctgcatttatgaaatttcctgacacatttggtcttctaaagcggaggttgcaaactggtggcatcagaggttgagttttgcccacaaatgtgattatttggccctcacatttttaaaaaattgaattttatgtcagcatttttgaatgaaaatatttcacataaaaatttggatttcc

SEQ ID NO: 183182 - DNA, 778 bp, Homo Sapiens
cttagagagttgttatgggaaacagagaacatgcttgcagtattgcagtgtagtaggtgtcgaataggtattaatattcatgatgataggaagcaatataccatagtggttagaagtcagacccagtccattccccaaccccgctgaggcagtaatttgttttctttctctgcttgaattgttgtttcacccttgtccatttcatgacctcttcatctttccacatctagttcagatatcatctccctgtagttttctctgacctctaccccaaaacaaaatccctggcactttgtgtccctgtggcacattatgctatacataggtgtcacgtactcttataagcgtttcacatatgctaactcatttaatccctggtgacgaaaaggtacttgtacagatgatgaggaaattgaggcaaagagaggttaaataacttccctaaggtcaactcatctaatgagtggcgaagctgggattcaaaccaggcacctcctgtctcttaaccacagcctatgccgctatagttaattcttgctaaactccagcacctgataacatgtatcatgtgccagaaacttacacttctttctcttccctgcagtgacccttctagaagatggcatctctctttaacatacagaactcagccattatctctcagcctcaccttttcaatttcctttatggtctagtttgatggcttccttaatttcactcccttgctgtgtttctcttccttttcctccttgtttcaactaaaatattctcctggaac

SEQ ID NO: 183183 - DNA, 930 bp, Homo Sapiens
ctttgtacaaaaaagttggatatattttcaagataaagataaaattcctcggattaaaaaactaataacaacagctcttttaatgggagaaagaatcatggaaagcatgtgtcatcaggtatcaaatatttactcagtgcttcactttgggcaaactctcctccaagacaagccagggcccatggccaagaacctggggaaaagcctagagtcagactggatggagaaatgagagagaggaatgactggcctgcaaccagagttttaagcacaaggaatccaaaggatttcattgaaggcaaagctgcaaaccagaaggaagcaagggattgaaccaaaatttctctgcaaaagcagaaaaggcagaaagaaatcagagagttacaagactggagccagaaacctcaagcagaatggtgggaaagaggcttttggaggacagggagtttcccaaggcctgctgtaaagagagagagatgttggaaagaggggaagaggctcccagaacctgataaaagggagacataagaaagcccaagaaggaatcacccttaaatagctctcaatcaagctgtaaagataaaacataaacattgaggatacagttaatagcacaggacaataaaccaataacaaactaaagaagttaatgggagacacaggaggtcaggaaaggagaagaccattccaggctaggtctgcctccgaaaattccaccaaggaatgacacagaccttgagaaatgtgcttatggcccatatctcttgccaatttgcttcaaaatgcactcccaggcttaaaacttatttctcaatttatcactcttggggagtgtagccctggctcccttcatttctagtttttctattcctatgctagatgatttttctgaaagccagccaaagtatcagatcactctgccttcatttc

SEQ ID NO: 183184 - DNA, 359 bp, Homo Sapiens
agcacattttgaagtacataaagcaaccaaacttaagaattatctgtgtttccgagggggaagaaagaaccaaaagtcgagaaaacctatatgagggagtaatttatggggattttgcatttctagcaagagtgtcagacatctaaaggagaattagcaatctccaagaatatacattgcaaaaaggacttcaccacaccatattctagtctaaataactaaaatcaacaggaaataaataattttaaaatcagaaagagaaaaaacatctagtcgtctataaaggaacacccaatcaaacagtggaattctcatctgaaatgttacaagccagaaacaattgtatgacattttcaaag

SEQ ID NO: 183185 - DNA, 804 bp, Homo Sapiens
  misc_feature (64)..(81): n is a, c, g, or t
  misc_feature (310)..(349): n is a, c, g, or t
tacaggggagcttatctttctttttccccctttttttcttgcctaataaactctctgctccgtnnnnnnnnnnnnnnnnnnttcacagtaaaatctgtaaagaaacccttacttatgctccagatcacaacaaacacaaaattatcaacacactaaccacaatcttgcatgtagcttccctttcctttgccattagtttaacaatattggtaaaatgttctagcagtttattgttactcctaattggctttacaatgaactgagcttcctagatgaaagatggtctagaagagaacttatttccctaccnnnnnnnnnnnnnnnnnnnnnnnnnnnnnnnnnnnnnnnngccataatattgaaaagaataatgttcatcaccaaatcaccaaccagtctactgagctaaaattctagatacttttatgtggcttccttatacgtaaaaacaaactgtttatatttccaaaggaatgtgatctcacaattccattccaattcagctgaagtcccagtaaatacgctaagagttctgcttgagtaagaaccaagctcatggttttaaaattacatttcatggaagatttgagcagaagacattttgtgtctgatccagaaatcccagaacactgtcatttagataccgtcagtgcaaacgaagagaaagcaagcaccaaggtagtatctaattaagacaccaagccaccgccttgaatgacttgcttttctggtccctgctagatgaagccaacttttttgtacaaagtcgctctataaatggggaaaagcattgctcatcaattt

SEQ ID NO: 183186 - DNA, 147 bp, Homo Sapiens
gtgtgagccaccgtgcctggtcccccaaaatttttttaattatccaggtgtggtggagtgagcctgtagtcctagctacggagagtgagagtgaggtgagaggatcacttgagcccagcaggttgagttgacagtactccgtgattg

SEQ ID NO: 183187 - DNA, 943 bp, Homo Sapiens
ttggcctcatataaaatatatttaactattatatatgcatatgtatatacagtatatcctaggtattttgtcattatattcataaaggaaactacttacttatattcaaaacatacagagtacgacgatgtaaaatttgtctattatttatgatgagtacgcaattgttctacataagtaaagataatattagcagaatgtgcactctaagtattttttccaaaattgggaattttttttgctgatccaatcatattttatggtctctcccagggtcattaaaggatatgttattggtaacttctggaatggagcaaacacactatggcttgtgcaagatcagaatgtggtttcattcattcatatcagaattgtattaaccaagctaaccaaattgaagacaacgttaataggcaagaagttggaaattgtagagaagaggaaaatagaaagccactgatgttgagatgtatttaatgataatacaaaatttagaagtgtaataagccttcaagatcacctatttaacctgtttattttaatatattagaaaacagatttctcccgctcaataaaatatgtaaccttctcaaatgtatacatctcataaggattaaaggcagaggcaggggaaactagagctcaattgtctttattcatatattttttttaatttgcccttctaatattgtttactcctacaggacatagaacaacacaaacggtatttattctacaatagactcattgaagccactcagattttctagttttaatatcctttcttggtgattaaagaataaatgaaatgaagcagaggggaaagaattcttgattattaaccaaaacagcaaaaaggggaagatcaagaatatgacacggaagagaacacgcttttggggctagatacgtttacatatgttactttacataatcctcatgg

SEQ ID NO: 183188 - DNA, 910 bp, Homo Sapiens
gccaactttgtacaaaaaagttgggggtcttctgggtctgttagaataattaccaagtatttggatagttaaaagttgcaacgctagggtcttttatacttgctctaggacatagttgtcaggtatgaaaaatttaccatggcaagatccatttgttgtattaatcactacctttcccttagagttgatttatggttcagagggatattctggaaaatgcttagatcaaacaagaccacattcattcatggagaaagagtggaatgcaggttcgtagtaaagaaaaataatttccagggctccggggaaaaagctttggtcacttaaatgcccttgggctttctgtaagtaaacatctgcagtcctctctattggttttctagcatatttcacacaaaagcaggggagcagagtagtgttaattaccctgagccaagtcagtattaatctcaggtctccattgttgtttaagattgatggataaagatgtgactgcccagaactacctttgttctcttactggaaagatgtggacttggaggggcaatctggagttaatagtcagaactagattgtatcctccttactgggatgtgagctctgtcacctgagtaaccaatttctttgtaaagggatgtaatctcaaatcttagctttcaagctgccaggcttggtttgcttttatatccccaaatggaaccggaaccttctttattccaatggtacattgtggtagactgtattcggcaaccttttgtatgaaagggttaacatagatctgtctcatcagtgtctttctgtttaaggatagcataaaaagtgctgattgttaacttcacttggtcctatgcttattctttatttttactgtaaggatttacttttttctttcctgtgtctttctctctcc

SEQ ID NO: 183189 - DNA, 175 bp, Homo Sapiens
ttgcttccgattaggaaggaagagtattgggacagtaatatattgagtcaaggtatatttataacctctggattattgtgctgggcaaaaattacacattcttgagtgtgagatgaaaaggtaaaataagtataaatcatttgctaatctttatttcgtggattgggctatttta

SEQ ID NO: 183190 - DNA, 1100 bp, Homo Sapiens
ttggcaagacagttactacatcaggtaattgaggctttttagattagcaatgatgcaggatgtgtgcacgatgttgccctttacaatttctgccatcattttccagctttcttcgttaatggttatggaactgaaattcttctcttactcttaggggggatcaaggtagtgctttgttaacacaataatgatagctttgctgagattcctcttctcatttttaaatgtgtaatcacatttgacgtgacactttagaattaagtaataatgtttttccaaacatttcagtacaacttgtatgtaaaatctaatttgtaacttctgattaccgttagggattggttgtgtgctgtatgagagagcatggcgatttgagggaagataatatatccgtccttttcactgagaaaggtctaaaaagccagaatcactaccagatgtgcacctcactttcttaaccatttcttaacattgctcagtaatgtgaaaattagcttgttattaaatgatgatttgacataatctaatttaattcatagttaggttacgccacaggatactgtaggtacacaggttaggaatcctttcctccctccatatttttaaaaaactgatgctaatgaatcttctacctgctttttgtgatttctttttcttcatgcttatgccacctttttctcagtttcagtgaagccattctgtcttcacgagaaggaatacaaaacagttgtcattaaagttaccaacttgtacagccaccagaaccagtgttctttgataactgttacttttttcttagattattttaaatggaaatcgctttttctgtttcctcttgaaacattttactgcctgaaaagaattcagatatttgttttttccttattacttgataatactttctcatgtgaaatttgttggcaggatatgcctttaaaaacagttattttacttgttgaaattataaattgcatattattaagattatttttgtaacatgaaaaattgcaaccaaatattttacctttatactagtaaattcaaaagttatgtgaattctcagcactattgacgtttaccctcacaattaactaaagtac

SEQ ID NO: 183191 - DNA, 1061 bp, Homo Sapiens
ggtacatattattttaaatataaaactattaatagtaattctggaattcggatcttttgcaatagagtttaatatactttctaccatcccttgatatttattaaaataggactactttatctggaataggcaggtaatattattttggactcagaacacaaatacccgagagaagattaccagtctggcaaagtttagaaattttaaaaaaggcacactatgtaaataatgaataaaagttatctgtgattttcaacataccagcaagaaataataagttcttatcgtagcagtagcccaccatggacaagagccacttgaaaggctctttcaaaatacccccaataactccagatgtagatacatctaattagaagttcataaatgagcttggtgggggagaaaaaagcataagcatcttaacactgtatgtaaaatttgcaaatgtacattagattctccaaaaggttaaaagccactgggctacattatccatgaatttgtgcattaataaatctttgacatgtcccatttagatatgaacagcttacgtaaatacacaaattagtatttctggtaaacatttattgtaagtacacagaaaaaattctcaactttattgttttttgccacaattctagttacagatttctctctgcttatgaagttttctctttaataacatcatgagggttgtaaagcgaagacattttgaaataaaattcttatcgatttaatttattgaatataaattattgagattttgaaacccttaagggtaagaaacagtttttcttcaataatcatattttcattgagtgcttatgattagctgaacaaagtgtctctgtggtgcacgcatactaatgagtcagtttcaactttacacgctcagtggtaagtatagtgctttgcacatagcagtaactcaataaaaatttaactgaatttttagaaaccgtatgggtttctaatgaaagtagtaaaaaatttacaaatatctcttaagcttatcaaagagacaacattaaggaaactagttctagtcctgcctgtgccaa

SEQ ID NO: 183192 - DNA, 940 bp, Homo Sapiens
actttgtacaaaaaagttggctagcttccaatggtggccataaattcttggtgttccatggcttgtagctgtgtctcttcactctctgcttccatcaccacatggcctttctccctgtgtgcctctgtccgctcattgttttccctcttcttagaaagacaccagtcatattggatcaagggcccactctactccagtatgacctcctcttaactaattatatctgcaatgaccctgtttcccaacaaagtcacattctgaggtgttgggaatttggacgtcaacatatctttggcaggggacacaatccaacccataacaatctgtgacatggcaacccctctcccgggtgtgtatcctggggaaactcctgaataggatcataagaggacgtgtgtgagaatgttggtggtggccaagtttgtcccagcaaggagcccaaggtgacctacatgtctatgactggaggaaatgagtcagccagatttgaaacatgcagatgatgaaataatacacaataccctgaatttgcatacatcatcatggatagagcttaaaaatacagtgtgaaatgaaaaaagtaggaactagactgagattgatgacacaataccatggacataaatttaaaatatacactcacagagcaagactatatatgtttcataagcattggaaagtgggttggaaggatttattttgaagatactggagtcactgcctgtgggaggcagtgagaaatgctaacagcagacgcaggcgaaaaataatacaagaaggcacaaggagggccttgaacagacaaatagtgaatgtgtggcataaactgagaagtgtgattctacgaaggcgcccacccggggtccaaattttgcaaagaggggaggaatcacgaaaggattaatgagtgacagtggcgcccagggctgggcggagtcca

SEQ ID NO: 183193 - DNA, 919 bp, Homo Sapiens
  misc_feature (482)..(543): n is a, c, g, or t
gtacaaaaaagttggagcgcattaactactagttacaaagggggaccacacctttataattttaagatctgggtattaccaccttaccaaagtagttacactcagcatctctactggatgaacccgacattgtgttgtgcctcctggccaaaaatatttcacctgaattttatcagggagaagcaatcagacaaacccagaatatgatacatttataaaacaagtggcctgaactcaacaaaaaaggggtctcatgtgacttctccatttgtaccgtgaactcgttttccactagcctagtcagatgtgaaacccatgaaacttggagtcacagctgacaccccacctttgccaggcaggagtagctggccaaccataggcaagacacctaaactttctaagcctcatttttctgttccttcaaattgggaattaaaataacaactctttcaaagggagtttttgacaattaaatcctgttnnnnnnnnnnnnnnnnnnnnnnnnnnnnnnnnnnnnnnnnnnnnnnnnnnnnnnnnnnnnnnttggtagctcctgtcactgacctgctgtggtgtggaaatcccaatgggacgtttccccaaaacagtaatggatgagactgggcagtgtctgtaggcagttttttaaacttctccttgaaatataacacacactaagaaaagcacacccatctgggcactggttgcataggtcaggaaaacagaagacggccacccccaaaggcccctcgtcatttcatccctcaacaaaggataaccagtatcctggcatccaatggtatggaatactttttgcctgcttttgtattttaaaatggaatcataccaaatgcacattttgtacctggctttctttcacttaacattatgagattcagctacatgattaaatccgtaa

SEQ ID NO: 183194 - DNA, 360 bp, Homo Sapiens
gaccatgttttaataaaactttattacaaaggtcaagtcataggctggattggcctatgagctgtagttgtccagtgggctggatcatcaacctcccagaggattaagattgataatgagagtcctgggtaactgtcagacaggacagatgcccacatgtactcagagtccacagacaaagaaaacgtcaatgggcatgggactcccggctgtacctcaggtgaatatcatgtattgatccgcactgagttgcttcacatttgggcaagactgttttcagacccaccggtaaggagaagcagggatttattacatgatagtaaatgattcccctaaactacacaaggacatggacataat

SEQ ID NO: 183195 - DNA, 475 bp, Homo Sapiens
tgaacactgtgcctggcctattccctgctttctcatcttacataaatgtactgtgagtacatttatggagactgttgaaaagcaatttcaattcaacatccatttgtcaaacattgattaggttgagcaacacactgtgattggcctggggaaagcagtattgtttggattccttacagtcatggcagacccaccttattagtgcaattaggagccaggtttgagagagactattaatagaggtaatattgcacagttagccaccttgaagagcttgtcaagagcaggtctccaagtagacacagatggaaattgatagagattaaaataaacccatgagatgctctgacttttaggggtttaagctgttcaggaatcagagtttaaacaacacatattttacttaatgctaaaaatttagtgtcattcctctggatgttaatttgcaaatttcccttccaccatccccaactcc

SEQ ID NO: 183196 - DNA, 952 bp, Homo Sapiens
ttggcacctgtctctggcctccagccactgaagcttttccttttattgtttattctggggaggcaagaggtgctggtgggcagggtggtgaccactgcccatttctgagtcctgtccccatgctcttccagctggcatcccgctgctcagcaacagccccaccccgctggagagcaggctgggttacatgtctgccaggtgagcctccctgggggctggttggggtggaacgtcatagtcgagctgctcactgtgcctccctgggcaggtggacctctgaggggagcagacctcctggtcttaccccaagaaatcaggcaggcctctagtccacagagctgtccccgcttgcctgggtctgaggcgcccctccatgaccaggggaaagtcaagttcacaccgccaaggtcccagtggggaagggctgggcttaccctgccaaccccctgaggaagctgccctctggcccctgtggggaggagtcagcccctggtgggaccctgcccccgcccctccctctagcccctccagccccggagtctggcctttgtctttgcccttgagctcttgtttgcttcctgtggctcccttattcccccagtcctgctgagcaacatctggagtgagagggacaccctgtggaggagacagacgggcaattatttaaacctgttattaattttccattcatctcattccttgccaaatgttttcccctctccctcccttaggcagctaacagtgagtaccccccactaaccctttggccaacttgagagctgatgctggccaaggattgagttgacagaggggagcgctttgctgatgagattggcgggagcaggcggatgtgggagcccagagccttgtatcagtagcacccagcaagggggcagagggcctccaccactttcccgtttgggaactgttctggaggggcagatgttttgaa

SEQ ID NO: 183197 - DNA, 534 bp, Homo Sapiens
  misc_feature (458)..(478): n is a, c, g, or t
aggatattaatgagtaataaatgatcacctgaaggtacaaaactcactggtaatagtaagtatgcagataaacatggaatattataacactgtagctgtggtgtgtaaactgctcttatcctaagtaggaagattaaatgactcagcaataaaaaataataactgcaacaaattttcaagacatagtacaataatttgtaaatagaaacaataaaaagttaaaagtaaggggacaaagttaaggtatacaatttttattaattttgtttttgcttgtatgtttgtttatgcaaagagtgttacgttgttatcagctaaaaacagtggtttatatgatagtatttgaaaccttcgtggtaaccacaaaccaaaaaacatacagtgaatacacaaataatgtaaagcaagaaagtgaatcatatcaccagataaaatcaactttactaaaggaagacagnnnnnnnnnnnnnnnnnnnnncaattaaaatggcaggagtaagacctagtcagtacaataatatataaatgcaaaca

SEQ ID NO: 183198 - DNA, 895 bp, Homo Sapiens
ttggctagttatttttcagtgatcaaaggtcataaaaaaaattctaggcagaagtattccattggcacgtatttgtccatctgtttgtagaagtaatgactcttacgttaaccaatatgacaaaatcaaattgtgtatctaagaatttggtaaaaatggatttcatactttttatctacaagctgtaaagccatagatatggtaattacttaaaagctaaacgttattttcctgtagccactgtacaggtctctttattaaccagtgttgtatgtgtgctttagttatcttcaaactcagggattgacaacctgtagcctatggctgtttttgtatggcctatgagctaagaatgatttttacattttaaaatggaagcaaaatattttgtgatgtgagaaaattatataaaattcaaaattcgccttttataaagtttcgtgtaatatagctgtacccattcacttacgtgttacttatggctgctcttgagttacaacagcaaagctgattagttgcagcagagacaatatggcccatacagcctaagatatttactgtctggccctttaaagaaaatatctggctatctctgtcctaattgttgaagtccttagtctacaaaaatggcagttttgttcatggactttggaaattgttaaaacaaaaaaatggcagttttgtataatttgaactaatacataaaagggactataagctttggaaaagagataaaagctgtgggggatgtgtgtgtatgtgtgtaaaaatttaaaaacttgagggtatagagaggggtgaagtctggaacattattgagaatgagaatgggaagtgaatagtaatagagaataattactcagaagaatgctgaatatcccggcctccctgctgg

SEQ ID NO: 183199 - DNA, 410 bp, Homo Sapiens
tacaaaaaagttggcaagagcacagttgagtagttgtggcagagaaaattttcggaccacaaaatctaaaatagttactatctagttctttatagaaaatgtttgccaacatttggcctagatttatatatgatctttctcatctcagaggaaataacagtcctatacaaataaaacacaggataagtaccttttcttaatggcaagattaattaggttgacgatgcgatagagagctaccagaaaggtctagacagaacaggcagcaaaagggcactgttcatgtggagagcaagcaaacctggtggtcattttttattagaaaggattgaggttcctttgcaggtttttttaaaaggcactgtcaatcagaagtatttcctaagggtatttcctctaatgccttagct

SEQ ID NO: 183200 - DNA, 768 bp, Homo Sapiens
ttggccccggaactagaactggtatctcttcaactacctgtgaaaactgatgtgatgaaaaggggaatttgaaggagccattccagaagacagggcgaaaactgaagtgcaatcagggccaagaaaaacagaaatagcaggacctggagttgcataggttgaatagttgaataggctgctctcctcagctggcaggaaacctggcagcctcctggtgcccaaggactgaaaaccttagaagcacctggagttggcagccttggcatggtcaggttggcacctctggaggtgcccaggcttccctggcagcattgtgagcagtggatggtgttgaagggcagccagaggaggaatggaacacatgctccttgctaaccacacggacaaggccacgttcacaggtacacaaaggacgggggtggaaggccaccttcgatgggtgcatcctccacgatgacctgctaacaaaggtgcatggatttcagagtctgattggcctacaacagcatttggcttgtggagacagtggttccctgatgaaaaactgccatgatgtaaggaagagcctgtcaaaacgagactggggtgctgcgtgttggggaggtggaggtgtggcttcccgagagaagctccacccgctggctgaatctggcacataaaccagtctgtgaggggatggatgtgggtgtaatgggggcaattacagtaggaagggagcccacgtgggagcctgcattctctgagacagagcaatactgcattctctgg

SEQ ID NO: 183201 - DNA, 918 bp, Homo Sapiens
ttggggaaggaatctgtttgctttaatagacctagtctcgtaccctcaatttaaagatgggaacattacaaaataaaataatgaagttatttgcttaagttgcaaaaggaatcatttaccaagcaagcctcttggctcaatatagtgtccattctacattaccagaagttatccatgtgcatagctaaggagactgagtgctgagtaaaaagcgactctctcaaagaactattactttattgtgttggcaatcattactttattgtattggttatcatccctgatagcccactaacttagtggacagaacaacaaatgggatttgagttaggcttctgacatgtcatttctaaaattattagaatgatctcatggtttgttctgggaagtttaaagttcagagactagacagggtctattaatgttgctattttctgtatttacattttagttggaaattgaaggaggctttttaattggcttacgatatcactgagaggttgctctgttgctaaaagctgatacttgtgctattataaataataaaaacaataagtacttggaatgattgtaatttattacttgatattcttccttgaaagcatttcttttgtttgattgaagaatgtttgctaaattttaaaccctacatcttgagctttttctcacttcccccacagaactgtgaagcagtactgttttgcaaaatattcataaaatgacaagtttaagctgcatattgttttcatgaaaatatgaagaccaatcacttgtttcttggtggttttacatattatttatatcagtctggaactgtgaaaaattattctataccaaatatatttttctctgtcaagtttattatgaaatatttatttctcacaatgaaaaatgctgcccatcagtcacaatattttt

SEQ ID NO: 183202 - DNA, 570 bp, Homo Sapiens
actttgtacaaaaaagttggcatagacagtgtgaatgctccttttcatctacattgttactgtctctatgcaggttttcccttgtccctcatgggagttttcagtctgactactagcttcgtgttggccttacccagcctgcctctgtctgtctccctttccaagtgcatcttatgttaatccctgccttgcatcatatgccccctttacatgtgctccatcccaaaagatctagctgcagaatggcttctccataaaaaccttccccagccctctcagacaaaattagttttccatattttacatcttcacagttctttctactggcctctcctctaacactgtaattcacactgcagcatataagactactcatttttatacaggaatcccactgaaaaataagtatatccaagagaggcagctccataccttctacaaggagattacttaatgtgctaaggagggattccaggtaatgcagtcaaaaccttttctcacttggtgtcataacagaagataggaacatttacctttccccctacatgtatcattaaacagtagaaggtt

SEQ ID NO: 183203 - DNA, 890 bp, Homo Sapiens
ttgggataatattaaaagaactatgtgttctctagcaatgtaacacttaatgaacatttttaaattttcttactatgtgttagttatggcattagcattctgcaatgcaaaagatgaaagcaaccagtctttgtcctggtaggaggcaaagtgtgaatggttgctgtggctggaagctgtgttgctttcttcacaaccaagcttaccccgtcaaaacaaatgagccaggcaaatccttttcttgaggggaaaacctcacagaatctaaacactttaactgtgattctgatctatttatttctcctctccttccttatactctgtcatgtctggaacccagcaatgattagagtcacaggacagagaagaactgttgggggcagagtttgtagatagataatgtagaaccttctagaccatggcaggatttttgaatattactttgaatgacatggaaaatcattaaagagattgaggcaaagagaatcgtatatctgaaaggattattctgagttctgtagagtaagaaaatatcataaggtataaggagcaaagcaagggatctaaatgggaggttataggaataatcccaggcaagggataacagagacacagactagcctgccagcaataaatgtgaaaagttttcagattctggatatattttgaagacaaagccggtaggatttgctgaaaaattgaattcaggatgtaagagaaatgattcaaagataaaaccacagatttgggttttataatttggaagaatggattgctactaactgagatggagatgacttcgggagagcaggtttgatgatggatattggccattttattggccatgttaatttgagatgtctgatatacatgtataaatgtgacatgaa

SEQ ID NO: 183204 - DNA, 766 bp, Homo Sapiens
actttgtacaaaaaagttggctctgcgttgactaattcttctaattctcccctgacctctttctttcaatcccctgctcttgatcctacattctgaatgactctttttcattggcttctcttcattcatctgctctcatctgtctggcttccccgatggtagtatcttgccgctcttcactgactttctgttctacctgtgcctcccgaatccctcatttgcttgcttaattcttcgcgaatctaccaatgattgatgagattgtgtttggatttcattaattctggacacctctttgaatgtgaccctcagaatgtctacctttttatattggtcttcccttgaaaatctctacactaagtttctttggactagcaatgttattttaatgttctcttcctactctatgcctccatccccctccctttacatttgttgatcgcattttttttcatggatcgatgaatttatatgatgatgtcttttttttattgaagtgttagtgccccttgcatagacgaccttcactgtgtctctacttcccctgatacttccatgactccactcccctgagaccttccattatgcattctgtgtcatcgtgactccagtatatcatctcatggacttataagatattaatcactgtatctgattgttaagtttctcgagacgctgacattcattccctgttctacttaccacctcagctcatagcgagacacttttgtcagaggaggttgtacaatgagcaccacacaaaaac

SEQ ID NO: 183205 - DNA, 611 bp, Homo Sapiens
actttgtacaaaaaagttggggactttttagtggctctctcctcaggcatgggaatcattatttcttctacctttagaaagggtgaccacctggtgctgcccacaccttggacagccttgctttccaagaacagacgtggaatgtggaacagcctcgaaaagaatgtatatggatgcttatggactgaacagctattatggacacccattgctgatgactctttttcagttttctaggggaaagctcgggactgaggtcattgcagaaggttgggatttagatgactgccatttaggtcacgagatgtctgggtcacagccatgaccgcgtaaatctatcctcttagtcactggctgcccaccgtccagctacctgctgatatttaacagaaatagggaaatacgaaaaagacggcttttgttttgttttcttttccttatatttttaaatgtttcacctgatttccagttttgctaagaatggacttctctttcaagtttcttggaaaacatggagaaaatcaatgacctctgcttatcctcattgtttccttcactgtcacgccactttcctttgatccctactctgttatcctgaacaacgtgtggta

SEQ ID NO: 183206 - DNA, 304 bp, Homo Sapiens
gtttggaaaatccacttggatcttgctggtgcaaacagaagagcggcttctttaaaaaatggagagtcaactagatgccaaactagagaagggatgaggtgaactaagctgtattatggaagaggacagcaatggagtggcatacacgcgaaccttgtactatgcagtaacccggaaaaacacggaaaacttcaaccataataatataaaaagaacaatgtgaaaaaaatgttggaaacactggaagcaaatgccaatatgcaacagtagactgttgagtgtgagagcacagattatttgtaca

SEQ ID NO: 183207 - DNA, 907 bp, Homo Sapiens
caataattctattgctttaaaatccttgatctgtgaaaattatgacattttgacgagagacccagccacgctaataaatgcatatgtattaaatactaatctttgctcttccaggagctgatcactcacccacgccctgaattctctagacacacaactaagctttggtactccacccgtttactgtgtagctttccaaccccgaggcctgctgctggtctttagcttgcctttcctggcctggcattgtcagctctcagcagccccaccccaggcctatcccagttaggcaataggtacaatggaggcaagagcaggtgacctgcatgaggcttataccttcacaacctgggcagcaatactgaaatatcaaagcactgttaatccacactctagcctcagtcaaagtggactagaaggatttctcattcatgtttggccaggaatgaaattactaataccaacaggcctagaaagtttccactgctgtttcagcttctcctttaagacatcagatccgttggcttcatccaaatggccacgtgaacaacctttccctgtgcatgggggtgctttagaagaggaaaatgaaatcactggtccatctgaaaattccccaggaaatggactgcaaagcctacttcctgactccaacgaaggcagaggctgagtcatctaatccctcccgactagtattcacttgacttgcaccaagtaggtcagctggagtcgtctgaattctgctctctgtcctcgtaagcagccaccccctgcagtggagctactggagcatgctgggtctggtctcttctgcgaggtcttcactcagcctcagcccacaaagttgatgttacataacctctcctaagtttctcttttctcatttgcaaaatgggaagagtcccaa

SEQ ID NO: 183208 - DNA, 891 bp, Homo Sapiens
tacccagctggatgtcaaaaaaccgcgtagacaatatcacactgtagtttatggtaaaggtttcctggacaggatagcaatccttgactgtatagatgccaatccaggtttcataggatctagctgactttctgtccgaccactcctggacggtgatctgctcctgaggccccccaatggagtactggtcttcaaaggtggagttttgaggaatgtcaagaggatcccagggctgtgtcagggtcatctttgagcactgcttggtggcttggtcaatctgaaacatcactccatccttatacagcaaaatatattcaaataatctcttgcaggggatcagcgccttcctctcgtccagcacccgcacgcgctggttgagcccgtcgtaggagagcagggcgcggctgttgcgcccgctactttgctggtacataacctggcgcccctcccactgctgcggcgcctggcacgggcgcggggctcccaccgcccccaggctgcacaggccgcacagggtccaggcccagaggccgcccagcagccaggcacccagggcgcccgggacggtgcggaggggagcgcgtcctggcatcgcggtcagccttccccggcccgagggcaagcccaagcccaagggggcgctgaggcgtccgggatcagagtggctcccgccggctctttccgcactgtgccgggagtgtggtctggaccaaagtgcttcctgtcccttcggtggcctctgccgcttttgagatccggacgcgcgagtcccggtagccgggaccagggcccggggaaggctccagtgaatcgcgcgggagctatttctgcctgggccactgcctgctgccactgccccaacttttttgtacaaagttggcttttttaaag

SEQ ID NO: 183209 - DNA, 1963 bp, Homo Sapiens
  misc_feature (933)..(951): n is a, c, g, or t
  misc_feature (1724)..(1739): n is a, c, g, or t
ttgggctaggagccggtcagagggtgagtggggagcaggcgagcgagccacagcaggcaggagggagcgtcgcgcggcgcagaggagcgccggggcagggccgcggcggaaccacagccggagaggggcagcccgagccgggcgccgcagggtccccacccccacccggccggacagtgcccggtgttcccccgtgcggggggcggcggcggcggctgacgggaccgccgggaccgcgggggtgttgccacctccaccgaggagccggcgcggccgcgggctcctcagagccggggccccgggcccgtgacagacgggccgaggaagggagagaggcggcggcgacaccatgtcatctcccagtccgggcaagaggcggatggacacggacgtggtcaagctcatcgagagtaaacatgaggttacgatcctgggaggacttaatgaatttgtagtgaagttttatggaccacaaggaacaccatatgaaggcggagtatggaaagttagagtggacctacctgataaataccctttcaaatctccatctatagatcttaccaatatatttgagtccttcctgcctcagttattggatcctaaccccatagatcctctcaatggtgacgctgcagccatgtacctccaccgaccagaagaatacaagcagaaaattaaagagtacatccagaaatacgccacggaggaggcgctgaaagaacaggaagagggtaccggggacagctcatcggagagctctatgtctgacttttccgaagatgaggcccaggatatggagttgtagtagaaaaagcacctgcttttcagaaagactattatttcctaaccatgagaagcagactataatattcatatttaaacaaagcaattttttttattactaaacaaggtttttatgaataatagcattgnnnnnnnnnnnnnnnnnnncaccctttagatcttgatttcttggtcatttctcaacctgaggtgcatagcatattcccacattccatttggtagcaatatgcggtctgaatgcatgcattcatgagtccatgtggccaagtcagcctgtgtgctactgaactgtcgaaggaaatagccgctctgataggtagatgtgagtaaaaagaacaggaaaaaattgcttcttttattggtttccaaagaaacaaaccaaaccaaccagctcttggatgtgaagataaaatagtgcttttttgaaatggagaggaaaaacttggggaggaagaggcctgctgtgggggcatcggagccagccatgtaagaatcagagctgctccttcctgtgaatcctaggtggccctatgtcttctgtggagttacagtataaagcagggagctaattaagagtattaaaacttaaaaccattttttgactctgattttaagtacatttttatatgtcagttgctgcccttcacactaccaggccctgcagccacagtgttctgttggagaaacttggggaagtgttttctgaaccagttctttttcttggggtagagcgtgaaatccagacctgtttttgaaaggacagcacaggaggagaaaagtgactgggacgatgcttcctctcatccaaaacacatgcagagtcacatcctcatcctagtgtttggcagtttgagaccgctaccctgaacttaagagctttaaatatgagggttgtgtttctgggggggttatttttttgnnnnnnnnnnnnnnnnattgtgcttagaaaggttgcagatttcatcttcacctaccaagaggcggccgcctccttggacaagccgctcatggaccattagacttgagaagacgacccacatggtgactgcaaagccctgggtacttgccttcatgttctggtttggttttccctttttctgctgctcttggcagcagcctggtcatcatctgcttgtgggagtgggaaatgggtatttta

SEQ ID NO: 183210 - DNA, 1995 bp, Homo Sapiens
  misc_feature (1032)..(1050): n is a, c, g, or t
  misc_feature (1823)..(1838): n is a, c, g, or t
ttggggaggctgctaggagccggtcagagggtgagtggggagcaggcgagcgagccacagcaggcaggagggagcgtcgcgcggcgcagaggagcgccggggcagggccgcggcggaaccacagccggagaggggcagcccgagccgggcgccgcagggtccccacccccacccggccggacagtgcccggtgttcccccgtgcggggggcggcggcggcggctgacgggaccgccgggaccgcgggggtgttgccacctccaccgaggagccggcgcggccgcgggctcctcagagccggggccccgggcccgtgacagacgggccgaggaagggagagaggcggcggcgacaccatgtcatctcccagtccgggcaagaggcggatggacacggacgtggtcaagctcatcgagagtaaacatgaggttacgatcctgggaggacttaatgaatttgtagtgaagttttatggaccacaaggaacaccatatgaaggcggagtatggaaagttagagtggacctacctgataaataccctttcaaatctccatctataggattcatgaataaaattttccatcccaacattgatgaagcgtcaggaactgtgtgtctagatgtaattaatcaaacttggacagctctctatgatcttaccaatatatttgagtccttcctgcctcagttattggcctatcctaaccccatagatcctctcaatggtgacgctgcagccatgtacctccaccgaccagaagaatacaagcagaaaattaaagagtacatccagaaatacgccacggaggaggcgctgaaagaacaggaagagggtaccggggacagctcatcggagagctctatgtctgacttttccgaagatgaggcccaggatatggagttgtagtagaaaaagcacctgcttttcagaaagactattatttcctaaccatgagaagcagactataatattcatatttaaagcaattttttttattactaaacaaggtttttatgaataatagcattgnnnnnnnnnnnnnnnnnnncaccctttagatcttgatttcttggtcatttctcaacctgaggtgcatagcatattcccacattccatttggtagcaatatgcggtctgaatgcatgcattcatgagtccatgtggccaagtcagcctgtgtgctactgaactgtcgaaggaaatagccgctctgataggtagatgtgagtaaaaagaacaggaaaaaattgcttcttttattggtttccaaagaaacaaaccaaaccaaccagctcttggatgtgaagataaaatagtgcttttttgaaatggagaggaaaaacttggggaggaagaggcctgctgtgggggcatcggagccagccatgtaagaatcagagctgctccttcctgtgaatcctaggtggccctatgtcttctgtggagttacagtataaagcagggagctaattaagagtattaaaacttaaaaccattttttgactctgattttaagtacatttttatatgtcagttgctgcccttcacactaccaggccctgcagccacagtgttctgttggagaaacttggggaagtgttttctgaaccagttctttttcttggggtagagcgtgaaatccagacctgtttttgaaaggacagcacaggaggagaaaagtgactgggacgatgcttcctctcatccaaaacacatgcagagtcacatcctcatcctagtgtttggcagtttgagaccgctaccctgaacttaagagctttaaatatgagggttgtgtttctgggggggttatttttttgnnnnnnnnnnnnnnnnattgtgcttagaaaggttgcagatttcatcttcacctaccaagagcggccgcctccttggacaagccgctcatggaccattagacttgagaagacgacccacgtggtgactgcaaagccctgggtacttgccttcatgttctggtttggattttccc

SEQ ID NO: 183211 - DNA, 1359 bp, Homo Sapiens
  misc_feature (100)..(115): n is a, c, g, or t
  misc_feature (1009)..(1023): n is a, c, g, or t
ttggcatcctcatcctagtgtttggcagtttgagaccgctaccctgaacttaagagctttaaatatgagggttgtgtttctgggggggttatttttttgnnnnnnnnnnnnnnnnattgtgcttagaaaggttgcagatttcatcttcacctaccaagaggcggccgcctccttggacaagccgctcatggaccattagacttgagaagacgacccacgtggtgactgcaaagccctgggtacttgccttcatgttctggtttggttttccctttttctgctgctcttggcagcagcctggtcatcatctgcttgtgggagtgggaaatgggtattttagacccaacacaggttctaaatttaaaacaaataataattggaacaaataaaggttcttgtacccagagtgattctacatgggaaaaacaaaccagcttttttcagagagtgaccgaataggaagaagggattcagaaatatgatgtagtagaacatgccctgcaggaagaaaatgttttctctcctgcgtatgttaagaggaaatcagtttaaaatgcctgctaatcaaatgtcgactcagctaaccatatgtccaggttgctgcagagtttctttcaaatctgagtgttgcctgctgaactcggaggggagtttggagaaattttagacagcagctctgtgttctttttttgccgcagccaataagataatagcagaattagccaatcctaaaaccttctaaagacgatttttgagcatcccactgggattatttaatttttctttttgacgtgtgtttttagtttagaagtgctgtattccacaaggtttaagtcagtgaggttggaagataccctatcttttttattcaaaaagcacaatcaatcttttgtttgaaaatctatataaagtacaacttgcttttagcatgattattttcctaaataaaaagacaaagaatttacttactttatgttaattacgggcatgaagcaaaaggttttctttnnnnnnnnnnnnnnngtgcagtgatgtagggctgtggttagttaaccgtactgagttatccatctagcatctgtggcttgctggaagggtagtattaactatttaacatgtaatggtgtacttcactcttacctagcacgctgtcttctcattgctttgggggagggagggtctctctgctggcactgtctaacttgcttacctgctgactttgcagtttgcttgtgctatgacatttattgtatgtgctatttagggtagggcttaaagtgctgggtggtgatttgagttcaaacaataaaaaattgtattttttcaatattgtataaacaatagtgttctaattacctt

SEQ ID NO: 183212 - DNA, 1169 bp, Homo Sapiens
ctttgtacaaaaaagttgggacccctcccgtgggccccaagatcccccaggctttggagaagatcctgcagctgaaggagagccgccaggaagagatgaattctcagcaggaggaagaggaaatggaaacagatgctcgctcgtccctgggccagtcagcgtcagagactgaggaggacacagtgtccgtatctaaaaaggaggtagggattggagctgagtgtggaaggaaagccaggagatgggacttgggtacggaaataacacaatttgtaagagttcagtaagtaatagcttctattttgtgccaatttccgccctcagcatcttatagatatttttcatttaattgctttgagttccaagtactatacgtgcctacattttacagctgaaaaagcagaggttctgagacgcacagtaatttacccaaaggcatacagcttgtgagtggcagaactttggagtctgactccaaggccccttcgcagctacttcatgagatggcctccttgggaaaagcctgactgttgaactgtgggggagaatgggggaggagtttaggggttggggtgctggcacagtgcttggattccctgacccagctggttttcctcctcttgacagaaaaaccggaagcgtaggaaccgaaagaagaagaaaaagccccagcgggtgcgaggggtgtcctctgagagctctggggaccgggagaaagactcaacccggtcccgtggctctgattccccagcagctgatgttgagattgagtatgtgactgaagaacctgaaatttacgagcccaactttatcttctttaagaggatctttgaggcttttaagaaggagaaagagaaagagccagagaaacttgacaaactggagaactctgcagcccccaagaagaagggatttgaagaggagcacaaggacagtgatgatgacagcagtgatgacgagcaggaaaagaagccagaagcccccaagctgtccaagaagaagttgcgccgaatgaaccgcttcactgtggctgaactcaagcagctggtggctcggcccgatgtcgtggagatgcacgatgtgacagcgcagaccctaaggctcttgggtcacctcaaggccactcggaactctgtgcctgtgccacgcccactggtgttttagcgcaa

SEQ ID NO: 183213 - DNA, 1868 bp, Homo Sapiens
ttggcttgcctagtgggccttccttcccaggtcgcccgtcagtctccactagagacaggactgaccagttgctcttccttccaagaaccttcgagatctgcggtctggggtctggttgaaagatggcggccctcactaccctgtttaagtacatagatgaaaatcaggatcgctacattaagaaactcgcaaaatgggtggctatccagagtgtgtctgcgtggccggagaagagaggcgaaatcaggaggatgatggaagttgctgctgcagatgttaagcagttggggggctctgtggaactggtggatatcggaaaacaaaagctccctgatggctcggagatcccgctccctcctattctgctcggcaggctgggctccgacccacagaagaagaccgtgtgcatttacgggcacctggatgtgcagcctgcagccctggaggacggctgggacagcgagcccttcaccctggtggagcgagacggcaagctgtatgggagaggttcgactgatgataagggcccggtggccggctggataaacgccctggaagcgtatcagaaaacaggccaggagattcctgtcaacgtccgattctgcctcgaaggcatggaggagtcaggctctgagggcctagacgagctgatttttgcccggaaagacacattctttaaggatgtggactacgtctgcatttctgacaattactggctgggaaagaagaagccctgcatcacctacggcctcaggggcatttgctactttttcatcgaggtggagtgcagcaacaaagacctccattctggggtgtacgggggctcggtgcatgaggccatgactgatctcattttgctgatgggctctttggtggacaagagggggaacatcctgatccccggcattaacgaggccgtggccgccgtcacggaagaggagcacaagctgtacgacgacatcgactttgacatagaggagtttgccaaggatgtgggggcgcagatcctcctgcacagccacaagaaagacatcctcatgcaccgatggcggtacccgtctctgtccctccatggcatcgaaggcgccttctctgggtctggggccaagaccgtgattcccaggaaggtggttggcaagttctccatcaggctcgtgccgaacatgactcctgaagtcgtcggcgagcaggtcacaagctacctaactaagaagtttgctgaactacgcagccccaatgagttcaaggtgtacatgggccacggtgggaagccctgggtctccgacttcagtcaccctcattacctggctgggagaagagccatgaagacagtttttggtgttgagccagacttgaccagggaaggcggcagtattcccgtgaccttgacctttcaggaggccacgggcaagaacgtcatgctgctgcctgtggggtcagcggatgacggagcccactcccagaatgaaaagctcaacaggtataactacatagagggaaccaagatgctggccgcgtacctgtatgaggtctcccagctgaaggactaggccaagccctctgtgtgccatctccaatgagaaggaatcctgccctcacctcacccttttccaacttgcccagggaagtggaggttccctctttcctttccctcttgtcaggtcatccatgactttagagaacagacacaagtgtatccagctgtccacgggtggagctacccgttgggcttatgagtgacctggagtgacagctgagtcaccctgggtaagttctcagagtggtcaggatggcttgacctgcagaagatacccaaggtccaaaagcacaaggtctgcggaaagttctggttgtcggctgggcaccac

SEQ ID NO: 183214 - DNA, 2162 bp, Homo Sapiens
  misc_feature (328)..(604): n is a, c, g, or t
  misc_feature (608)..(624): n is a, c, g, or t
  misc_feature (1665)..(1713): n is a, c, g, or t
tttgtacaaaaaagttggattatttttgccttacagtggatcattctagtaggaaaggacaataagattttttatcaaaatgtgtcatgccagtaagagatgttatattcttttctcatttcttccccacccaaaaataagctaccatatagcttataagtctcaaatttttgccttttactaaaatgtgattgtttctgttcattgtgtatgcttcatcacctatattaggcaaattccattttttcccttgcgctaaggtaaagatttaattaaataattttggcctctcatagttttctctctctttaaagagaataaatagagnnnnnnnnnnnnnnnnnnnnnnnnnnnnnnnnnnnnnnnnnnnnnnnnnnnnnnnnnnnnnnnnnnnnnnnnnnnnnnnnnnnnnnnnnnnnnnnnnnnnnnnnnnnnnnnnnnnnnnnnnnnnnnnnnnnnnnnnnnnnnnnnnnnnnnnnnnnnnnnnnnnnnnnnnnnnnnnnnnnnnnnnnnnnnnnnnnnnnnnnnnnnnnnnnnnnnnnnnnnnnnnnnnnnnnnnnnnnnnnnnnnnnnnnnnnnnnnnnnnnnnnnnnnnnnnnnnnnntttnnnnnnnnnnnnnnnnngagagagagagaataaatagaaaagaatgtggctgggaattgtgaatcagaagattataccccccaatttttttcaatccccttttctcaaataataaattagttaaatcagtttctgagttatgccactggctgatgaagagttgagaggtctctttgcagaatgatctttttgtttcgttttgtttcttcttctgcatttaaaaattaaaagattggtttgaggatgtgatgaaattgagactttttgtggttttctctcaataataagtgaaccaatttcaaatgtgatcacaaagtttggaaagcttttattcacagaggttgggtagtgttgggaggggagtttaattactcagattggcctgttatttgatttcctcctttgggaaaagaattatgtagataccacatggagacagggaaacaattgtggtaaaactgtggatcctgttgctatttgcccagtgagaaaacagattctggtatttgatttggtttttctctttgtttccagaatggatgaaagtccatgaacctcctaagttataatttaaatttgtttggggcaaggtgattttatagtcgagacagagccctaggtccttcctgccccatcactcacttacgacatcacttccattgtgtgcatgtttgttatagaggaggttttaggctacaatatttgtttaacctccctaagaactttcaaggcatctgtcctgaaagctgttaatttatggtctagcagatttatattatatgcagataataattaactggggataaaagaatggcaaggggtgacacaaagtagcaaactgaatacttctccaatagcaaccccaagctacctcctcaccctgcatcttggagggaggcaggaaatttcttttgaaataaagtgctggagctgaattctgcattacttatcgttgctgctgaaaccacctataaaagacttgctggctaatgtgcattgtcatataatgtacactgtcacatctttacagtcttgtatgttatagaatacaaaataannnnnnnnnnnnnnnnnnnnnnnnnnnnnnnnnnnnnnnnnnnnnnnnnccttcataggttatatgccaagatagtatttgataagtcaatgacatttggatgttttcttcaaagaattttatttgacccagatttcttataaagttatcttacattaaggatgtcattttcatcagaccttctttctacatattattcatgaagcataatgttgcatttctccaaattttatgcctgaaagggtagtgttgcttcctaaggtatcatgttgtctttgtgctttgtccatctcttccgtggcgaagctttatatctgttcctaaaacagttaatcctgtgaaataaatattgaacataatccagaagaatctctctgtttcccttggggaatgccatatttaattcaccagcagtaatcctttaataactggcagagcactttattcttctggtgagctccctgaatatttatttttctgattataaattttctatat

SEQ ID NO: 183215 - DNA, 1459 bp, Homo Sapiens
ttgggtcagccgcgagctgaaggagctcaaggaacagatggaatcccagttggaaaaggaggcccggttccgacagctgatggcccacagctcccacgactcggccattgacacggattccatggagtgggaaacggaagttgtagagttcgagagggagacggaggatattgacttgaaggcactggggtttgatatggcagaaggtgtgaatgagccttgtttcccgggggactgtggcatatttgtcactaaagtggacaaaggaagcattgctgatggccgcttaagggtcaatgactggctgctgagaatcaacgatgtggacctcatcaacaaggacaagaagcaggccatcaaggcgctcctcaatggggagggggccatcaacatggtcgtgcggcggaggaagtccctgggtgggaaggtggtcacgccgctgcacatcaacctcagtggacagaaagacagtggcatcagtctggagaatggagtgtatgctgccgctgtgctgcctggaagccctgccgctaaagaagggtcccttgctgtgggagacaggatcgttgcgatcaatggcattgcactggacaacaagtctctgaatgaatgtgaatctctgctgcggagctgccaggactccctgaccctgtccctcctgaaggtattccctcagagctcctcgtggagtggccagaacatttttgaaaatatcaaagactctgataagatgctgagttttcgagcccatggcccggaggtccaggctcataacaaacggaacttgatacagcacaataactccacgcagacagacatcttctacacggacaggctggaagacaggaaggagccaggccccccaggaggcagcagctcctttctgcataagccattccctgggggacccttgcaggtctgcccccaggcctgtcccagtgcctctgagcgtagcctgagctccttccgctcagatgcctctggggaccgtggctttgggctggtggacgtgcgtggccggcggccactgctgccctttgagaccgaggtgggcccctgtggggttggggaggcctccctggacaaggcagactctgaaggctccaacagcggcgggacctggcccaaggccatgctcagctccacggcagtgcctgagaagctctctgtttataaaaagccaaagcaaagaaagtccatctttgaccctaacactttcaaacgcccccagacaccccccaaaatagactacctgcttccaggtcctgggcctgctcactctccccagccctccaagagggcggggcctctgacacccccaaacctcccagaggagcgactccattaagttccagcacaggctgggagactagctcccgagtcagaagccactctggtgggcagctccccatccactaatcccccgagcgcctgccccctgacgtgggaccccggggga

SEQ ID NO: 183216 - DNA, 2216 bp, Homo Sapiens
actttgtacaaaaaagttggcagatcccgaggtccgacagcgcccggcccagatccccacgcctgccaggagcaagccgagagccagccggccggcgcactccgactccgagcagtctctgtccttcgacccgagccccgcgccctttccgggacccctgccccgcgggcagcgctgccaacctgccggccatggagaccccgtcccagcggcgcgccacccgcagcggggcgcaggccagctccactccgctgtcgcccacccgcatcacccggctgcaggagaaggaggacctgcaggagctcaatgatcgcttggcggtctacatcgaccgtgtgcgctcgctggaaacggagaacgcagggctgcgccttcgcatcaccgagtctgaagaggtggtcagccgcgaggtgtccggcatcaaggccgcctacgaggccgagctcggggatgcccgcaagacccttgactcagtagccaaggagcgcgcccgcctgcagctggagctgagcaaagtgcgtgaggagtttaaggagctgaaagcgcgcaataccaagaaggagggtgacctgatagctgctcaggctcggctgaaggacctggaggctctgctgaactccaaggaggccgcactgagcactgctctcagtgagaagcgcacgctggagggcgagctgcatgatctgcggggccaggtggccaagcttgaggcagccctaggtgaggccaagaagcaacttcaggatgagatgctgcggcgggtggatgctgagaacaggctgcagaccatgaaggaggaactggacttccagaagaacatctacagtgaggagctgcgtgagaccaagcgccgtcatgagacccgactggtggagattgacaatgggaagcagcgtgagtttgagagccggctggcggatgcgctgcaggaactgcgggcccagcatgaggaccaggtggagcagtataagaaggagctggagaagacttattctgccaagctggacaatgccaggcagtctgctgagaggaacagcaacctggtgggggctgcccacgaggagctgcagcagtcgcgcatccgcatcgacagcctctctgcccagctcagccagctccagaagcagctggcagccaaggaggcgaagcttcgagacctggaggactcactggcccgtgagcgggacaccagccggcggctgctggcggaaaaggagcgggagatggccgagatgcgggcaaggatgcagcagcagctggacgagtaccaggagcttctggacatcaagctggccctggacatggagatccacgcctaccgcaagctcttggagggcgaggaggagaggctacgcctgtcccccagccctacctcgcagcgcagccgtggccgtgcttcctctcactcatcccagacacagggtgggggcagcgtcaccaaaaagcgcaaactggagtccactgagagccgcagcagcttctcacagcacgcacgcactagcgggcgcgtggccgtggaggaggtggatgaggagggcaagtttgtccggctgcgcaacaagtccaatgaggaccagtccatgggcaattggcagatcaagcgccagaatggagatgatcccttgctgacttaccggttcccaccaaagttcaccctgaaggctgggcaggtggtgacgatctgggctgcaggagctggggccacccacagcccccctaccgacctggtgtggaaggcacagaacacctggggctgcgggaacagcctgcgtacggctctcatcaactccactggggaagaagtggccatgcgcaagctggtgcgctcagtgactgtggttgaggacgacgaggatgaggatggagatgacctgctccatcaccaccatggctcccactgcagcagctcgggggaccccgctgagtacaacctgcgctcgcgcaccgtgctgtgcgggacctgcgggcagcctgccgacaaggcatctgccagcggctcaggagcccaggtgggcggacccatctcctctggctcttctgcctccagtgtcacggtcactcgcagctaccgcagtgtggagggcagtgggggtggcagcttcggggacaaatctggtcacccgctcctacctcctgggcaactccagctcccgaaacccaaagctcccagaactgcagcatcatgtaatctgggacctgccaggcaggggtggggg

SEQ ID NO: 183217 - DNA, 2427 bp, Homo Sapiens
  misc_feature (2306)..(2326): n is a, c, g, or t
ttggccagaggcaggggcaggggcagaggccgggtggtgtggtgtcggtgtcggcagcatccccggcgccctgctgcggtcgccgcgagcctcggcctctgtctcctccccctcccgcccttacctccacgcgggaccgcccgcgccagtcaactcctcgcactttgcccctgcttggcagcggataaaagggggctgaggaaataccggacacggtcacccgttgccagctctagcctttaaattcccggctcggggacctccacgcaccgcggctagcgccgacaaccagctagcgtgcaaggcgccgcggctcagcgcgtaccggcgggcttcgaaaccgcagtcctccggcgaccccgaactccgctccggagcctcagccccctggaaagtgatcccggcatcggagagccaagatgccggcccacttgctgcaggacgatatctctagctcctataccaccaccaccaccattacagcgcctccctccagggtcctgcagaatggaggagataagttggagacgatgcccctctacttggaagacgacattcgccctgatataaaagatgatatatatgaccccacctacaaggataaggaaggcccaagccccaaggttgaatatgtctggagaaacatcatccttatgtctctgctacacttgggagccctgtatgggatcactttgattcctacctgcaagttctacacctggctttggggggtattctactattttgtcagtgccctgggcataacagcaggagctcatcgtctgtggagccaccgctcttacaaagctcggctgcccctacggctctttctgatcattgccaacacaatggcattccagaatgatgtctatgaatgggctcgtgaccaccgtgcccaccacaagttttcagaaacacatgctgatcctcataattcccgacgtggctttttcttctctcacgtgggttggctgcttgtgcgcaaacacccagctgtcaaagagaaggggagtacgctagacttgtctgacctagaagctgagaaactggtgatgttccagaggaggtactacaaacctggcttgctgatgatgtgcttcatcctgcccacgcttgtgccctggtatttctggggtgaaacttttcaaaacagtgtgttcgttgccactttcttgcgatatgctgtggtgcttaatgccacctggctggtgaacagtgctgcccacctcttcggatatcgtccttatgacaagaacattagcccccgggagaatatcctggtttcacttggagctgtgggtgagggcttccacaactaccaccactcctttccctatgactactctgccagtgagtaccgctggcacatcaacttcaccacattcttcattgattgcatggccgccctcggtctggcctatgaccggaagaaagtctccaaggccgccatcttggccaggattaaaagaaccggagatggaaactacaagagtggctgagtttggggtccctcaggttcctttttcaaaaaccagccaggcagaggttttaatgtctgtttattaactactgaataatgctaccaggatgctaaagatgatgatgttaacccattccagtacagtattcttttaaaattcaaaagtattgaaagccaacaactctgcctttatgatgctaagctgatattatttcttctcttatcctctctctcttctaggcccattgtcctccttttcactttattgctatcgccctcctttcccttattgcctcccaggcaagcagctggtcagtctttgctcagtgtccagcttccaaagcctagacaacctttctgtagcctaaaacgaatggtctttgctccagataactctctttccttgagctgttgtgagctttgaagtaggtggcttgagctagagataaaacagaatcttctgggtagtcccctgttgattatcttcagcccaggcttttgctagatggaatggaaaagcaacttcatttgacacaaagcttctaaagcaggtaaattgtcgggggagagagttagcatgtatgaatgtaaggatgagggaagcgaagcagaggaacctctcgccatgatcagacatacagctgcctacctaatgaggacttcaagccccaccacatagcatgcttcctttctctcctggctcggggtaaaaagtggctgcggtgtttggcaatgctaattcaatgccgcaacatatagttgaggccgaggataaagaaaagacattttaagtttgtagtaaaagtggtctctgctggggaagggnnnnnnnnnnnnnnnnnnnnnaataacaagagatttcttagttcatatatcaagaagtcttgaagttgggtgtttccagagttggtaaaaacagcagctcatagaatttgagtattccatga

SEQ ID NO: 183218 - DNA, 1560 bp, Homo Sapiens
  misc_feature (336)..(344): n is a, c, g, or t
  misc_feature (754)..(774): n is a, c, g, or t
  misc_feature (1178)..(1190): n is a, c, g, or t
ttggattagagtatttcccttccaaagagggatgtttggaaaaaactctgaaggagaggaggaattagttgggatgccaatttcctctccactgctggacatgagatggagaggctgagggacaggatctataggcagcttctaagagcgaacttcacataggaagggatctgagaacacgttgccaggggcttgagaaggttactgagtgagttattgggagtcttaataaaataaactagatattaggtccattcattaattagttccagtttctccttgaaatgagtaaaaactagaaggcttctctccacagtgttgtgccccttcactcannnnnnnnngaggagaagggggtctctgttaacatctagcctaaagtatacaactgcctggggggcagggttaggaatctcttcactaccctgattcttgattcctggctctaccctgtctgtcccttttctttgaccagatctttctcttccctgaacgttttcttctttccctggacaggcagcctcctttgtgtgtattcagaggcagtgatgacttgctgtccaggcagctccctcctgcacacagaatgctcagggtcactgaaccactgcttctcttttgaaagtagagctagctgccactttcacgtggcctccgcagtgtctccacctacacccctgtgctcccctgccacactgatggctcaagacaaggctggcaaaccctcccagaaacatctctggcccagaaagcnnnnnnnnnnnnnnnnnnnnnatgaggcacagccaagccaagcgctcatgttgagccagtgggccagccacagagcaaaagagggtttattttcagtcccctctctctgggtcagaaccagagggcatgctgaatgccccctgcttacttggtgagggtgccccgcctgagtcagtgctctcagctggcagtgcaatgcttgtagaagtaggaggaaacagttctcactgggaagaagcaagggcaagaacccaagtgcctcacctcgaaaggaggccctgttccctggagtcagggtgaactgcaaagctttggctgagacctgggatttgagataccacaaaccctgctgaacacagtgtctgttcagcaaactaaccagcattccctacagcctagggcagacaatagtatagaagtctggnnnnnnnnnnnnncagaatttgagaaccttggaccactcctgtccctgtagctcagtcatcaaagcagaagtctggctttgctctattaagattggaaatgtacactaccaaacactcagtccactgttgagccccagtgctggaagggaggaaggcctttcttctgtgttaattgcgtagaggctacaggggttagcctggactaaaggcatccttgtcttttgagctattcacctcagtagaaaaggatctaagggaagatcactgtagtttagttctgttgacctgtgcacctaccccttggaaatgtctgctggtatttctaattccacaggtcatcagatgcctgcttgataatatataaacaataaaaacaactttc

SEQ ID NO: 183219 - DNA, 1507 bp, Homo Sapiens
  misc_feature (310)..(322): n is a, c, g, or t
  misc_feature (1156)..(1164): n is a, c, g, or t
gaaataccagcagacatttccaagggtaggtgcacaggtcaacagaactaaactacagtgatcttccttagatccttttctactgaggtgaatagctcaaaagacaaggatgcctttagtccaggctaacccctgtagcctctacgcaattaacacagaagaaaggccttcctcccttccagcactggggctcaacagtggactgagtgtttggtagtgtacatttccaatcttaatagagcaaagccagacttctgctttgatgactgagctacagggacaggagtggtccaaggttctcaaattctgnnnnnnnnnnnnnccagacttctatactattgtctgccctaggctgtagggaatgctggttagtttgctgaacagacactgtgttcagcagggtttgtggtatctcaaatcccaggtctcagccaaagctttgcagttcaccctgactccagggaacagggcctcctttcgaggtgaggcacttgggttcttgcccttgcttcttcccagtgagaactgtttcctcctacttctacaagcattgcactgccagctgagagcactgactcaggcggggcaccctcaccaagtaagcagggggcattcagcatgccctctggttctgacccagagagaggggactgaaaataaaccctcttttgctctgtggctggcccactggctcaacatgagcgcttggcttggctgtgcctcatgagagagggagggagagagaggctttctgggccagagatgtttctgggagggtttgccagccttgtcttgagccatcagtgtggcaggggagcacaggggtgtaggtggagacactgcggaggccacgtgaaagtggcagctagctctactttcaaaagagaagcagtggttcagtgaccctgagcattctgtgtgcaggagggagctgcctggacagcaagtcatcactgcctctgaatacacacaaaggaggctgcctgtccagggaaagaagaaaacgttcagggaagagaaagatctggtcaaagaaaagggacagacagggtagagccaggaatcaagaatcagggtagtgaagagattcctaaccctgccccccaggcagttgtatactttaggctagatgttaacagagacccccttctcctcnnnnnnnnntgagtgaaggggcacaacactgtggagagaagccttctagtttttactcatttcaaggagaaactggaactaattaatgaatggacctaatatctagtttattttattaagactcccaataactcactcagtaaccttctcaagcccctggcaacgtgttctcagatcccttcctatgtgaagttcgctcttagaagctgcctatagatcctgtccctcagcctctccatctcatgtccagcagtggagaggaaattggcatcccaactaattcctcctctccttcagagttttttccaaacatccctctttggaagggaaatactctaatagtttaacccaa

SEQ ID NO: 183220 - DNA, 3247 bp, Homo Sapiens
  misc_feature (409)..(532): n is a, c, g, or t
  misc_feature (921)..(935): n is a, c, g, or t
ttgggtcaacttctcagagttttctaagaagtgctcagagaggtggaagaccatgtctgctaaagagaaaggaaaatttgaggatatggcaaaggcggacaagacccattatgaaagacaaatgaaaacctatatccctcccaaaggggagacaaaaaagaagttcaaggatcccaatgcacccaagaggcctccttcggccttcttcctgttctgctctgagtatcacccaaaaatcaaaggagaacatcctggcctgtccattggtgatgttgcgaagaaactgggagagatgtggaataacactgctgcagatgacaagcagcctggtgaaaagaaggctgcgaagctgaaggaaaaatacgaaaaggatattgctgcatatcaagctaaaggaaagcctgaggcnnnnnnnnnnnnnnnnnnnnnnnnnnnnnnnnnnnnnnnnnnnnnnnnnnnnnnnnnnnnnnnnnnnnnnnnnnnnnnnnnnnnnnnnnnnnnnnnnnnnnnnnnnnnnnnnnnnnnnnnnnnntaagttggctctagcgcagttttttttcttgtcttaaagcatttaacgcccctgtacacaactcactccttttaaagaaaaaaattgaaatgtaaggctgtgtaagatttgtttttaaactgtacagtgtcgttttttgtatggttaatacactaccaaatgtgtctttagatggccctgtcctggtggtattttcaatagtcactaaccttgcctggtagagtatgggggttgtaaattggcatggaaatttaaagcaggttcttgttggtgcgcagcacaaattagttatatatggggatggtagttttttcatcttcagttgtctctgatgcagcttatacgaaataattgttgttctgttaactgaataccactctgtaattgcnnnnnnnnnnnnnnngttgcagctgttttgttgacattctgaatgcttctaagtaaatacaattttttttattagtattgttgtccttttcataggtctgaaatttttcttcttgaggggaagctagtcttttgcttttgcccattttgaatcacatgaattattacagtgtttatcctttcatatagttagctaataaaaagcttttgtctacacaccctgcatatcataatgggggtaaagttaagttgagatagttttcatccataactgaacatccaaaatcttgatcagttaagaaatttcacatagcccacttacatttacaaactgaagagtaatcaatctactcaaagcatgggattattagaatcaaacattttgaaagtctgtccttgaaggactaatagaaaagtatgttctaacctttacatgaggactctattctttaactcccattaccatgtaatggcagttatattttgcagttcccacattaaagaagacctgagaatgtatccccaaaagcgtgagcttaaaatacaagactgccatattaaattttttgttgacattagtctcagtgaagactatgaaaatgctggctatagatgtcttttcccatttatctaaatatggactgctcaggaaacgagactttccattacaagtatttttaattaattgggccagcttttcaaacaaagatgccacattcaaaatagggtatattttcctatattacggtttgcccctttataaatccaagtagataggaagaaagaagacaaactttgcatctcagtatgaattattcaatttatttgaatgatttttctttacaaaacaaactcattcattagtcatgtttatctgcttaggagtttagggaacaatttggcaattttgtggttttcgagattatcgttttcttaaagtgccagtattttaaaatagcgttcttgtaattttacacgcttttgtgatggagtgctgttttgttatataatttagacttggattctttccatttgcatttgtttatgtaatttcaggaggaatactgaacatctgagtcctggatgatactaataaactaataattgcagaggttttaaatactagttaaatggctttcacttaagaacttaagattttgttacatatttttaaatcttgtttctaataatacctcttagcagtaccttttaaataagtataagggatggcaaagtttttccctttaaaaatactcactttatgcttataaataggttaatgggctgataaaaggttttgtcaaacattgcaagtattcggtgctatatataaaggaggaaaaactagttttactttcagaatgatttaaacaagatttttaaaaacaagatacatgcaagcgaacagcagggttagtgataggctgcaattgtgtcgaacatcagattttttgttaagaggagcaaatgactcaatctgatttagatggaagtttctactgtatagaaatcaccattaatcaccaacattaataattctgatccatttaaaatgaattctggctcaaggagaatttgtaactttagtaggtacgtcatgacaactaccatttttttaagatgttgagaatgggaacagtttttttagggtttattcttgaccacagatcttaagaaaatggacaaaacccctcttcaatctgaagattagtatggtttggtgttctaacagtatcccctagaagttggatgtctaaaactcaagtaaatggaagtgggaggcaatttagataagtgtaaagccttgtaactgaagatgattttttttagaaagtgtatagaaactattttaatgccaagatagttacagtgctgtggggtttaaagactttgttgacatcaagaaaagactaaatctataattaattgggccaacttttaaaatgaagatgctttttaaaactaatgaactaagatgtataaatcttagttttttttgtattttaaagataggcatatggcatattgattaacgagtcaaatttcctaactttgctgtgcaaaggttgagagctattgctgattagttaccacagttctgatgatcgtcccatcacagtgttgttaatgtttgctgtatttattaattttcttaaagtgaaatctgaaaaatgaaatttgtgtgtcctgtgtacccgaggggtaatgattaaatgataaagataagaaaagcgcccatgtaacacaaactgccattcaacaggtatttcccttactacctaaggaattgtaaccattgctcagacattgtaggatttaactatgttg

SEQ ID NO: 183221 - DNA, 1821 bp, Homo Sapiens
  misc_feature (603)..(704): n is a, c, g, or t
  misc_feature (724)..(734): n is a, c, g, or t
  misc_feature (1097)..(1109): n is a, c, g, or t
ttgggggtgtttctcctcctttcctccctcccagatcttctcacgaaaaataactaaacatgggcaaaggagatcctaagaagccgagaggcaaaatgtcatcatatgcattttttgtgcaaacttgtcgggaggagcataagaagaagcacccagatgcttcagtcaacttctcagagttttctaagaagtgctcagagaggtggaagaccatgtctgctaaagagaaaggaaaatttgaagatatggcaaaagcggacaaggcccgttatgaaagagaaatgaaaacctatatccctcccaaaggggagacaaaaaagaagttcaaggatcccaatgcacccaagaggcctccttcggccttcttcctcttctgctctgagtatcgcccaaaaatcaaaggagaacatcctggcctgtccattggtgatgttgcgaagaaactgggagagatgtggaataacactgctgcagatgacaagcagccttatgaaaagaaggctgcgaagctgaaggaaaaatacgaaaaggatattgctgcatatcgagctaaaggaaagcctgatgcagcaaaaaagggagttgtcaaggctgaaaaaagcnnnnnnnnnnnnnnnnnnnnnnnnnnnnnnnnnnnnnnnnnnnnnnnnnnnnnnnnnnnnnnnnnnnnnnnnnnnnnnnnnnnnnnnnnnnnnnnnnnnnnntaagttggttctagcgcagnnnnnnnnnnncttgtctataaagcatttaacccccctgtacacaactcactccttttaaagaaaaaaattgaaatgtaaggctgtgtaagatttgtttttaaactgtacagtgtctttttttgtatagttaacacactaccgaatgtgtctttagatagccctgtcctggtggtattttcaatagccactaaccttgcctggtacagtatgggggttgtaaattggcatggaaatttaaagcaggttcttgttggtgcacagcacaaattagttatatatggggatggtagttttttcatcttcagttgtctctgatgcagcttatacgaaataattgttgttctgttaactgaataccactctgtaattgcnnnnnnnnnnnnngttgcagctgttttgttgacattctgaatgcttctaagtaaatacaattttttttattagtattgttgtccttttcataggtctgaaatttttcttcttgaggggaagctagtcttttgcttttgcccattttgaatcacatgaattattacagtgtttatcctttcatatagttagctaataaaaagcttttgtctacacaccctgcatatcataatgggggtaaagttaagttgagatagttttcatccataactgaacatccaaaatcttgatcagttaagaaatttcacatagcccacttacatttacaaactgaagagtaatcaatctactcaaagcatgggattattagaatcaaacattttgaaagtctgtccttgaaggactaatagaaaagtatgttctaacctttacatgaggactctattctttaactcccattaccatgtaatggcagttatattttgcagttcccacattaaagaagacctgagaatgtatccccaaaagcgtgagcttaaaatacaagactgccatattaaattttttgttgacattagtctcagtgaagactatgaaaatgctggctatagatgtcttttcccatttatctaaatatgggactgctcaggaaacgagactttccttacaagtatttttaattaattgggccagcttttccaacaagatgccacattcaaatagggta

SEQ ID NO: 183222 - DNA, 893 bp, Homo Sapiens
  misc_feature (464)..(580): n is a, c, g, or t
  misc_feature (600)..(609): n is a, c, g, or t
ttgtacaaaaaagttggagaagaagcccccagatgcttcagtcaacttctcagagttttctaagaagtgctcagagaggtggaagaccatgtctgctaaagagaaaggaaaatttgaagatatggcaaaagcggacaaggcccgttatgaaagagaaatgaaaacctatatccctcccaaaggggagacaaaaaagaagttcaaggatcccaatgcacccaagaggcctccttcggccttcttcctcttctgctctgagtatcgcccaaaaatcaaaggagaacatcctggcctgtccattggtgatgttgcgaagaaactgggagagatgtggaataacactgctgcagatgacaagcagccttatgaaaagaaggctgcgaagctgaaggaaaaatacgaaaaggatattgctgcatatcgagctaaaggaaagcctgatgcagcaaaaaagggagttgtcnnnnnnnnnnnnnnnnnnnnnnnnnnnnnnnnnnnnnnnnnnnnnnnnnnnnnnnnnnnnnnnnnnnnnnnnnnnnnnnnnnnnnnnnnnnnnnnnnnnnnnnnnnnnnnnnnnnnntaagttggttctagcgcagnnnnnnnnnncttgtctataaagcatttaacccccctgtacacaactcactccttttaaagaaaaaaattgaaatgtaaggctgtgtaagatttgtttttaaactgtacagtgtctttttttgtatagttaacacactaccgaatgtgtctttagatagccctgtcctggtggtatttttcaatagccactaaccttgcctggtacagtatgggggttgtaaattggcatggaaattttaaaagcaggttcttgttggtgcacagcacaaattagttatatatgggggatggta

SEQ ID NO: 183223 - DNA, 2715 bp, Homo Sapiens
  misc_feature (1203)..(1212): n is a, c, g, or t
  misc_feature (1693)..(1785): n is a, c, g, or t
  misc_feature (1805)..(1814): n is a, c, g, or t
  misc_feature (2177)..(2190): n is a, c, g, or t
ccaactttgtacaaaaaagttggcgctctcacagccattgcagtacattgagctccatagagacagcgccggggcaagtgagagccggacgggcactgggcgactctgtgcctcgctgaggaaaaataactaaacatgggcaaaggagatcctaagaagccgagaggcaaaatgtcatcatatgcattttttgtgcaaacttgtcgggaggagcataagaagaagcacccagatgcttcagtcaacttctcagagttttctaagaagtgctcagagaggtggaagaccatgtctgctaaagagaaaggaaaatttgaagatatggcaaaagcggacaaggcccgttatgaaagagaaatgaaaacctatatccctcccaaaggggagacaaaaaagaagttcaaggatcccaatgcacccaagaggcctccttcggccttcttcctcttctgctctgagtatcgcccaaaaatcaaaggagaacatcctggcctgtccattggtgatgttgcgaagaaactgggagagatgtggaataacactgctgcagatgacaagcagccttatgaaaagaaggctgcgaagctgaaggaaaaatacgaaaaggtaagaagtgtgggtttgcttggtaaaatgatgacaagtacgccagatgtatgattgtacttagtttgaggtgtaataagtttttagggtaacagctacattaagtatggtgttgatataaagtcctcatccttcaaagaatgcagaggaccaaataaattagggtttttttgactaaaatgtaatcagactcagacaaaggctgtgtacatttatgttggttttgttattccccagtatcttgaagttcatgaaaatgttggtagtcacttcaagtcaaaaatgagcattttcaaatggcttggcatacagtacaaaaacaggctagacaaagtaatataggctatatttttcttagtcatatcctgaaacatttatgttcttttcctttagatactcaaaaaaccacagcatcactaagttaaattacaagtctgctgctctgtccagtaaattaataagattaaggaaatctataactcttatagttcagtaaattgaaatattaaatacttaattttcagctttagtcattctgaaaagtgtttatttctagatgtttcttaacctaattgcatgtttattgacaaattaccnnnnnnnnnnaagaccacatttcctactaaggattaaggtctgacagtgtaaacctgtagagtgcttttttgcattcagaaggtggcagtgtctaccctttaatcaaagtctctacattctggttttaatagagttaggatgtggtacataattgcacctcaatgaggcataactttgcaaatattagactatgccatttcatgagttatagattgttataatgatcttgtatttttatgttcatttattgaagttctagttatttctggagttgctgtggatctacagatacgtgatattttggtataactagaatcttgatttctttcataaagttctgccatgttctatttctttccttaatgtttttttcttccctactgttttatcctccctttgctttggaaggatattgctgcatatcgagctaaaggaaagcctgatgcagcaaaaaagggagttgtcaaggctgaaaaaagcaagaaaaagnnnnnnnnnnnnnnnnnnnnnnnnnnnnnnnnnnnnnnnnnnnnnnnnnnnnnnnnnnnnnnnnnnnnnnnnnnnnnnnnnnnnnnnnnnnnntaagttggttctagcgcagnnnnnnnnnncttgtctataaagcatttaacccccctgtacacaactcactccttttaaagaaaaaaattgaaatgtaaggctgtgtaagatttgtttttaaactgtacagtgtctttttttgtatagttaacacactaccgaatgtgtctttagatagccctgtcctggtggtattttcaatagccactaaccttgcctggtacagtatgggggttgtaaattggcatggaaatttaaagcaggttcttgttggtgcacagcacaaattagttatatatggggatggtagttttttcatcttcagttgtctctgatgcagcttatacgaaataattgttgttctgttaactgaataccactctgtaattgcnnnnnnnnnnnnnngttgcagctgttttgttgacattctgaatgcttctaagtaaatacaattttttttattagtattgttgtccttttcataggtctgaaatttttcttcttgaggggaagctagtcttttgcttttgcccattttgaatcacatgaattattacagtgtttatcctttcatatagttagctaataaaaagcttttgtctacacaccctgcatatcataatgggggtaaagttaagttgagatagttttcatccataactgaacatccaaaatcttgatcagttaagaaatttcacatagcccacttacatttacaaactgaagagtaatcaatctactcaaagcatgggattattagaatcaaacattttgaaagtctgtccttgaaggactaatagaaaagtatgttctaacctttacatgaggactctattctttaactcccattaccatgtaatggcagttatattttgcagttcccacattaaagaagacctgagaatgtatccccaaaagcgtgagcttaaa

SEQ ID NO: 183224 - DNA, 1474 bp, Homo Sapiens
  misc_feature (656)..(748): n is a, c, g, or t
  misc_feature (768)..(777): n is a, c, g, or t
  misc_feature (1140)..(1153): n is a, c, g, or t
ctttgtacaaaaaagttggctccatagagaccgcaaaaggggcaagtgagagccggacgggcactgggcgactctgtgcctcgctgaggaaaaataactaaacatgggcaaaggagatcctaagaagccgagaggcaaaatgtcatcatatgcattttttgtgcaaacttgtcgggaggagcataagaagaagcacccagatgcttcagtcaacttctcagagttttctaagaagtgctcagagaggtggaagaccatgtctgctaaagagaaaggaaaatttgaagatatggcaaaagcggacaaggcccgttatgaaagagaaatgaaaacctatatccctcccaaaggggagacaaaaaagaagttcaaggatcccaatgcacccaagaggcctccttcggccttcttcctcttctgctctgagtatcgcccaaaaatcaaaggagaacatcctggcctgtccattggtgatgttgcgaagaaactgggagagatgtggaataacactgctgcagatgacaagcagccttatgaaaagaaggctgcgaagctgaaggaaaaatacgaaaaggatattgctgcatatcgagctaaaggaaagcctgatgcagcaaaaaagggagttgtcaaggctgaaaaaagcaagaaaaagnnnnnnnnnnnnnnnnnnnnnnnnnnnnnnnnnnnnnnnnnnnnnnnnnnnnnnnnnnnnnnnnnnnnnnnnnnnnnnnnnnnnnnnnnnnnntaagttggttctagcgcagnnnnnnnnnncttgtctataaagcatttaacccccctgtacacaactcactccttttaaagaaaaaaattgaaatgtaaggctgtgtaagatttgtttttaaactgtacagtgtctttttttgtatagttaacacactaccgaatgtgtctttagatagccctgtcctggtggtattttcaatagccactaaccttgcctggtacagtatgggggttgtaaattggcatggaaatttaaagcaggttcttgttggtgcacagcacaaattagttatatatggggatggtagttttttcatcttcagttgtctctgatgcagcttatacgaaataattgttgttctgttaactgaataccactctgtaattgcnnnnnnnnnnnnnngttgcagctgttttgttgacattctgaatgcttctaagtaaatacaattttttttattagtattgttgtccttttcataggtctgaaatttttcttcttgaggggaagctagtcttttgcttttgcccattttgaatcacatgaattattacagtgtttatcctttcatatagttagctaataaaaagcttttgtctacacaccctgcatatcataatgggggtaaagttaagttgagatagttttcatccataactgaacatcccaaaatcttgatcagttaagaaatttcacatagcccacttacatttacaaactgaa

SEQ ID NO: 183225 - DNA, 2390 bp, Homo Sapiens
ttggatgaaacagagattaacattacgaagaccaccatcaaggagatatccatgcaaaaagaggatgattccaaaaatcttagaaaccagcttgatagactttcaagggaaaatcgagatctgaaggatgaaattgtcaggctcaatgacagcatcttgcaggccactgagcagcgaaggcgagctgaagaaaacgcccttcagcaaaaggcctgtggctctgagataatgcagaagaagcagcatctggagatagaactgaagcaggtcatgcagcagcgctctgaggacaatgcccggcacaagcagtccctggaggaggctgccaagaccattcaggacaaaaataaggagatcgagagactcaaagctgagtttcaggaggaggccaagcgccgctgggaatatgaaaatgaactgagtaaggcatctaataggattcaggaatcaaagaatcagtgtactcaggtggtacaggaaagagagagccttctggtgaaaatcaaagtcctggagcaagacaaggcaaggctgcagaggctggaggatgagctgaatcgtgcaaaatcaactctagaggcagaaaccagggtgaaacagcgcctggagtgtgagaaacagcaaattcagaatgacctgaatcagtggaagactcaatattcccgcaaggaggaggctattaggaagatagaatcggaaagagaaaagagtgagagagagaagaacagtcttaggagtgagatcgaaagactccaagcagagatcaagagaattgaagagaggtgcaggcgtaagctggaggattctaccagggagacacagtcacagttagaaacagaacgctcccgatatcagagggagattgataaactcagacagcgcccatatgggtcccatcgagagacccagactgagtgtgagtggaccgttgacacctccaagctggtgtttgatgggctgaggaagaaggtgacagcaatgcagctctatgagtgtcagctgatcgacaaaacaaccttggacaaactattgaaggggaagaagtcagtggaagaagttgcttctgaaatccagccattccttcggggtgcaggatctatcgctggagcatctgcttctcctaaggaaaaatactctttggtagaggccaagagaaagaaattaatcagcccagaatccacagtcatgcttctggaggcccaggcagctacaggtggtataattgatccccatcggaatgagaagctgactgtcgacagtgccatagctcgggacctcattgacttcgatgaccgtcagcagatatatgcagcagaaaaagctatcactggttttgatgatccattttcaggcaagacagtatctgtttcagaagccatcaagaaaaatttgattgatagagaaaccggaatgcgcctgctggaagcccagattgcttcagggggtgtagtagaccctgtgaacagtgtctttttgccaaaagatgtcgccttggcccgggggctgattgatagagatttgtatcgatccctgaatgatccccgagatagtcagaaaaactttgtggatccagtcaccaaaaagaaggtcagttacgtgcagctgaaggaacggtgcagaatcgaaccacatactggtctgctcttgctttcagtacagaagagaagcatgtccttccaaggaatcagacaacctgtgaccgtcactgagctagtagattctggtatattgagaccgtccactgtcaatgaactggaatctggtcagatttcttatgacgaggttggtgagagaattaaggacttcctccagggttcaagctgcatagcaggcatatacaatgagaccacaaaacagaagcttggcatttatgaggccatgaaaattggcttagtccgacctggtactgctctggagttgctggaagcccaagcagctactggctttatagtggatcctgttagcaacttgaggttaccagtggaggaagcctacaagagaggtctggtgggcattgagttcaaagagaagctcctgtctgcagaacgagctgtcactgggtataatgatcctgaaacaggaaacatcatctctttgttccaagccatgaataaggaactcatcgaaaagggccacggtattcgcttattagaagcacagatcgcaaccggggggatcattgacccaaaggagagccatcgtttaccagttgacatagcatataagaggggctatttcaatgaggaactcagtgagattctctcagatccaagtgatgataccaaaggattttttgaccccaacactgaagaaaatcttacctatctgcaactaaaagaaagatgcattaaggatgaggaaacagggctctgtcttctgcctctgaaaga

SEQ ID NO: 183226 - DNA, 3547 bp, Homo Sapiens
  misc_feature (3391)..(3435): n is a, c, g, or t
ttggctatttcagaaactggaaaatatcaatggtgttacagatggctacttaaatagcttatgcacagtaagggcactgctccaggctattctccaaacagaagacatgttaaaggtttatgaagccaggctcactgaggaggaaactgtctgcctggacctggataaagtggaagcttaccgctgtggactgaagaaaataaaaaatgacttgaacttgaagaagtcgttgttggccactatgaagacagaactacagaaagcccagcagatccactctcagacttcacagcagtatccactttatgatctggacttgggcaagttcggtgaaaaagtcacacagctgacagaccgctggcaaaggatagataaacagatcgactttagattatgggacctggagaaacaaatcaagcaattgaggaattatcgtgataactatcaggctttctgcaagtggctctatgatgctaaacgccgccaggattccttagaatccatgaaatttggagattccaacacagtcatgcggtttttgaatgagcagaagaacttgcacagtgaaatatctggcaaacgagacaaatcagaggaagtacaaaaaattgctgaactttgcgccaattcaattaaggattatgagctccagctggcctcatacacctcaggactggaaactctgctgaacatacctatcaagaggaccatgattcagtccccttctggggtgattctgcaagaggctgcagatgttcatgctcggtacattgaactacttacaagatctggagactattacaggttcttaagtgagatgctgaagagtttggaagatctgaagctgaaaaataccaagatcgaagttttggaagaggagctcagactggcccgagatgccaactcggaaaactgtaataagaacaaattcctggatcagaacctgcagaaataccaggcagagtgttcccagttcaaagcgaagcttgcgagcctggaggagctgaagagacaggctgagctggatgggaagtcggctaagcaaaatctagacaagtgctacggccaaataaaagaactcaatgagaagatcacccgactgacttatgagattgaagatgaaaagagaagaagaaaatctgtggaagacagatttgaccaacagaagaatgactatgaccaactgcagaaagcaaggcaatgtgaaaaggagaaccttggttggcagaaattagagtctgagaaagccatcaaggagaagagtacgagattgaaaggttgagggttctactgcagaagaagcacccggaagagagaatatgaaaatgagctggcaaaggtaagaaaccactataatgaggagatgagtaatttaaggaacaagtatgaaacagagattaacattacgaagaccaccatcaaggagatatccatgcaaaaagaggatgattccaaaaatcttagaaaccagcttgatagactttcaagggaaaatcgagatctgaaggatgaaattgtcaggctcaatgacagcatcttgcaggccactgagcagcgaaggcgagctgaagaaaacgcccttcagcaaaaggcctgtggctctgagataatgcagaagaagcagcatctggagatagaactgaagcaggtcatgcagcagcgctctgaggacaatgcccggcacaagcagtccctggaggaggctgccaagaccattcaggacaaaaataaggagatcgagagactcaaagctgagtttcaggaggaggccaagcgccgctgggaatatgaaaatgaactgagtaaggtaagaaacaattatgatgaggagatcattagcttaaaaaatcagtttgagaccgagatcaacatcaccaagaccaccatccaccagctcaccatgcagaaggaagaggataccagtggctaccgggctcagatagacaatctcacccgagaaaacaggagcttatctgaagaaataaagaggctgaagaacactctaacccagaccacagagaatctcaggagggtggaagaagacatccaacagcaaaaggccactggctctgaggtgtctcagaggaaacagcagctggaggttgagctgagacaagtcactcagatgcgaacagaggagagcgtaagatataagcaatctcttgatgatgctgccaaaaccatccaggataaaaacaaggagatagaaaggttaaaacaactgatcgacaaagaaacaaatgaccggaaatgcctggaagatgaaaacgcgagattacaaagggtccagtatgacctgcagaaagcaaacagtagtgcgacggagacaataaacaaactgaaggttcaggagcaagaactgacacgcctgaggatcgactatgaaagggtttcccaggagaggactgtgaaggaccaggatatcacgcggttccagaactctctgaaagagctgcagctgcagaagcagaaggtggaagaggagctgaatcggctgaagaggaccgcgtcagaagactcctgcaagaggaagaagctggaggaagagctggaaggcatgaggaggtcgctgaaggagcaagccatcaaaatcaccaacctgacccagcagctggagcaggcatccattgttaagaagaggagtgaggatgacctccggcagcagagggacgtgctggatggccacctgagggaaaagcagaggacccaggaagagctgaggaggctctcttctgaggtcgaggccctgaggcggcagttactccaggaacaggaaagtgtcaaacaagctcacttgaggaatgagcatttccagaaggcgatagaagataaaagcagaagcttaaatgaaagcaaaatagaaattgagaggctgcagtctctcacagagaacctgaccaaggagcacttgatgttagaagaagaactgcggaacctgaggctggagtacgatgacctgaggagaggacgaagcgaagcggacagtgataaaaatgcaaccatcttggaactaaggagccagctgcagatcagcaacaaccggaccctggaactgcaggggctgattaatgatttacagagagagagggaaaatttgagacaggaaattgagaaattccaaaagcaggctttagaggcatctaataggattcaggaatcaaagaatcagtgtactcaggtggtacaggaaagagagagccttctggtgaaaatcaaagtcctggagcaagacaaggcaaggctgcagaggctggaggatgagctgaatcgtgcaaaatcaactctagaggcagaaaccagggtgaaacagcgcctggagtgtgagaaacagcaaattcagaatgacctgaatcagtggaagactcaatattcccgcaaggaggaggctatnnnnnnnnnnnnnnnnnnnnnnnnnnnnnnnnnnnnnnnnnnnnncagtcttagagtgagatcgaaagactccaagcagagatcaagagaattgaagagaggtgcagcgtaagctggagattctaccacggagacacagtcacagttagaaacagaa

SEQ ID NO: 183227 - DNA, 1342 bp, Homo Sapiens
ttggattaaggattatgagctccagctggcctcatacacctcaggactggaaactctgctgaacatacctatcaagaggaccatgattcagtccccttctggggtgattctgcaagaggctgcagatgttcatgctcggtacattgaactacttacaagatctggagactattacaggttcttaagtgagatgctgaagagtttggaagatctgaagctgaaaaataccaagatcgaagttttggaagaggagctcagactggcccgagatgccaactcggaaaactgtaataagaacaaattcctggatcagaacctgcagaaataccaggcagagtgttcccagttcaaagcgaagcttgcgagcctggaggagctgaagagacaggctgagctggatgggaagtcggctaagcaaaatctagacaagtgctacggccaaataaaagaactcaatgagaagatcacccgactgacttatgagattgaagatgaaaagagaagaagaaaatctgtggaagacagatttgaccaacagaagaatgactatgaccaactgcagaaagcaaggcaatgtgaaaaggagaaccttggttggcagaaattagagtctgagaaagccatcaaggagaaggagtacgagattgaaaggttgagggttctactgcaggaagaaggcacccggaagagagaatatgaaaatgagctggcaaaggcatctaataggattcaggaatcaaagaatcagtgtactcggtggtacaggaaagagagagccttctggtgaaaatcaaagtcctggagcaagacaaggcaaggctgcagaggctggaggatgagctgaatcgtgcaaaatcaactctagaggcagaaaccagggtgaaacagcgcctggagtgtgagaaacagcaaattcagaatgacctgaatcagtggaagactcaatattcccgcaaggaggaggctattaggaagatagaatcggaaagagaaaagagtgagagagagaagaacagtcttaggagtgagatcgaaagactccaagcagagatcaagagaattgaagagaggtgcaggcgtaagctggaggattctaccagggagacacagtcacagttagaaacagaacgctcccgatatcagagggagattgataaactcagacagcgcccatatgggtcccatcgagagacccagactgagtgtgagtggaccgttgacacctccaagctggtgtttgatgggctgaggaagaaatgacagcaatgcagctctatgagtgtcagctgatcgacaaacaaccttggacaaactattgaaggggaagaagtcagtggaagaa

SEQ ID NO: 183228 - DNA, 1542 bp, Homo Sapiens
aactttgtacaaaaaagttggcatgaataaggaactcatcgaaaagggccacggtattcgcttattagaagcacagatcgcaaccggggggatcattgacccaaaggagagccatcgtttaccagttgacatagcatataagaggggctatttcaatgaggaactcagtgagattctctcagatccaagtgatgataccaaaggattttttgaccccaacactgaagaaaatcttacctatctgcaactaaaagaaagatgcattaaggatgaggaaacagggctctgtcttctgcctctgaaagaaaagaagaaacaggtgcagacatcacaaaagaataccctcaggaagcgtagagtggtcatagttgacccagaaaccaataaagaaatgtctgttcaggaggcctacaagaagggcctaattgattatgaaaccttcaaagaactgtgtgagcaggaatgtgaatgggaagaaataaccatcacgggatcagatggctccaccagggtggtcctggtagatagaaagacaggcagtcagtatgatattcaagatgctattgacaagggccttgttgacaggaagttctttgatcagtaccgatccggcagcctcagcctcactcaatttgctgacatgatctccttgaaaaatggtgtcggcaccagcagcagcatgggcagtggtgtcagcgatgatgtttttagcagctcccgacatgaatcagtaagtaagatttccaccatatccagcgtcaggaatttaaccataaggagcagctctttttcagacaccctggaagaatcgagccccattgcagccatctttgacacagaaaacctggagaaaatctccattacagaaggtatagagcggggcatcgttgacagcatcacgggtcagaggcttctggaggctcaggcctgcacaggtggcatcatccacccaaccacgggccagaagctgtcacttcaggacgcagtctcccagggtgtgattgaccaagacatggccaccaggctgaagcctgctcagaaagccttcataggcttcgagggtgtgaagggaaagaagaagatgtcagcagcagaggcagtgaaagaaaaatggctcccgtatgaggctggccagcgcttcctggagttccagtacctcacgggaggtcttgttgacccggaagtgcatgggaggataagcaccgaagaagccatccggaaggggttcatagatggccgcgccgcacagaggctgcaagacaccagcagctatgccaaaatcctgacctgccccaaaaccaaattaaaaatatcctataaggatgccataaatcgctccatggtagaagatatcactgggctgcgccttctggaagccgcctccgtgtcgtccaagggcttacccagcccttacaacatgtcttcggctccgggctcccgctccggctcccgctcgggatctcgctccggatctcgctccgggtcccgcagtgggtcccggagaggaagctttgacgccacaggaattcttcctactcttat

SEQ ID NO: 183229 - DNA, 1279 bp, Homo Sapiens
cctataaaagccaactttgtacaaaaaagttggccagtcaccaaaaagaaggtcagttacgtgcagctgaaggaacggtgcagaatcgaaccacatactggtctgctcttgctttcagtacagaagagaagcatgtccttccaaggaatcagacaacctgtgaccgtcactgagctagtagattctggtatattgagaccgtccactgtcaatgaactggaatctggtcagatttcttatgacgaggttggtgagagaattaaggacttcctccagggttcaagctgcatagcaggcatatacaatgagaccacaaaacagaagcttggcatttatgaggccatgaaaattggcttagtccgacctggtactgctctggagttgctggaagcccaagcagctactggctttatagtggatcctgttagcaacttgaggttaccagtggaggaagcctacaagagaggtctggtgggcattgagttcaaagagaagctcctgtctgcagaacgagctgtcactgggtataatgatcctgaaacaggaaacatcatctctttgttccaagccatgaataaggaactcatcgaaaagggccacggtattcgcttattagaagcacagatcgcaactggggggatcattgacccaaaggagagccatcgtttaccagttgacatagcatataagaggggctatttcaatgaggaactcagtgagattctctcagatccaagtgatgataccaaaggattttttgaccccaacactgaagaaaatcttacctatctgcaactaaaagaaagatgcattaaggatgaggaaacagggctctgtcttctgcctctgaaagaaaagaagaaacaggtgcagacatcacaaaagaataccctcaggaagcgtagagtggtcatagttgacccagaaaccaataaagaaatgtctgttcaggaggcctacaagaagggcctaattgattatgaaaccttcaaagaactgtgtgagcaggaatgtgaatgggaagaaataaccatcacgggatcagatggctccaccagggtggtcctggtagatagaaagacaggcagtcagtatgatattcaagatgctattgacaagggccttgttgacaggaagttctttgatcagtaccgatccggcagcctcagcctcactcaatttgctgacatgatctccttgaaaatggtgtcacaccagcagcagcatgggcagtggtgtcagcgatgatgttttagcagctcccgacatgaatcagtaa

SEQ ID NO: 183230 - DNA, 1707 bp, Homo Sapiens
  misc_feature (1431)..(1439): n is a, c, g, or t
ttggctggctgctccagtcgcgggtccgggccccgcctctccactcggcggtggcgtccgtgttgttattgtggtggtagcggcgtctggctgctgcggaccccgccgagtcctagcgcctggcctgcgcgccgctgcccgcgccacaggattaatttatttttggaaatcaagtgcaatattggaagccatttctactaattttatttcacttttaaatttatgatttgatttgaatactatcatgggaggagctgtgagtgctggggaagataatgatgacttaattgataatttaaaagaagctcagtatattcgtactgaaagagtggagcaagccttcagagcgattgatcgtggagattactatttggaaggctacagagacaatgcttacaaagacttagcctggaagcatggaaacatccacttgtcagcaccttgcatttattctgaagttatggaagcattgaaacttcaaccaggattgtcttttcttaacctgggaagtggaaccggatatttaagtacaatggtgggcttaattttaggtccttttggaataaatcatgggattgagcttcattcagatgtggtggaatatgccaaggaaaaactggagagcttcatcaaaaatagtgatagctttgataaatttgagttctgtgaacctgcatttgttgttggtaattgcctccagatagcttctgacagtcatcagtatgatcgaatttattgtggagctggagtacagaaagaccatgaaaactacatgaaaatattactaaaagttggaggcatattagtcatgcctatagaggatcagttaacacagattatgcgaactggacagaacacttgggaaagtaaaaatatccttgctgtttcatttgctccacttgtgcaaccaagtaagaatgataatggcaaaccagattctgtgggactccctccctgtgctgtcaggaatctacaggacttggctcgtatttacattcgacgcacacttagaaatttcataaatgatgagatgcaggccaaggggattcctcaaagggctccacccaaaaggaaaagaaagagagttaaacagagaattaacacttacgtatttgtgggtaatcagcttattcctcagcctctagacagtgaagaggatgaaaaaatggaagaggatatcaaagaagaggaggaaaaagatcacaatgaagcaatgaagccagaggagccacctcaaaatttactgagagaaaaaatcatgaagctgcccctccctgaatctttaaaagcttacttgacatattttagagacaaataacttagatcaagaagaaaaatgcctactgataattcctttagtcttgaaaatgtagcatttgttaggagttaaaagagagaattatttctttcatcagagcaaattatagtggnnnnnnnnntcacttgtttctgtcagtaacacaaatgatgtattcagtgaataaaagaatcccttttataaaatctatttttctttaaatcttggaaaaatgttgttttagctcagagtgatttcaaagtggaatgcaacagtagtcaagacttgtgtactataaatccttttctgattccttacagatttgtagtgatgaggtttagatttaattttatatatggtttaaaataattgttaagcttatataacctgatctgaattgcagttgtttg

SEQ ID NO: 183231 - DNA, 1855 bp, Homo Sapiens
  misc_feature (1658)..(1674): n is a, c, g, or t
ctttgtacaaaaaagttggaaatccttttctgattccttacagatttgtagtgatgggtttagatttaattttatatatggtttaaataattgttaagcttatataacctgatctgaattgcagttgtttgcatttcctctatgaaaacttcatttatctaataaggaagtcaaatgctttgtagactatttaccttacttttgttgcaatcactgttgttgggttgctgtatatatattccgggcaatatatgagtgcaataacaatacaagatattgaataatttagctttaaaaaatcccacaaattttatgaaattttacagccctgctacttttgcttttgaatctcttgccaaaagacatgggtaaaatatctgcctctctcatagagattttaagagcacagcaagtgaattattaaaacaaagtctatacttaatacaactctttatatggaccctttacattttcagtatttaaaaaaataactctatagaattttaaaagtatatttagaattgttttttctgtagttcactgtataaagtatttggttttttaaaaaaagcaaaaccattgttatgtgtgactcttgataggacacagaacgagtgaatgagcatgagtgaggccactttcttggatggctgtaagtagcagggccagggtagacctggtcagcggatgcactttagcagatggaacttctagtttatctgaatatttatctttgacaaggtagggctgagcctacatttgcttttgatctatctagtataagaaatattcacagaaattgtatgtagataccctttgttttgaaaatgctgttcagaatcatagtgtaatctttgggacctatgccatgttcatttcactccttcccatattttttgtgtttcttttggtaaaactataatggttttcattttttacttaatatcacacagttaaactgtccatatttgagctttattttagcttatcagtgataaaaaacaggtagtaactgccattgtttgtttgttttcctaataaggcctgaaaacagccattccttgttaagaaagtgtacaatgtaacatatttgctagagttacatggattatatatttcttaaagggaaaaatttgagagtatcatggactaccaccagcattattattacagtagttactcagatttggttaaggaagcccaagcaatgtatagtgaaaggattattatctctctgctaagattcagatattgtttcagaaatctcagctccagtaattccacaacatctaaaaacaaatgtttgtgatcatgtgtaagcatgaaattgttccaagtaagtgaggatattttagttatgtgaaagacagtttcatggaaggtatttgttttataccagtggctgggatggtggaattggggttatttctacaattattcttagacgattactaaactgttaagaaatgccccatatcatttttgtatctaggaaagaaaaaaatcagtttcatactgttgtcatctgtcagaaatgctcattttattttgaattaaatgtggcttttgaagtacctagttaccttgaattcctggtgaccacatgtttttatctggaaaacctggagaaagttatctgtcccatctcccctgcttgnnnnnnnnnnnnnnnnnggttggagctgctgtttagatgatgcttttactatgcaggagagagtttttgttaaggatatatttgaagattggcttttccatattgtccttcattctttgaccatggcaaagtgtacagtagattttcatgatcattgcatatttcttgtcattgaaatgtatcttttatgtttttaaa

SEQ ID NO: 183232 - DNA, 1028 bp, Homo Sapiens
  misc_feature (799)..(807): n is a, c, g, or t
ttgggtttgtttttcaatgcagatttgagttctgtgaacctgcatttgttgttggtaattgcctccagatagcttctgacagtcatcagtatgatcgaatttattgtggagctggagtacagaaagaccatgaaaactacatgaaaatattactaaaagttggaggcatattagtcatgcctatagaggatcagttaacacagattatgcgaactggacagaacacttgggaaagtaaaaatatccttgctgtttcatttgctccacttgtgcaaccaagtaagaatgataatggcaaaccagattctgtgggactccctccctgtgctgtcaggaatctacaggacttggctcgtatttacattcgacgcacacttagaaatttcataaatgatgagatgcaggccaaggggattcctcaaagggctccacccaaaaggaaaagaaagagagttaaacagagaattaacacttacgtatttgtgggtaatcagcttattcctcagcctctagacagtgaagaggatgaaaaaatggaagaggatatcaaagaagaggaggaaaaagatcacaatgaagcaatgaagccagaggagccacctcaaaatttactgagagaaaaaatcatgaagctgcccctccctgaatctttaaaagcttacttgacatattttagagacaaataacttagatcaagaagaaaaacgcctactgataattcctttagtcttgaaaatgtagcatttgttaggagttaaaagagagaattatttctttcatcagagcaaattatagtggnnnnnnnnntcacttgtttctgtcagtaacacaaatgatgtattcagtgaataaaagaatcccttttataaaatctatttttctttaaatcttggaaaaatgttgttttagctcagagtgatttcaaagtggaatgcaacagtagtcaagacttgtgtactataaatccttttctgattccttacagatttgtagtgatgaggtttagatttaattttatatatgggttt

SEQ ID NO: 183233 - DNA, 1195 bp, Homo Sapiens
  misc_feature (349)..(370): n is a, c, g, or t
acaaaaaagttggtgaaattgttccaagtaagtgaggatattttagttatgtgaaagacagtttcatggaaggtatttgttttataccagtggctgggatggtggaattggggttatttctacaattattcttagacgattactaaactgttaagaaatgccccatatcatttttgtatctaggaaagaaaaaaatcagtttcatactgttgtcatctgtcagaaatgctcattttattttgaattaaatgtggcttttgaagtacctagttaccttgaattcctggtgaccacatgtttttatctggaaaacctggagaaagttatctgtcccatctcccctgcttgnnnnnnnnnnnnnnnnnnnnnnggttggagctgctgtttaaatgatgcttttactatgcaggaaaaagtttttgttaaggatatatttgaaaattggcttttccatattgtccttcattctttgaccgtggcaaagtgtacagtaaattttcatgatcattgcatatttcttgtcattgaaatgtatcttttatgtttttaaatgcattcattttacacttgtgagtttatcattgactttaagaggtagaaatgaaaaatgaaaattaaagctaaagcctttttatctattaatgcagatatattagaataagaatattttgggtttgtgtttattttttaatgaatttatgtttacttgatatggaaaattacgctttataggtggaaaagtagcaaataaagattaagtaaaagtaagtgaaaatgatggggaatatagtattggaattttatagctagttaaaacaataagtatcatctaatttgggtgtttattttgcagatgagaaaacagacctagaaccgtggcatgttttgcctgaaacatacagtgagttagagacagggcctaagatagcttctagcatcagatcaatcccaagaatccatcagcaacctcagaccaacccaagaagataatttaaatctatactgcttattggtcaatatatttggttctagtattaataaagaaaaatgttattaaaatagcatacatagtagtaaaataaaatacaaaaagtgtgttgatttatagctgtttgagatgataaaagtgaagcaaagcctgttaaatcattggaagacttggaaaattattttaaataaacaattacatgtaatt

SEQ ID NO: 183234 - DNA, 1279 bp, Homo Sapiens
  misc_feature (1148)..(1156): n is a, c, g, or t
tttttatcactgataagctaaaataaagctcaaatatggacagtttaactgtgtgatattaagtaaaaaatgaaaaccattatagtttaccaaaagaaacacaaaaaatatgggaaggagtgaaatgaacatggcataggtcccaaagattacactatgattctgaacagcattttcaaaacaaagggtatctacatacaatttctgtgaatatttcttatactagatagatcaaaagcaaatgtaggctcagccctaccttgtcaaagataaatattcagataaactagaagttccatctgctaaagtgcatccgctgaccaggtctaccctggccctgctacttacagccatccaagaaagtggcctcactcatgctcattcactcgttctgtgtcctatcaagagtcacacataacaatggttttgctttttttaaaaaaccaaatactttatacagtgaactacagaaaaaacaattctaaatatacttttaaaattctatagagttaagataacctcatttttttaaatactgaaaatgtaaagggtccatataaagagttgtattaagtatagactttgttttaataattcacttgctgtgctcttaaaatctctatgagagaggcagatattttacccatgtcttttggcaagagattcaaaagcaaaagtagcagggctgtaaaatttcataaaatttgtgggattttttaaagctaaattattcaatatcttgtattgttattgcactcatatattgcccggaatatatatacagcaacccaacaacagtgattgcaacaaaagtaaggtaaatagtctacaaagcatttgacttccttattagataaatgaagttttcatagaggaaatgcaaacaactgcaattcagatcaggttatataagcttaacaattatttaaaccatatataaaattaaatctaaacctcatcactacaaatctgtaaggaatcagaaaaggatttatagtacacaagtcttgactactgttgcattccactttgaaatcactctgagctaaaacaacatttttccaagatttaaagaaaaatagattttataaaagggattcttttattcactgaatacatcatttgtgttactgacagaaacaagtgannnnnnnnnccactataatttgctctgatgaaagaaataattctctcttttaactcctaacaaatgctacattttcaagactaaaggaattatcagtaggcatttttcttcttgatctaagttatttgtaca

SEQ ID NO: 183235 - DNA, 1956 bp, Homo Sapiens
ttggcccacgtggttggggtttccagaagcgctgccgccaccgcatcgcgcagctctttgccgtcggagcgcttgtttgctgcctcgtactcctccatttatccgccatgataagtgccagccgagctgcagcagcccgtctcgtgggcgccgcagcctcccggggccctacggccgcccgccaccaggatagctggaatggccttagtcatgaggcttttagacttgtttcaaggcgggattatgcatcagaagcaatcaagggagcagttgttggtattgatttgggtactaccaactcctgcgtggcagttatggaaggtaaacaagcaaaggtgctggagaatgccgaaggtgccagaaccaccccttcagttgtggcctttacagcagatggtgagcgacttgttggaatgccggccaagcgacaggctgtcaccaacccaaacaatacattttatgctaccaagcgtctcattggccggcgatatgatgatcctgaagtacagaaagacattaaaaatgttccctttaaaattgtccgtgcctccaatggtgatgcctgggttgaggctcatgggaaattgtattctccgagtcagattggagcatttgtgttgatgaagatgaaagagactgcagaaaattacttggggcacacagcaaaaaatgctgtgatcacagtcccagcttatttcaatgactcgcagagacaggccactaaagatgctggccagatatctggactgaatgtgcttcgggtgattaatgagcccacagctgctgctcttgcctatggtctagacaaatcagaagacaaagtcattgctgtatatgatttaggtggtggaacttttgatatttctatcctggaaattcagaaaggagtatttgaggtgaaatccacaaatggggataccttcttaggtggggaagactttgaccaggccttgctacggcacattgtgaaggagttcaagagagagacaggggttgatttgactaaagacaacatggcacttcagagggtacgggaagctgctgaaaaggctaaatgtgaactctcctcatctgtgcagactgacatcaatttgccctatcttacaatggattcttctggacccaagcatttgaatatgaagttgacccgtgctcaatttgaagggattgtcactgatctaatcagaaggactatcgctccatgccaaaaagctatgcaagatgcagaagtcagcaagagtgacataggagaagtgattcttgtgggtggcatgactaggatgcccaaggttcagcagactgtacaggatctttttggcagagccccaagtaaagctgtctctgggtattgaaactctaggaggtgtctttaccaaacttattaataggaataccactattccaaccaagaagagccaggtattctctactgccgctgatggtcaaacgcaagtggaaattaaagtgtgtcagggtgaaagagagatggctggagacaacaaactccttggacagtttactttgattggaattccaccagcccctcgtggagttcctcagattgaagttacatttgacattgatgccaatgggatagtacatgtttctgctaaagataaaggcacaggacgtgagcagcagattgtaatccagtcttctggtggattaagcaaagatgatattgaaaatatggttaaaaatgcagagaaatatgctgaagaagaccggcgaaagaaggaacgagttgaagcagttaatatggctgaggaatcattcacgacacagaaaccaagatggaagaattcaaggaccaattacctgctgatgagtgcaacaagctgaaagaagagatttccaaaatgagggagctcctggctagaaaagacagcgaaacagagaaaatattagacaggcagcatcctcttcttcagcaggcatcactgaagctgttcgaaa

SEQ ID NO: 183236 - DNA, 1308 bp, Homo Sapiens
  misc_feature (165)..(202): n is a, c, g, or t
  misc_feature (237)..(319): n is a, c, g, or t
ctttgtacaaaaaagttggggtggattacccctaaagatgatattgaaaatatggttaaaaatgcagagaaatatgctgaagaagaccggcgaaagaaggtgattacttcttgtcttctgaactttaatcttagtaaagctcagtcttgacagtgggagtttggnnnnnnnnnnnnnnnnnnnnnnnnnnnnnnnnnnnnnngtaagcccactgccaaggtgggcagatcgtttgannnnnnnnnnnnnnnnnnnnnnnnnnnnnnnnnnnnnnnnnnnnnnnnnnnnnnnnnnnnnnnnnnnnnnnnnnnnnnnnnnnagtttggacatgtcataggttgtgggtaagagaaaacctaagataatctattcttccttccccgttgtttataccttatgtttgcagtgcctttattatttcttctgttttccctgtcacaattctgatgttacaaaatctagcccaaatctctctcaaagccatcccagactctttcatgccactctgatttctccctcttactctatttttatctgtaactgtatgtaacacatagcttattgtctgagtatagacattcagcaaactttggttgattggaaagtcttcgtttaaacttctaatttctctaaggaacgagttgaagcagttaatatggctgaaggaatcattcacgacacagaaaccaagatggaagaattcaaggaccaattacctgctgatgagtgcaacaagctgaaagaagagatttccaaaatgagggagctcctggctagaaaagacagcgaaacaggagaaaatattagacaggcagcatcctctcttcagcaggcatcattgaagctgttcgaaatggcatacaaaaagatggcatctgagcgagaaggctctggaagttctggcactggggaacaaaaggaagatcaaaaggaggaaaaacagtaataatagcagaaattttgaagccagaaggacaacatatgaagcttaggagtgaagagacttcctgagcagaaatgggcgaacttcagtctttttactgtgtttttgcagtattctatatataatttccttaatttgtaaatttagtgaccattagctagtgatcatttaatggacagtgattctaacagtataaagttcacaatattctatgtccctagcctgtcatttttcagctgcatgtaaaagagtagatgaattgatcattataaagatttaactattttatgctgaagtgaccatattttcaagggtgaaaccatctcgcacacagcaatgaagtagtcatccatagacttgaaatg

SEQ ID NO: 183237 - DNA, 1803 bp, Homo Sapiens
  misc_feature (268)..(405): n is a, c, g, or t
ttggttttatatacccatttgttttaaaaatggtacctctaattcaatatgtccccatattcatcggtttctctaaaccaaatctgcctttagattgcactatcagtcataaagacattgccattctaatattcacccaaagtttaaatcacagagtccccatttgactctttatattctctattctcttatatctgattaaccaccattttctgtacagtctccaccaagtctgttatatctcccctctctgttttacataaacatnnnnnnnnnnnnnnnnnnnnnnnnnnnnnnnnnnnnnnnnnnnnnnnnnnnnnnnnnnnnnnnnnnnnnnnnnnnnnnnnnnnnnnnnnnnnnnnnnnnnnnnnnnnnnnnnnnnnnnnnnnnnnnnnnnnnnnnnnntacagatgctcaagtgccttatataaaatagcatagtatttgcatataaccaatgcacatcctcctgtatactttaaatcatctctatattgctagagatgtaatatctactgtaatataaatgctatgcagatagttacattgtttagggaataatgacagaaaagtctatatgttcagtacagatgcaactatccttctttaaaaatatgttcttccacagttggttgaatctggcgatgtggaacccatggatatggagggctgactatatacaccatgttttttcctggcacatcactcaactactattagctggcgagtcaactcacgttgttggaatgactagggacaactacacttcaagtgatctttcatcccaggaatataaatagtttctggaaaggacactgacaacttcaaagcaaaatgaagttctttctgttgcttttcaccattgggttctgctgagctcagtattccccaaatacacaacaaggacggacatctattgttcatctgtttgaatggcgatgggttgatattgctcttgaatgtgagcgatatttagctcccaagggatttggaggggttcaggtctctccaccaaatgaaaatgttgcaattcacaaccctttcagaccttggtgggaaagataccaaccagttagctataaattatgcacaagatctggaaatgaagatgaatttagaaacatggtgactagatgtaacaatgttggggaacaagcagtacctgtggaagttacttcaaccctggaagtagggactttccagcagtcccatattctggatgggattttaatgatggtaaatgtaaaactggaagtggagatatcgagaactacaatgatgctactcaggtcagagattgtcgtctggttggtcttcttgatcttgcactggagaaagattatgtgcgttccaagattgccgaatatatgaatcatctcattgacattggtgttgcagggttcagacttgatgcttccaagcacatgtggcctggagacataaaggcaattttggacaaactgcataatctaaacagtaactggttccctgcaggaagtaaacctttcatttaccaggaggtaattgatctgggtggtgagccaattaaaagcagtgactactttggaaatggccgggtgacagaattcaagtatggtgcaaaactcggcacagttattcgcaagtggaatggagagaagatgtcttacctaaagaactggggagaaggttggggtttcatgccttctgacagagcacttgtctttgtggataaccatgacaatcaacgaggacatggggctggaggagcctctattcttaccttctgggatgctacgctgtataaaatggcagttggattta

SEQ ID NO: 183238 - DNA, 2129 bp, Homo Sapiens
  misc_feature (197)..(236): n is a, c, g, or t
  misc_feature (242)..(544): n is a, c, g, or t
  misc_feature (630)..(750): n is a, c, g, or t
ttggctcttttgacatagatagcaatagaagtatctttcttctttcccctttctttttctaaacaagagaagaaaagcgtaatagaggggagaacacataatgcccactaagggtagtgcattaaggaaaaacagtcttggcaggtatataggaatagtggtttccagactggttgatgaccgtaatcaccaagaannnnnnnnnnnnnnnnnnnnnnnnnnnnnnnnnnnnnnnnaacttnnnnnnnnnnnnnnnnnnnnnnnnnnnnnnnnnnnnnnnnnnnnnnnnnnnnnnnnnnnnnnnnnnnnnnnnnnnnnnnnnnnnnnnnnnnnnnnnnnnnnnnnnnnnnnnnnnnnnnnnnnnnnnnnnnnnnnnnnnnnnnnnnnnnnnnnnnnnnnnnnnnnnnnnnnnnnnnnnnnnnnnnnnnnnnnnnnnnnnnnnnnnnnnnnnnnnnnnnnnnnnnnnnnnnnnnnnnnnnnnnnnnnnnnnnnnnnnnnnnnnnnnnnnnnnnnnnnnnnnnnnnnnnnnnnnnnnnnnnnnnnnaaatccttaagaaatatattgatgcttggttcctttggtcagaattttgatttaaggtgttgggagtgtagcacagatgttggaannnnnnnnnnnnnnnnnnnnnnnnnnnnnnnnnnnnnnnnnnnnnnnnnnnnnnnnnnnnnnnnnnnnnnnnnnnnnnnnnnnnnnnnnnnnnnnnnnnnnnnnnnnnnnnnnnnnnnnnnagtataacaatcagatttgaaaaggtttctttagtaattttaaggactgaccagtttagacactgctttgttagagtaaaatgattaggtacctagtatcaacctagccatccaaccttatattaataactaggaaaataaagggttggagcctctgtgtttctttgttgaaaaatctgctactattattagatctgtgaaaacaattgaaaattcggttattatcaccttaaaagtacaaaacctatagattttgaaaatgtaattatttttctgtaggcatagttaaaaagattttgtaaatgttataaatcagtttctttataagcggtttatttagataaattttgttatactgacatgattcactaattttctaaatataaatggttcagctcttagttatttttaaactaatgacctgtgttatacttcctatttttaatgggcttttatgatgttttaggtttttttgaatcccgtgtccttcaagtgctttctaactttgagaggaagaaattgaccacctggactatggaactttggttgaatctggcgatgtggaacccatggatatggagggctgactatatacaccatgttttttcctggcacatcactcaactactattagctggcgagtcaactcacgttgttggaatgactagggacaactagacttcaagtgatctttcatcccaggaatataaatagtttctggaaaggacactgacaacttcaaagcaaaatgaagttctttctgttgcttttcaccattgggttctgctgggctcagtattccccaaatacacaacaaggacggacatctattgttcatctgtttgaatggcgatgggttgatattgctcttgaatgtgagcgatatttagctcccaagggatttggaggggttcagaccttggtgggaaagataccaaccagttagctataaattatgcacaagatctggaaatgaagatgaatttagaaacatggtgactagatgtaacaatgttggggaacaagcagtacctgtggaagttacttcaaccctggaagtagggactttccagcagtcccatattctggatgggattttaatgatggtaaatgtaaaactggaagtggagatatcgagaactacaatgatgctactcaggtcagagattgtcgtctggttggtcttcttgatcttgcactggagaaagattatgtgcgttccaagattgccgaatatatgaatcatctcattgacattggtgttgcagggttcagacttgatgcttccaagcacatgtggcctggagacataaaggcaattttggacaaactgcattaatctaaacagtaactggttcccttgcaggaagtaaaccttt

SEQ ID NO: 183239 - DNA, 1454 bp, Homo Sapiens
ttggatagaagctccgcggacgggaaggtaaactgagctccccagagacgctcatcctacagcctcagctcgggcccagccttctctctccagctgccaccacagcctggaggcgcctgcctccaccctcccgaatggtgctcctcctagcaggcctcggtccaggatccaagccccctttgccccctgccttggagctgttgctccgggtttgtcacagtggactccctgtggcgggaagggaagaacttttgcacagacaaggcttcagctctaggaaccccactgacaacttgaatctcaacctctaacctagtgtgaggttcttcctgtgcccaccttttctgccttttgagaagagaaactcttctcctggccatctagagcccaggaagccccaagctggggccctggtcccagcatgtcagtcctctcttgtgcatagggctctgccctccccctgtcagcatggctgagctcagacaggttccaggagggcgggagaccccacagggggagctgcggcctgaagttgtagaggatgaagtccctaggagcccagtcgcagaagagcctggaggaggtggaagcagcagcagtgaggccaaattgtccccaagagaggaggaagaactggatcctagaatacaggaggagttggagcacctgaaccaggccagcgaggagatcaaccaggtggaactacagctggatgaggccaggaccacctatcggaggatcctacaggagtcggcgaggaaactgaatacacagggttcccacttggggagctgcatcgagaaagcccggccctactatgaggctcggcggctggctaaggaggctcagcaggagacacagaaggcagcgctgcggtacgagcgggccgtaagcatgcacaacgctgctcgagaaatggtgtttgtggctgagcagggcgtcatggctgacaagaaccgactggaccccacgtggcaggagatgctgaaccatgctacctgcaaggtgaatgaggcggaggaagagcggcttcgaggtgagcgggagcaccagcgagtgactcggctgtgccaacaggctgaggctcgggtccaagccctgcagaagaccctccggagggccatcggcaagagccgcccctactttgagctcaaggcccagttcagccagatcctggaggagcacaaggccaaggtgacagaactggagcagcaggtagctcaggccaagacgcgctactccgtggcccttcgtaacctggagcagatcagcgagcagattcacgcacggcgccgcgggggtctgcctccccaccccctgggccctcggcgctcctcccccgtgggggccgaggcaggacccgaggacatggaggacggagacagcgggattgagggggccgagggtgcgggggctggaggagggcatcatccctggggcccggccccgccccc

SEQ ID NO: 183240 - DNA, 806 bp, Homo Sapiens
cccacgggacgcggctgcgctcggcggaagacgcggcagccctgcgagaggcagcagcggagacgcggtgctcctcgggcgccaagcggaaaatttcaaaaatgtttcaaattcctgtggaaaatcttgacaacatcagaaaggtgcgaaaaaaggtgaaaggtattcttgtggatattgggcttgacagctgcaaggagttactgaaggaccttaaaggctttgatccaggagagaaatactttcataacacatcatggggagatgtttctctctgggaaccttctggaaagaaagtgagatatcgaacaaagccatactgttgtggcctctgtaaatactctacaaaggtgcttacttcattcaagaatcatttacatcgttaccatgaagatgaaattgaccaagagctggtgatcccttgcccaaactgtgtatttgcatctcagcccaaagttgtgggaaggcacttcagaatgttccatgcgcctgtccggaaagtccagaactacacagtgaatattttaggtgaaactaaatcatctaggagcgatgtgataagtttcacatgtctaaaatgtaacttttcaaacactttgtactacagcatgaagaagcatgtgctggtagcccattttcactacttaattaactcctactttggcctaagaactgaggaaatgggtgagcaaccgaaaactaacgatactgtttctatagagaagatcccaccacctgacaaatattactgtaaaaagtgcaacgccaatgccagcagccaggatgcgttaatgtatcacattttg

SEQ ID NO: 183241 - DNA, 2214 bp, Homo Sapiens
  misc_feature (2002)..(2014): n is a, c, g, or t
ttgggtcgacggcggcttctaggagctagtcgaaggagcgaggttgaggcgggcagcgacccgtcaggtcgctcacctgggcaccggccagctgcgagacgtgacttggggaccgcaggggagtggagagtgtgaggtgccaaagactagtaatgccccgtatccccctaggaagccgggaagccaagctccgcgggaccgcttcatgccgctgactggtgtagagcccgccagaatgaacaggaagaaaggagacaagggctttgaaagcccaaggccatataaattaacccatcaggtcgtctgcatcaacaacataaatttccagagaaaatctgttgtgggatttgtggaactgactatatttcccacagttgcaaacttgaatagaatcaagttgaacagcaaacagtgtagaatataccgagtaaggatcaatgatttagaggctgcttttatttataatgacccaaccttggaagtttgtcacagtgaatcaaaacagagaaacctcaattatttttccaatgcttatgcagctgcagttagtgctgtggaccctgatgcaggaaatggagaactttgcattaaggttccatcagagctatggaaacacgttgatgagttaaaggtcctgaagatacacatcaatttttctttggatcagcccaaaggaggtcttcattttgtggtacccagtgtagagggaagtatggcagagagaggtgctcatgttttctcttgtgggtatcaaaattctacaagattttggttcccttgtgttgattcatactctgaattgtgtacatggaaattagaatttacagtagatgctgcaatggttgctgtttctaatggcgatttggtggagacagtgtatactcatgatatgaggaagaaaactttccattatatgcttaccattcctacagcagcgtcaaatatctccttggccattggaccatttgaaatactggtagatccatacatgcatgaggttactcatttttgtttgccccaacttcttccattgctgaaacataccacatcataccttcatgaagtctttgaattttatgaagaaattcttacatgtcgttacccatactcctgttttaagactgtcttcattgatgaggcttatgttgaagtggctgcttatgcttccatgagcatttttagcacaaatcttttacacagtgccatgattatagatgagacacctttgactagaaggtgtttagcccaatccttggcccagcagttttttggttgtttcatatctagaatgtcttggtctgatgaatgggtgctgaagggaatttcaggctatatctatggactttggatgaaaaaaacttttggtgttaatgagtaccgccattggattaaagaggagctagacaaaatagtggcatatgaactaaaaactggtggggttttactacatcccatatttggtggaggaaaagagaaggataatccggcttcccatctacacttttcaataaagcatccacatacactgtcctgggaatactacactatgtttcagtgtaaagcccaccttgtgatgagattgattgaaaataggatcagtatggaatttatgctacaagttttcaataaactgctaagtctggctagtactgcttcatctcagaagttccagtcacatatgtggagtcagatgttggtttccacatctgggtttttgaaatccatttcaaatgtctctggcaaagatattcagccgttaataaagcagtgggtagatcagagtggagtggtaaaattttatggaagttttgcatttaatagaaaacgaaatgtcttggaactggaaataaaacaggactatacatctcctggaactcagaaatacgtgggaccacttaaagtgacagtgcaggagttagatggatccttcaatcatacactgcaattgaagaaaacagccttaaacatgatataccctgccattccaaaagtagaaggaatnnnnnnnnnnnnntcccactgatgaatggagaagaagttgatatggatctttctgcaatggatgctgattcccctttgctgtggataagatagacccagatatgtcagtattgaggaaatagaatttgagcaagctgattttatgtggcagtatcagctccgctatgagagagatgttgttgcacagcagaatccattttggctttggaaaaa

SEQ ID NO: 183242 - DNA, 1481 bp, Homo Sapiens
  misc_feature (1052)..(1069): n is a, c, g, or t
ttggctttctttagtctggctttccgtatcatcagcaggaattcatttgggtatttttaatcttgaaggtaaagaacaagcacctttggagatgagtatgcatccagcggcaagcgctccactctcagtctttactaaggaatctacagcctccaaacacagtgaccaccatcaccaccatcaccatgagcacaagaaaaagaagaagaagcataaacataagcacaaacacaagcataagcatgacagtaaagaaaaggacaaggagcctttcactttctccagccctgccagtggcaggtctattcgttctccttccctttcagactgagaaggggacaaaaagacctttcctttcatgtccagaagaatgtatgtaactaaagctttgtcctctgtgaagaattataaaagggaggggggaaaggattcgcctctcctacagaaattctgaattcatttaagttctaagcatttgatttatgttatttatacagttgggatctaattaggaaaatgtgttttgtagttctggataaactatttcatccgctgtttcctccccaaaacacacacacagagcaaactccctttcataaaagccctcatatccactggcagtccccgttcgcatcatggtctccatgtgtaccgccaaagtcaattatgtttgaaagcctttggtggatgttatggggcaaagttatgatttacacagaagcaactgccaaatctgtggtgcaaccactatctccagtgaaatattgtataacaccatttggaactactgaaaagacagtggcttttctacagtactcttccttattgcaccatttttgtattaacgtagaaactaagcatcagaatttatgaacaaagaatatgttatttttccttttgctctaaaatactgagatttggggaagcaattcttttttaaaaaaattttgaataactatcttttgataacacattcggcggttacgatgttggaatttagcagaactatcaaatccaaaattattttcaaatcaagatgtttaaattataannnnnnnnnnnnnnnnnnccagtaagtataaatgaaaatattcatatgtaaaatatgttttgcttaatgtggacaatttacacacccaacacatactgtttccaaaattatttctatatgacacaaagtatgatacctttaaaaaggtgagcttatatattgtttattaacctggaaatagacaatttggctctcataccataagcatttaaaaacatatgaaatattttgatttctttatatggtggtgtgtttttatttctgaattttccatgtgctttaatatttgtttaagaatattttttatatctgttcaatttttatcattcccctttatcattagaaagtttgacaaaaatacttgaatcttggacctctaaatatacttttagttgtgtttaacttgtttaataaataaccttttaagttg

SEQ ID NO: 183243 - DNA, 2269 bp, Homo Sapiens
  misc_feature (294)..(306): n is a, c, g, or t
gagcaatgcttttcttataatgccaactttgtacaaaaaagttggcgttaataaagcagtgggtagatcagagtggagtggtaaaattttatggaagttttgcatttaatagaaaacgaaatgtcttggaactggaaataaaacaggactatacatctcctggaactcagaaatacgtgggaccacttaaagtgacagtgcaggagttagatggatccttcaatcatacactgcaaattgaagaaaacagccttaaacatgatataccctgccattccaaaagtagaaggaatnnnnnnnnnnnnntcccactgatgaatggagaagaagttgatatggatctttctgcaatggatgctgattcccctttgctgtggataaggatagacccagatatgtcagtattgaggaaggtagaatttgagcaagctgattttatgtggcagtatcagctccgctatgagagagatgttgttgcacagcaggaatccattttggctttggaaaaattccctactccagcatctcggcttgcactcactgatatattagaacaagagcagtgtttctacagagtaagaatgtcagcttgcttctgtcttgcaaagattgcaaattcaatggtgagcacatggacaggaccaccagccatgaagtcactcttcactaggatgttttgttgtaaaagttgtccaaacattgtgaaaacaaacaactttatgagctttcaaagctattttctacagaagactatgccagttgcaatggctttattaagagatgttcataatctttgtcctaaagaagtcttaacatttattttagacttaatcaagtacaatgacaacaggaaaaataagttttcagataactattatcgtgcagaaatgattgatgccctggccaactctgttacacctgcagtcagtgtgaataatgaagttagaactttggataacttaaatcctgatgtgcgactcattcttgaagaaatcaccagatttttgaatatggaaaaacttcttccgagttacaggcataccatcactgtcagttgtttgagagccatacgggtacttcagaagaacggacatgtgccaagtgatccagctctttttaaatcttatgctgaatatggccactttgtggacattaggatagcagctttggaagcagttgttgattatactaaagtggacagaagttatgaagaactgcaatggctacttaatatgattcagaatgaccctgtaccctatgtaaggcataagattctcaacatgttgactaagaacccaccatttactaagaacatggagtctcccttatgcaatgaagccctggtagatcaactttggaaacttatgaattctggtacttcacatgactggaggttacggtgtggtgctgtggacttgtacttcacactttttggcctcagtagaccttcctgtttacccttgccagagcttgggttggttcttaatctaaaggagaaaaaagctgtcttgaatcctaccataattccagagtcagtagcaggcaaccaagaagctgcaaataatccaagcagtcacccacagctagttggatttcagaaccctttttccagttctcaagatgaggaggagattgatatggatactgttcatgatagccaggccttcatttcccatcatttaaacatgcttgaaaggccgtcaactccagggctctcgaaatatcggccagctagctcccgatctgctttaataccccagcactcagcaggctgtgacagcacacccaccacaaaaccccagtggagtttggaacttgcacggaagggaacaggtaaagaacaagcacctttggagatgagtatgcatccagcggcaagcgctccactctcagtctttactaaggaatctacagcctccaaacacagtgaccaccatcaccaccatcaccatgagcacaagaaaaagaagaagaagcataaacataagcacaaacacaagcataagcatgacagtaaagaaaaggacaagggagcctttcactttctccagccctgccagtggcaggtctattcgttctccttccctttcagactgagaaggggacaaaaagacctttcctttcatgtccagaagaatgtatgtaactaaagctttgtcctctgtgaagaattataaaagggaggggggaaaggattcgcctctcctacagaaattctgaattcatttaagttctaagcatttgatttatgtaatttatacagttggga

SEQ ID NO: 183244 - DNA, 1048 bp, Homo Sapiens
gagcccgcccgactcaaagttctcctcgggagtcctgcaggggttcgctccatgtgctgacgccacccccacaaacatcccggagcttagcacaggagaggagctgggggccaggaaggtcagctccacacactccaccgcagctaggagcccccaggcgcgagtgcgtgcagacaaagcacgggccctggagggaggaggacgagaggcaccggcagccctcagggcgccacaagtgccaggcctcctgatcaggcctccagctctgggcagtgggggataggcaggccacaggctcacccaggcccaggcagaactccctggcggtgaggaagccagtgtgagcccggtccagactttcaaacacagcctccagctgctctggcgtgaggggcaggtcgctctggagaccctgcaggtcgtgcttggtgatgaagcccttagcctccttgtcacacagcagaaacagctcctcagcctgctccagtattgcagcccgcggccctgcagagcccccctcgagttccccctcctcctcctgggcctcatcagccccaggctttccagggctggccatgagagcagggggcctcagcctggccttcaggtgctgtgaagccaagggagggtcagaagaaattcaggaggggagcggatggggtgcaagtgtgtctgaaggctcagccgagggccctccctgcagcaggtgggaaggtgggcggaaggcaaggtgggaccagggggctgggggtggaaaatgctgcaggcttggggtgtcactggggtggttgatgtaggctcagggcctgtgggtactgccccagtgggtctggcatctcaggaggctggaacccaggaggggctgccaacttcaggagaggaggagctggaggtgatggcaatctcaggggccagtggagaagacctgaagggctggaatcactgtcccgcccggcaaccctggggggtacaaggcctctgcttttcaaggaaggggcctgggatccagcgtgcgacccagggtgaaccacaaaccaacttttttgta

SEQ ID NO: 183245 - DNA, 1546 bp, Homo Sapiens
  misc_feature (213)..(253): n is a, c, g, or t
  misc_feature (1121)..(1230): n is a, c, g, or t
gaaataaaaggaaagtaaatcaaacccccccaatacgcctgaaagtaaaacagtctcatggtgactgatgtctggaagaagttgaggcagaaaagactgacaaagttggaagcatccggccacaaaagtgccctaaagaattcactgcagtgctctccatttccaaggctgagtagctattcccagtaagttaacatttttctattaaggagnnnnnnnnnnnnnnnnnnnnnnnnnnnnnnnnnnnnnnnnnggtcaagagaagagcactgtagaaagtcaagcagctgagcgccggcggatcacgaagagcccgcgctgaagctggcccaggtagatcctcatcttggtgctgtcacttgtcttcctcacccagatctcattggctcctacagaactgatcacgcagctcagtttctggttgtcctttgactccagatagatggcctggctcttgtggtaccatcttttgtcatagtacagtttgccatcttctatccgagcttcgaacctctgggctggagattccgcgggtgttgcaggcaagtgctcaggagaggatggagatgctggtctcttgggtgacttaagcttatttaatgttctcagatcctccatgatctgttcatctgttaacaaatagtttagctgggctggagcaggtttcctcctcttgtctgggatggggacgggatcatttggtcgcctccgcaactttctggtcatgataggtttcacctccatagaatctccagtcagttccattgtcagcttttcattttcaatcattttcttcttttcttctagctcagcaatcaggttctctttcagctcaaccttcttgtcttcaaattctttcactgctgccttcttttctttaatgtaatttcgttccacttgttcagtttccagctggaggaagagttctgcattccgtatcctctctttgtactgctgatctagttttttcattctcttctgatattcctgtaatgtaccttcttgcagttgttgcaactgcctcttgagagaagccagtttgtcctgatacatccgttttccatctgggtgtacgctaaaagtgagtgaggttttcgtttctctgaatctgttcggctgtnnnnnnnnnnnnnnnnnnnnnnnnnnnnnnnnnnnnnnnnnnnnnnnnnnnnnnnnnnnnnnnnnnnnnnnnnnnnnnnnnnnnnnnnnnnnnnnnnnnnnnnnnnnnnngaaagagcaaggcttgttccttcatttctacatagtcttcttcatcatgctttgccaggtcagtttcactagcatcctcagtgtcttcgtccgactcgcggccccgacagctgcgctcgtcgtcctcggcgctctccagctcttcatcctcctcggggtagtactcgggggccggcggcgctccagcctgggccggggccggggccagcagccccgcggcactcatgtcgcctctgaccgcagctgagcgtggcccacggacaccgcggccacccgcgctcggtactcgccgtctgcctagcagtgtccgcgccaa

SEQ ID NO: 183246 - DNA, 1277 bp, Homo Sapiens
  misc_feature (1031)..(1057): n is a, c, g, or t
aaaggccaactttgtacaaaaaagttggttaaaaacagtgacaaaagaccgtatggaagacattaaaatattgattgcatctccatctcctacccacatacataaagaaactactagtgccacatcatcaccatatagagatactcaaagtcggacagcctcaccaaacagagcaggaaaaggagtcatagaacagacagaaaaatctcatccaagaagccctaacgtgttatctgtcgctttgagtcaaagaactacagttcctgaggaagaactaaatccaaagatactagctttgcagaatgctcagagaaagcgaaaaatggaacatgatggttcactttttcaagcagtaggaattggaacattattacagcagccagacgatcatgcagctactacatcactttcttggaaacgtgtaaaaggatgcaaatctagtgaacagaatggaatggagcaaaagacaattattttaataccctctgatttagcatgtagactgctggggcaatcaatggatgaaagtggattaccacagctgaccagttatgattgtgaagttaatgctcctatacaaggcagcagaaacctactgcagggtgaagaattactcagagctttggatcaagttaactgagctttttcttaatttcattcctttttttggacactggtggctcactacctaaagcagtctatttatattttctacatctaattttagaagcctggctacaatactgcacaaacttggttagttcaatttttgatcccctttctacttaatttacattaatgctcttttttagtatgttctttaatgctggatcacagacagctcattttctcagttttttggtatttaaaccattgcattgcagtagcatcattttaaaaaatgcacctttttatttatttatttttggctagggagtttatccctttttcgaattatttttaagaagatgccaatataatttttgtaagaaggcagtaacctttcatcatgatcataggcagttgaaaannnnnnnnnnnnnnnnnnnnnnnnnnnacataaataataatgctttgccagcagtacgtggtagccacaattgcacaatatattttcttaaaaaataccagcagttactcatggaatatattctgcgtttataaaactagtttttaagaagaaattttttttggcctatgaaattgttaaacctggaacatgacattgttaatcatataataatgattcttaaatgctgtatggtttattatttaaa

SEQ ID NO: 183247 - DNA, 2700 bp, Homo Sapiens
  misc_feature (2326)..(2382): n is a, c, g, or t
  misc_feature (2450)..(2476): n is a, c, g, or t
  misc_feature (2604)..(2612): n is a, c, g, or t
ttgggctttaaaactttatttcatgctttcattaggccttgtgaaaaagggtaaagaacaaaacacacagcgaagcttttttctcagaatgaagtgtaccctaactagccgaggaagaactatgaacataaagtctgcaacatggaaggtattgcactgcacaggccacattcacgtatatgataccaacagtaaccaacctcagtgtgggtataagaaaccacctatgacctgcttggtgctgatttgtgaacccattcctcacccatcaaatattgaaattcctttagatagcaagactttcctcagtcgacacagcctggatatgaaattttcttattgtgatgaaagaattaccgaattgatgggatatgagccagaagaacttttaggccgctcaatttatgaatattatcatgctttggactctgatcatctgaccaaaactcatcatgatatgtttactaaaggacaagtcaccacaggacagtacaggatgcttgccaaaagaggtggatatgtctgggttgaaactcaagcaactgtcatatataacaccaagaattctcaaccacagtgcattgtatgtgtgaattacgttgtgagtggtattattcagcacgacttgattttctcccttcaacaaacagaatgtgtccttaaaccggttgaatcttcagatatgaaaatgactcagctattcaccaaagttgaatcagaagatacaagtagcctctttgacaaacttaagaaggaacctgatgctttaactttgctggccccagccgctggagacacaatcatatctttagattttggcagcaacgacacagaaactgatgaccagcaacttgaggaagtaccattatataatgatgtaatgctcccctcacccaacgaaaaattacagaatataaatttggcaatgtctccattacccaccgctgaaacgccaaagccacttcgaagtagtgctgaccctgcactcaatcaagaagttgcattaaaattagaaccaaatccagagtcactggaactttcttttaccatgccccagattcaggatcagacacctagtccttccgatggaagcactagacaaagttcacctgagcctaatagtcccagtgaatattgtttttatgtggatagtgatatggtcaatgaattcaagttggaattggtagaaaaactttttgctgaagacacagaagcaaagaacccattttctactcaggacacagatttagacttggagatgttagctccctatatcccaatggatgatgacttccagttacgttccttcgatcagttgtcaccattagaaagcagttccgcaagccctgaaagcgcaagtcctcaaagcacagttacagtattccagcagactcaaatacaagaacctactgctaatgccaccactaccactgccaccactgatgaattaaaaacagtgacaaaagaccgtatggaagacattaaaatattgattgcatctccatctcctacccacatacataaagaaactactagtgccacatcatcaccatatagagatactcaaagtcggacagcctcaccaaacagagcaggaaaaggagtcatagaacagacagaaaaatctcatccaagaagccctaacgtgttatctgtcgctttgagtcaaagaactacagttcctgaggaagaactaaatccaaagatactagctttgcagaatgctcagagaaagcgaaaaatggaacatgatggttcactttttcaagcagtaggaattggaacattattacagcagccagacgatcatgcagctactacatcactttcttggaaacgtgtaaaaggatgcaaatctagtgaacagaatggaatggagcaaaagacaattattttaataccctctgatttagcatgtagactgctggggcaatcaatggatgaaagtggattaccacagctgaccagttatgattgtgaagttaatgctcctatacaaggcagcagaaacctactgcagggtgaagaattactcagagctttggatcaagttaactgagctttttcttaatttcattcctttttttggacactggtggctcactacctaaagcagtctatttatattttctacatctaattttagaagcctggctacaatactgcacaaacttggttagttcaatttttgatcccctttctacttaatttacattaatgctcttttttagtatgttctttaatgctggatcacagacagctcattttctcagttttttggtatttaaaccattgcattgcagtagcatcattttaaaaaatgcannnnnnnnnnnnnnnnnnnnnnnnnnnnnnnnnnnnnnnnnnnnnnnnnnnnnnnnnagaagatgccaatataatttttgtaagaaggcagtaacctttcatcatgatcataggcagttgaaaannnnnnnnnnnnnnnnnnnnnnnnnnnacataaataataatgctttgccagcagtacgtggtagccacaaattgcacaatatattttcttaaaaaataccagcagttactcatggaatatattctgcgtttataaaactagtttttaagaagaannnnnnnnnggcctatgaaattgttaacttggaacatgacattgttaatcatatattaatgattcttaaatgctgtatggtttattatttaaatggg

SEQ ID NO: 183248 - DNA, 1678 bp, Homo Sapiens
  misc_feature (619)..(649): n is a, c, g, or t
  misc_feature (1118)..(1126): n is a, c, g, or t
ttgggtaacatctgacaccatgtagaagctaaaagtttagagggagtgagcgttttctcaagaccttcctcaagcattttatctttagaagagaaactgatgggcacctgatactctgtctaaatacgtttgttatatgtgttttgccctgtgccattcatttggaactttattgcattctttattttaaaaagcttgtttttacgtaatcatagagcttgctatttgtacatctgttgagcaacactacataactgatttttagttgacttagctatagcagtacaatgattagtaatgtaaaaattaacacagaaattaacctaaggaatgaagggtgggtttgtcaaaatatcaagtaaatttttgtttctaaagtacatttaatgtagatgacctaaagaatgcgttatccatcctatataaaagaaagataaaacacaggtcaccaattttctcatttcaccccatttaccttgtatagaggattgttcattcctttgggactaagttatagttatggtgagtgtgtatttactgtagttttgcctgatctcactcattgcacttcctggagttaaattttccaacagccatgttgaggaatagcactctgcannnnnnnnnnnnnnnnnnnnnnnnnnnnnnnaattgaagccctaaaccaggaattatttgtgttctaacaggaggatgaacttgctgaaaataaaactttgctatgtatttactcttttttaaaagacaaaagcaaaaccagactttctacgtactactccaaagactgtgattgtgactataatacatttttggtaatttttttatacctaatttgtataggaagtgctatttctcataggctgtttcttgaaattttaagtttattgctttaaaatggcagtgtttctcccactttgatatgctaacatttagtaagcactggctttatgaaagcggctttttataagtatactgcattttttgagcctatcattaattagcttagtatgaaagataagaaaatctccatgttgtatccatttggctcaggaagattctttgccttacctttcttagaactctttattgcttatcaaaagtttgagtacccgcttggnnnnnnnnnggtaattaaatattgtatgatttatctggttcaaggaagatgcactattcagttatctattgagaaattattttgcagtggttttagtgggtgaaaatgtcccatctgcaccagtacacaggcaggcattatcattcttcacctactttttaaatagtggcaacttgggattcattctggtgattctgaaccttgcctcatagcttaaagtataaaaaagattcaagagcagtgaggtttgttctttccagtgaatggtggactgagtggtgcgaggtggagggctaacaagaggaaagaactacattcttcagaatacagtgatgaaaattcattttgaaactcaaatattttcattttggatattctcctgtttttattaaaccagtgattacacctggccatccctctaaatgttctaggaaggcatgtctgttgtgattttgatgaagacagaattatttttctctgtagaaacacagataccactttatcacgaagttagtcaaatgaaatggaaattggtaaatggacaaaagctagctagtaaaa

SEQ ID NO: 183249 - DNA, 2267 bp, Homo Sapiens
  misc_feature (43)..(69): n is a, c, g, or t
  misc_feature (2128)..(2158): n is a, c, g, or t
ttggagcagcacggcgggaaccggcagccggagcagtcccggnnnnnnnnnnnnnnnnnnnnnnnnnnncctcgccgttcgcggagcgcagccgagccggccatggcgttgtcgatgccgctgaatgggctgaaggaggaggacaaagagcccctcatcgagctcttcgtcaaggctggcagtgatggtgaaagcataggaaactgccccttttcccagaggctcttcatgattctttggctcaaaggagttgtatttagtgtgacgactgttgacctgaaaaggaagccagcagacctgcagaacttggctcccgggacccacccaccatttataactttcaacagtgaagtcaaaacggatgtaaataagattgaggaatttcttgaagaagtcttatgccctcccaagtacttaaagctttcaccaaaacacccagaatcaaatactgctggaatggacatctttgccaaattctctgcatatatcaagaattcaaggccagaggctaatgaagcactggagaggggtctcctgaaaaccctgcagaaactggatgaatatctgaattctcctctccctgatgaaattgatgaaaatagtatggaggacataaagttttctacacgtaaatttctggatggcaatgaaatgacattagctgattgcaacctgctgcccaaactgcatattgtcaaggtggtggccaaaaaatatcgcaactttgatattccaaaagaaatgactggcatctggagatacctaactaatgcatacagtagggacgagttcaccaatacctgtcccagtgataaggaggttgaaatagcatatagtgatgtagccaaaagactcaccaagtaaaatcgcgtttgtaaaagagatgtcttcatgtcttcccctaagaatacgcttttcctaacaggctactccttcctgtagagcagaaattgtattttgcacgaacatgcagttattgaagattaggatcaaggatagacaaggtatagtagttatcttaaaatatacactcctaagcagtattattttaaaatcctttaccctggctacctcccctacccgggttcccctctctttaatttggagacactccaccacaaacttttcactttagaggtagcttgccatctctcaggagccctcaccattgtgtccattcactgtgtatagatggcagaacttttgaggtgcaatgtttaattgttaaaaatagtagccacgactttatcaggcagccccaaactggtgcataatgcatggtacaagaaatatttatgtattttttggaattttgtaatatttagtaagagtatatgaaaggattgctactgtatcagaaatattgtttcaatttagtctatcctggatatgtactaacgaatattaccaccagagaagagagctttctacaaaagtcactacagattttgctatattgctttgtagatagatttttacttttgcctaaaagcatttatccttcataccaattgtaacatctgacaccatgtagaagctaaaagtttagagggagtgagcgttttctcaagaccttcctcaagcattttatctttagaagagaaactgatgggcacctgatactctgtctaaatacgtttgttatatgtgttttgccctgtgccattcatttggaactttattgcattctttattttaaaaagcttgtttttacgtaatcatagagcttgctatttgtacatctgttgagcaacactacataactgatttttagttgacttagctatagcagtacaatgattagtaatgtaaaaattaacacagaaattaacctaaggaatgaagggtgggtttgtcaaaatatcaagtaaatttttgtttctaaagtacatttaatgtagatgacctaaagaatgcgttatccatcctatataaaagaaagataaaacacaggtcaccaattttctcatttcaccccatttaccttgtatagaggattgttcattcctttgggactaagttatagttatggtgagtgtgtatttactgtagttttgcctgatctcactcattgcacttcctggagttaaattttccaacagccatgttgaggaatagcactctgcannnnnnnnnnnnnnnnnnnnnnnnnnnnnnnaattgaagccctaaaccaggaattatttgtgttctaacaggaggatgaacttgctgaaaataaaactttgctatgtatttactcttttttaaagacaaagcaaaccaga

SEQ ID NO: 183250 - DNA, 2706 bp, Homo Sapiens
ttgggggcaagacgagcctggtggtgagctacaccaccaacggctaccccaccgagtacatccctactgccttcgacaacttctccgcggtggtgtctgtggatgggcggcccgtgagactccaactctgtgacactgccggacaggatgaatttgacaagctgaggcctctctgctacaccaacacagacatcttcctgctctgcttcagtgtcgtgagcccctcatccttccagaacgtcagtgagaaatgggtgccggagattcgatgccactgtcccaaagcccccatcatcctagttggaacgcagtcggatctcagagaagatgtcaaagtcctcattgagttggacaaatgcaaagaaaagccagtgcctgaagaggcggctaagctgtgcgccgaggaaatcaaagccgcctcctacatcgagtgttcagccttgactcaaaaaaacctcaaagaggtctttgatgcagccatcgtcgctggcattcaatactcggacactcagcaacagccaaagaagtctaaaagcaggactccagataaaatgaaaaacctctccaagtcctggtggaagaagtactgctgtttcgtatgatgctggcaagacacccagaaaggctattttcagatgaaatcgatattagaagctatattagctgaaacaactccttttactgcgtagaacctatatcgagagtgtgtgtatatgtattataggaggagctctcaattttatgtattctttctgcctttaattttcttgtttgtttgagcttagggatgagatacttatgcaagatatttttgaagtaaattaaacatttttcacatctctggaaatttagagttctagacctctggttaatttatatctaatatgaagaagacacctctaatctggatgttaagaatgaagttctgctacattataatgtacagaagagcaaaagggaggaacactatggttaaccctctcttgattaagggctacttaatgcacagtgcattatgtacacaggtcaaccatggtaacaatagttcttagctttgaaactccatgcaaaccatgccttttttttaaggagcaaaaatctgagaaaaaaagtgagagacctctgcctacaaaacttcaaaccagtcacttttgtcaattgctaatacccagttacttatgatttaaaaacaaccaacagaaaacatcccacagactgtatggcactctgtagtcaaaaaaggaaactttcttattgggacttttctttcttagtccagttgtgttgacacatatgaacacagacaaagtgctatgcggaggaaagcaagtgttggtcagtagtttcatgttttagggagtggttcctgtggagatcagaaagtgacatttgctttcggtactgtaatacatgcaccaaactgcctcaattctaggtaacgagggcaacagggagcacctgtctggattgtttttaaacctccatactcaagctgtctcttcggcagggaggtgaatactcttgaaaggccaacagcaagtgtttgtgggacacaacacagataattttttcttaagtcggccaagatgtacttctctgtgtgcacacccatgcacactcatgcacacagatacataggtctgtatggctgtatttgctgttgattcagactttcacaccattaatggggaaaagcgtggccacaaaaacagatgctaggaagcttggcttcctcttcttgttgacccttttttgaaccaacatcttttttattatattcagagtatgtttttaagtgtatcttaatatatacattttttaggacatcttaaatctaaacaaaaaataaaatgaacatctcttgaaacctgttaaaacaaccagttaaagccacagatggctttcagggcagtagcagcagaggccagtggactctgaggactcctgaggggcggggcgtgtagccagccaggtgcatgccgggaccatggcccccatacttggctgcttcctgtgacagtgaaatacatccttcaaggtggcagctgttagggctgaatcttctggagaaaaaggtgccatctcaggagaatagcttttactctggtaggaatgcttccgagacaccacaaggcagcctgaacactcagttgcagggtcgggcttgcggtgggtgacccagagccaccaaagtcacatccacaactaatgagggaaatctgtaaagccagttagatagaagaattttatttttctgtgggttttgtgttgtcttttttatgttaaaaagaaatccagtttgtgtttttctatagaaaaagtaaaagatcaggttatactttaggttaggggttctatttattcctgttagtaaataaaattaacaaatttctttgtttaacaaaagattaatctttaaaccactaaaatacatagactgattgattattcaacacattggaattgatgtcggtcatagtttcctgaagcatttagttacaacctgaaggaataaaatgatttgtggaaatgcttaaaatagacctaactgaatacagtctcatcttgccgcgcctggcttacctatctgtggaaagctaggcttcccaggctgggctctgcctgtctggtgcctggaggtgtgggagggaagatgagttatttaactggtaagcgatttgaaacactatttttatattaaagtaa

SEQ ID NO: 183251 - DNA, 1823 bp, Homo Sapiens
ttgggggagtgccaagtacccgcgtgcatacggctgccggcatggcacattacaacttcaagaaaattacggtggtgccgtccgccaaggacttcatagacctcacgttgtcgaagactcaacgaaagactccaaccgttattcataaacattaccaaatacatcgcattagacatttttacatgagaaaagtcaaatttactcaacagaattaccatgatagactttcacaaattctaacagatttccccaaattggatgatattcatccgttctatgctgatttgatgaatattctctacgacaaggatcattacaagttggctctggggcaaataaatattgccaaaaatttagtggacaatgttgctaaagattatgtgcgactgatgaagtatggcgactctctctaccgctgcaaacagctgaagcgtgcggccctgggacggatgtgcacagtgatcaagaggcagaagcagagtttggagtatttggagcaagtgcgtcagcatttatcccgtttgccaaccattgatccgaataccaggaccctgcttttgtgtgggtacccaaatgttgggaagtccagcttcatcaacaaggtgacgagagcagacgtggatgtccagccctatgcgttcacaaccaagtctctgtttgttgggcacatggattataagtatctacgttggcaggttgtagacactcctgggatcctggaccaccctctggaggataggaacaccatcgagatgcaggccatcactgccctggcccacctccgtgctgcagtcctgtatgtgatggatttgtctgagcagtgtgggcatgggctgagggagcagctagaactcttccagaacatcagacctctcttcatcaacaagcctctcatagttgtagccaacaaatgtgatgtgaagagaatagctgaactttctgaagatgatcagaaaatatttacagatttgcagtctgaaggattccctgtaatagagaccagcaccctgactgaggaaggtgttattaaagttaaaacagaggcttgcgataggcttttggctcatcgagtggaaaccaaaatgaagggaaataaagtgaatgaggtgctgaatagactgcacctggctatcccaaccaggagggacgataaggagaggccccctttcatccctgaaggagtggtggctcgcaggaagaggatggaaactgaggagtccaggaagaagagggaacgagatcttgagctggaaatgggagatgattatattttggatcttcagaagtactgggatttaatgaatttgtctgaaaaacatgataagataccagaaatctgggaaggccataatatagctgattatattgatccagccatcatgaacaaattggaagaattaaaaaagaacaagagctgaaaacagctgctggagagtatgacagtgtatctgacagtgaagactaagagatgctggaaatccgaccgctggcaaagcaaattcgagagaaaaagaagttgaaaattctggagtccaaagaaaagaatacactgggacccaggatgccgcgaactgctaagaaggttcagaggacagttttggagaaggagatgcgtagtcttggtgttgacatggacgataaagacgatgcccattacgcagtccaggcaagaagatcccggagcatcactatgaaaagaaagcgggaagactctgctcccccgtcctctgtggcccggagtgggagttgctctcgaactccacgtgacgtgtctggtcttatggatgtcaagatggtgaagaaagccaagactatgatgaaga

SEQ ID NO: 183252 - DNA, 942 bp, Homo Sapiens
ttggctgaagagaaaagcataggaaaggaaacagtggtaataggaattggggtaaaatgaggatccttccccacaaacattgctattattcagctcatttcaaaggattccgctgctgccatttgtgagagccgctggaggctgagtgaaagtcattttgaaagactgatccaaagaagaatggaggccagagtggagcgtgctgtgcagaaaaggcaagtcttatttctttgtgtatttctgggaatgtcttgggctggcgccgaaccgcttcggtattttgtggcggaggaaaccgagagaggcacctttcttaccaacctggcaaaagacctagggttaggggtaggggaactgagagcccggggaactagaattgtttcagaccagaacatgcaaattttactgctcagttcgcttactggtgatctacttctaaatgagaaattggaccgagaggaactgtgtggccccagagagccctgtgtgctgcctttccagttgttattggaaaaaccttttcagattttccgtgctgaactatgggtcagagacatcaatgatcacgctccagtatttctagacagagagatttccttgaaaatattagaaagtaccactccaggggcggcatttctcctagagagtgcacaggattcagatgttggaaccaacagcctgagtaactacaccatcagccccaatgcctatttccatattaatgtccatgatagcggggaggggaatatctatcccgaattggtgctgaatcaagtgctggatcgggaagagataccagagttcagtttaaccctcaccgctttagacggcggctctcctccaagatcagggaccgccctcgtgcgcattctggttctagacgtaaatgacaacgcccctgattttgtgcggtcgctctacaaggtgcagtgcccgaaaata

SEQ ID NO: 183253 - DNA, 2076 bp, Homo Sapiens
tacaaaaaagttgggtggctccttgcacagcagctgcacgcgccgtggctccggatctcttcgtctttgcagcgtagcccgagtcggtcagcgccggaggacctcagcagccatgtcgaagccccatagtgaagccgggactgccttcattcagacccagcagctgcacgcagccatggctgacacattcctggagcacatgtgccgcctggacattgattcaccacccatcacagcccggaacactggcatcatctgtaccattggcccagcttcccgatcagtggagacgttgaaggagatgattaagtctggaatgaatgtggctcgtctgaacttctctcatggaactcatgagtaccatgcggagaccatcaagaatgtgcgcacagccacggaaagctttgcttctgaccccatcctctaccggcccgttgctgtggctctagacactaaaggacctgagatccgaactgggctcatcaagggcagcggcactgcagaggtggagctgaagaagggagccactctcaaaatcacgctggataacgcctacatggaaaagtgtgacgagaacatcctgtggctggactacaagaacatctgcaaggtggtggaagtgggcagcaagatctacgtggatgatgggcttatttctctccaggtgaagcagaaaggtgccgacttcctggtgacggaggtggaaaatggtggctccttgggcagcaagaagggtgtgaaccttcctggggctgctgtggacttgcctgctgtgtcggagaaggacatccaggatctgaagtttggggtcgagcaggatgttgatatggtgtttgcgtcattcatccgcaaggcatctgatgtccatgaagttaggaaggtcctgggagagaagggaaagaacatcaagattatcagcaaaatcgagaatcatgagggggttcggaggtttgatgaaatcctggaggccagtgatgggatcatggtggctcgtggtgatctaggcattgagattcctgcagagaaggtcttccttgctcagaagatgatgattggacggtgcaaccgagctgggaagcctgtcatctgtgctactcagatgctggagagcatgatcaagaagccccgccccactcgggctgaaggcagtgatgtggccaatgcagtcctggatggagccgactgcatcatgctgtctggagaaacagccaaaggggactatcctctggaggctgtgcgcatgcagcacctgattgcccgtgaggcagaggctgccatctaccacttgcaattatttgaggaactccgccgcctggcgcccattaccagcgaccccacagaagccaccgccgtgggtgccgtggaggcctccttcaagtgctgcagtggggccataatcgtcctcaccaagtctggcaggtctgctcaccaggtggccagataccgcccacgtgcccccatcattgctgtgacccggaatccccagacagctcgtcaggcccacctgtaccgtggcatcttccctgtgctgtgcaaggacccagtccaggaggcctgggctgaggacgtggacctccgggtgaactttgccatgaatgttggcaaggcccgaggcttcttcaagaagggagatgtggtcattgtgctgaccggatggcgccctggctccggcttcaccaacaccatgcgtgttgttcctgtgccgtgatggaccccagagcccctcctccagcccctgtcccacccccttcccccagcccatccattaaggccagcaacgcttgtagaactcactctgggctgtaacgtggcactggtaggttgggacaccagggaagaagatcaacgcctcactgaaacatggctgtgtttgcagcctgctctagtgggacagcccagagcctggctgcccatcatgtggccccacccaatcaagggaagaagaggaatgctgggactggaggcccctggagccagatggcaagagggtgacagcttcctttcctgtgtgtactctgtccagtttctttagaaaaaatggatgcccagaggactcccaaccctgggcttggggtc

SEQ ID NO: 183254 - DNA, 971 bp, Homo Sapiens
ttggtttgattttttaaaatatgtgtataagtctgtcatgtgctaaacaaaataatatgaaagacctagttaaaaattctaaccaatgtaaaatgaccatttttctgttgcattagacctttacaggtaatggaacatgagcttcacccatattaaatattttggcccctttaaggtcaaaatacagatcatctagaagttagattcaaaatggaaaacctattcatggctcagatttttcattgtgggttaaaaatgggtgtctctgtactagtattgtatttattcaattgaacttgtattctgatttctaaccttgctacctattgctgttttatgtactgatgaaagtacctatttgtgtatattggatttttcacttggttagctaaagaagatgtaaaaatatctaaaataatgttcatggtgaatcttattttgagaaatacatgttaaaaaaggaacagtattctttattttctgggtgttatatttaaaaaagcaagtttggatttttacacctaatttactaggaaaatattttattctgtaattcatgttaagattatgtatggtttgcattttaaggggatttatgttaggttaattagttgtttctgtaaatcatttgtaatagcatagtgctttttactcattgctgtatctttttctgaaaacactgttgttaacatctaattcagtatccttattggtacaaatctgtgtttggcatgactgtttatatacagaatttgttacattttgagcattttttcccctgcttatgtataccttagagttaccatggctgtcatataccatttcactatatctcctttcagtttttccttaacgaaaatgtttagaggaatttgttcatttcatgtgattagccctttagagatgaaataagattgggttaattttaaaaacttgaggatggttaagaatagaaaacaccgttactttga

SEQ ID NO: 183255 - DNA, 1486 bp, Homo Sapiens
  misc_feature (502)..(514): n is a, c, g, or t
ttgggtccaggccacgtccttggtcacctccccagcagctgctctgctcaccagcctgaccccacccagagcaggagctggcgggtgtcttcctgcggcaatagactggaacgattaaggaccatggtgtgatagatcccatttcaaatgattccatatgattgtcagtgtgtgtgtcagactgtgatcgatttcactagatgtctcactcatcagaccaggccattgggcctaagtggtaaatgtgattaggaattagacctctccccattctgctagcaacatacagggacacttggaaaaccatttccccttccagtagcttggtgtccatcccagagcattcatgaagtcttcccgcctgggctgactgatgaggcagagcctctcagcgtaggaagctggctgcttaatgagctggctttactctagggtaagtggctgtggacttttctgcacagtgttttcataaagataataggatcctcttgccctgaagtcnnnnnnnnnnnnnacgctaagctgtatttttagtgagctaccccttttaaaaaggtgaaatctttcttaacagggttcaaagatgagagctgaaaaatcgtggccttaacaactgaaagctttacagtgttcatgctactgaggtgtcaggagtgcagctgggccgcttgacacctcgtagcagccgtctcattctctcgtcttgctgcgtcctgtctgtggagtcctcagtcactctgctgttggagagtgctggaggaaatgcacttttactgtgctgcactttttatagagctgcattgtcggtgattccaatttaaaaatccatattcaaaaataccctcacacatccctgcatcagtgattctaatgatcagctttgactggacctcagctcacacgaatctccaaggaaaaactctacagagcatcttttagagcaagagattcatacaggccaagtgatgagagggggagtcaccaaggcttcagccccaagggcatctccagcctcaggccggcaggtcctatgtccttgacacaaacgcttcttgctgaaatcctccctagtgatgctgcgagtgctgttggtcccagttctgtgtagcttgccctgccccatgaagggccaccagccaagggccctggccacgtgtgcgccaccttactttggaagtctctggcttgtgtgctggatgaggctgccagaacttgttgggcgttcatcgctgttagtacatatattaaccgtgaggtgttaaacttttcttttgaaggtttggccagtttctaaaaaatgcacatttaaagagaagcatctaccacggctttaaaacaaaacaactctgagatgaacaatatgtgttatactcagagattaacaatctcaatcatacatactgattctttcagacatttaataaccactacattttttttgcattaatgaagtttgactatatgtgtaaagggactaaatattttt

SEQ ID NO: 183256 - DNA, 1752 bp, Homo Sapiens
aactttgtacaaaaaagttggggcgttcatcgctgttagtacatatattaaccgtgaggtgttaaacttttcttttgaaggtttggccagtttctaaaaaatgcacatttaaagagaagcatctaccacggctttaaaacaaaacaactctgagatgaacaatatgtgttatactcagagattaacaatctcaatcatacatactgattctttcagacatttaataaccactacatttttttgcattaatgaagtttgactatatgtgtaaagggactaaatatttttgcaacagcctgttctttgttcattcttttctggatagtgtgtcctctgtattgcggtagatttatacattctgttgcctaaatatgtgtgtaaaatgagctgataaactggagtactacttaaaaaaaagtctgtgatttataagatgtatatgctttctatgtgaatataagcttgtgcacaatgtttaaaagaaaaacaatgaattagaagagatcccccgtcccccagtctgacatatttcatacagaatgtttaaaagaaaaactctgctagtcttggcaaacatttggccatgtgaggcatgtggtcagtttccattttctattacctggaaagggccataaggaagcaggcagggcttaggtagcttggttacctaagttagaaagtaagagaatcatggttcggatatgaattgaagtggttggtacatggatacctgttctttaaaaggaatgtgggagatgagtcaagggtgaggccgattgttctgcccatgccctaccataccaatttcaataacaatcttgcctgtcattgcactcagaatcttaagatcatgtttcaaatatgttgattcaaacttgcttctaagcctgagtccagggatagcaatggtactgaccagctatggactgggagaacattgagtcctgttttccattggcttcagggcgcatccatgtggatataggaaaagcctctttccacagacttaggaagccccccgaccacgcggacgctcgctgggctgcactcagcaggctgcttgagtgggagctgactccaacatgccctgccctggctgggactaggcatgcttccagcccttcccgtgctctccctgctgtcaacacttgcgtacaaacctgcctagctgttgtaagttttcatcagtagcttaagtactagtagcaaaaacttaaattcattcagaaagttgccacttctgaatgagtagagcaggaaaagtaaactttactgaaacataatttgctgcaacagtcaacattgttatgctgaatgtgctctcaactgccctttgctcatcgccagatttattatccagtgtattcctaacagtcttttgttgtcgttgtttttaaaacaaaggtacggaccatgtgctatatataaatcgaatggcttaaactaatttgctatgatcctctaacaccgaaatttcccataaacttaagtgcctacacttaggacttttgaactttcagtcatctttttcgtggtgtctcactgaacgatgtgttagaacatgtgttccatttggagttttgggcctgtgcacggtcaaccccaattaccaatttagttgaggctggattcgattgctcagttcacctgccacgttctctccacgagtggggtctacgtgacctttagtcctctacctcagagccccgagtcatttctgaccaccccgttctgtgtcctcactcttgtccc

SEQ ID NO: 183257 - DNA, 2498 bp, Homo Sapiens
ttgatgagcaatgctttccctataatggccaactttgtacaaaaaagttggcccgccatggcactgtcgcgggggctgccccgggagctggctgaggcggtggccgggggccgggtgctggtggtgggggcgggcggcatcggctgcgagctcctcaagaatctcgtgctcaccggtttctcccacatcgacctgattgatctggatactattgatgtaagcaacctcaacagacagtttttgtttcaaaagaaacatgttggaagatcaaaggcacaggttgccaaggaaagtgtactgcagttttacccgaaagctaatatcgttgcctaccatgacagcatcatgaaccctgactataatgtggaatttttccgacagtttatactggttatgaatgctttagataacagagctgcccgaaaccatgttaatagaatgtgcctggcagctgatgttcctcttattgaaagtggaacagctgggtatcttggacaagtaactactatcaaaaagggtgtgaccgagtgttatgagtgtcatcctaagccgacccagagaacctttcctggctgtacaattcgtaacacaccttcagaacctatacattgcatcgtttgggcaaagtacttgttcaaccagttgtttggggaagaagatgctgatcaagaagtatctcctgacagagctgaccctgaagctgcctgggaaccaacggaagccgaagccagagctagagcatctaatgaagatggtgacattaaacgtatttctactaaggaatgggctaaatcaactggatatgatccagttaaactttttaccaagctttttaaagatgacatcaggtatctgttgacaatggacaaactatggcggaaaaggaaacctccagttccgttggactgggctgaagtacaaagtcaaggagaagaaacgaatgcatcagatcaacagaatgaaccccagttaggcctgaaagaccagcaggttctagatgtaaagagctatgcacgtcttttttcaaagagcatcgagactttgagagttcatttagcagaaaagggggatggagctgagctcatatgggataaggatgacccatctgcaatggattttgtcacctctgctgcaaacctcaggatgcatattttcagtatgaatatgaagagtagatttgatatcaaatcaatggcagggaacattattcctgctattgctactactaatgcagtaattgctgggttgatagtattggaaggattgaagattttatcaggaaaaatagaccagtgcagaacaatttttttgaataaacaaccaaacccaagaaagaagcttcttgtgccttgtgcactggatcctcccaaccccaattgttatgtatgtgccagcaagccagaggtgactgtgcggctgaatgtccataaagtgactgttctcaccttacaagacaagatagtgaaagaaaaatttgctatggtagcaccagatgtccaaattgaagatgggaaaggaacaatcctaatatcttccgaagagggagagacggaagctaataatcacaagaagttgtcagaatttggaattagaaatggcagccggcttcaagcagatgacttcctccaggactatactttattgatcaacatccttcatagtgaagacctaggaaaggacgttgaatttgaagttgttggtgatgccccggaaaaagtggggcccaaacaagctgaagatgctgccaaaagcataaccaatggcagtgatgatggagctcagccctccacctccacagctcaagagcaagatgacgttctcatagttgattcggatgaagaagattcttcaaataatgccgacgtcagtgaagaagagagaagccgcaagaggaaattagatgagaaagagaatctcagtgcaaagaggtcacgtatagaacagaaggaagagcttgatgatgtcatagcattagattgaacagaaatgcctctaaacagaaccctcttactatttagtttatctgggcagaaccagattgttatgtcctttgttccaaagggaaaaaattgacagcagtgacttgaaaatgattctgctccctttgaaagcattcattttgctagaactgttagacacattgcagtatgctgtattgaaagtaggaatatagttttaaaaaccctttgaacaaagtgtgtgcataaccagtcatgagataaaacaacacaatgcatgttgcctttttaatgtaaatacccttaggtatcattaatagtttcaaaatattgtggtttagtaaagttgatacctggttataaatattatgccttttattttttggctagaagaagaattatttttagcctagatctaaccattttcatactcttaactgattgaaacagattcaaagaagtatcgagtgctatgcattgaaacttgtttttaaatgttacatggccctatgtatattaatgtaaaacaatgttaatttt

SEQ ID NO: 183258 - DNA, 1626 bp, Homo Sapiens
  misc_feature (251)..(265): n is a, c, g, or t
ttgggaagattcacaggtaattgtagaagaagtaagcatttttcctgtggaagaacagcaggaagtaccaccagatacttaaagcttcaaaaagactgcccctaccaccacaggaggaccagcctaaccatacgctccaaaagatggctgtgatagatcttgtgaagcaattactgagcagatcaagatctttgggaaggaacactaaagatgttttgaatgaattatagtccactggcattttagtgtannnnnnnnnnnnnnnagaaacacacatttctaaaaatgtcatgttacattcctgcatgtcccttttgatagcattagtggatccattggatttcttttttctttttgtgagacagcttttagtcttacctgaatttatgtgtgtttttccgacagtggttaataattatattggtgatgtagcagcaattgtgttggcagggttttcatatattattagtaattaacactaactgttggactgacttgtgtacactgtgttaaacatgatttaaaagctattaagagtactttgtgttagcactcttaaaaacgctaacagagatcatcattagctgtgaagatttgagttgtatatacctgcactgatattcttatcaaaaatttctacattagctttaagtgttcagattaacacttttgaaatttttgtagcttttagctgattaattagaaaaattaatatttcagtgaaagttttaaattatcatttatttatttttttaaatgagaggggaaagctgaaattccttgttaagacacaaggaaaaagaatggccctactattatcatgcaaaaatgctttgttggcacctcagattaatcatataatagctatagtctcttcagcatttgtttaaattttagaaaacctgtataaattactggtgcataacttaaagattattctgcctttggctaattgagtaattcccctccagcactagagaccgctcagtgctcttactagatgaactcagtaacgccttgagctgggttgattgaggatgtgtgaaaagctcacagagcccgatgcctgctgctatttcacggcaatgagcctttttctttctacactgaagattttcttcttatttaatgtggtttattttgggctcagaaataattgctctgttgaaaataatcctttgtcagaaaagaaggtagctaccacatcattttgaaaggaccatgagcaactataagcaaagccataagaagtggtttgatcgatatattaggggtagctcttgattttgttaacattaagataaggtgactttttccccctgcttttaggattaaaatcaaagatacttctatatttttatcactatagatcatagttattatacaatgtagtgagtcctgcatgggtactcgatgtgtaatgaaacctgaaataataagataataagaaaagcaataattttctaaagctgtgctgtcggtgatacagagatgatactcaaattataataaaactcttcattttgtgaattatagaagctactttttataaagccatatttttttagggaaactaaggagtgacatagaactgatgaatgagtaaagtaagttttgctggatttt

SEQ ID NO: 183259 - DNA, 1334 bp, Homo Sapiens
  misc_feature (1054)..(1068): n is a, c, g, or t
ttggcaaagcatggaggacacaagaatgggaggaaaggcggactctcaggaacttcattcttcacgtggtttatggtgattgcattgctgggcgtctggacatctgtagctgtcgtttggtttgatcttgttgactatgaggaagttctagccaaagcaaaggacttccgttataacttatcagaggtgcttcaaggaaaactaggaatctatgatgctgatggtgatggagattttgatgtggatgatgccaaagttttattaggacttaaagagagatctacttcagagccagcagtcccgccagaagaggctgagccacacactgagcccgaggagcaggttcctgtggaggcagaaccccagaatatcgaagatgaagcaaaagaacaaattcagtcccttctccatgaaatggtacacgcagaacatgttgagggagaagacttgcaacaagaagatggacccacaggagaaccacaacaagaggatgatgagtttcttatggcgactgatgtagatgatagatttgagaccctggaacctgaagtatctcatgaagaaaccgagcatagttaccacgtggaagagacagtttcacaagactgtaatcaggatatggaagagatgatgtctgagcaggaaaatccagattccagtgaaccagtagtagaagatgaaagattgcaccatgatacagatgatgtaacataccaagtctatgaggaacaagcagtatatgaacctctagaaaatgaagggatagaaatcacagaagtaactgctccccctgaggataatcctgtagaagattcacaggtaattgtagaagaagtaagcatttttcctgtggaagaacagcaggaagtaccaccagatacttaaagcttcaaaaagactgcccctaccaccacaggaggaccagcctaaccatacgctccaaaagatggctgtgatagatcttgtgaagcaattactgagcagatcaagatctttgggaaggaacactaaagatgttttgaatgaattatagtccactggcattttagtgtannnnnnnnnnnnnnnagaaacacacatttctaaaaatgtcatgttacattcctgcatgtcccttttgatagcattagtggatccattggatttcttttttctttttgtgagacagcttttagtcttacctgaatttatgtgtgtttttccgacagtggttaataattatattggtgatgtagcagcaattgtgttggcagggttttcatatattattagtaatttaacactaactgttggactgacttgtgtacactgtgttaaacatgatttaaaagcta

SEQ ID NO: 183260 - DNA, 1713 bp, Homo Sapiens
  misc_feature (1194)..(1208): n is a, c, g, or t
ttggcacagggtctgctgcaggagcagcggcccgaacccgctccagcggcccgccgccgccagcggctcccgcgtcgcgtgtgtacccccgcgcactgaaggaggtccaccagccctcaccagcccccgcggaccgtgcaatggcccagcgtaagaatgccaagagcagcggcaacagcagcagcagcggctccggcagcggtagcacgagtgcgggcagcagcagccccggggcccggagagagacaaagcatggaggacacaagaatgggaggaaaggcggactctcaggaacttcattcttcacgtggtttatggtgattgcattgctgggcgtctggacatctgtagctgtcgtttggtttgatcttgttgactatgaggaagttctaggaaaactaggaatctatgatgctgatggtgatggagattttgatgtggatgatgccaaagttttattaggacttaaagagagatctacttcagagccagcagtcccgccagaagaggctgagccacacactgagcccgaggagcaggttcctgtggaggcagaaccccagaatatcgaagatgaagcaaaagaacaaattcagtcccttctccatgaaatggtacacgcagaacatgttgagggagaagacttgcaacaagaagatggacccacaggagaaccacaacaagaggatgatgagtttcttatggcgactgatgtagatgatagatttgagaccctggaacctgaagtatctcatgaagaaaccgagcatagttaccacgtggaagagacagattccagtgaaccagtagtagaagatgaaagattgcaccatgatacagatgatgtaacataccaagtctatgaggaacaagcagtatatgaacctctagaaaatgaagggatagaaatcacagaagtaactgctccccctgaggataatcctgtagaagattcacaggtaattgtagaagaagtaagcatttttcctgtggaagaacagcaggaagtaccaccagatacttaaagcttcaaaaagactgcccctaccaccacaggaggaccagcctaaccatacgctccaaaagatggctgtgatagatcttgtgaagcaattactgagcagatcaagatctttgggaaggaacactaaagatgttttgaatgaattatagtccactggcattttagtgtannnnnnnnnnnnnnnagaaacacacatttctaaaaatgtcatgttacattcctgcatgtcccttttgatagcattagtggatccattggatttcttttttctttttgtgagacagcttttagtcttacctgaatttatgtgtgtttttccgacagtggttaataattatattggtgatgtagcagcaattgtgttggcagggttttcatatattattagtaattaacactaactgttggactgacttgtgtacactgtgttaaacatgatttaaaagctattaagagtactttgtgttagcactcttaaaaacgctaacagagatcatcattagctgtgaagatttgagttgtatatacctgcactgatattcttatcaaaaatttctacattagctttaagtgttcagattaacacttttgaaatttttgtagcttttagctgattaattagaaaaatttaatatttcagtgaaagttttaaattatcatttatttatttttttaaatgagaggggaaa

SEQ ID NO: 183261 - DNA, 1365 bp, Homo Sapiens
  misc_feature (193)..(253): n is a, c, g, or t
  misc_feature (1152)..(1166): n is a, c, g, or t
ttggcttcccaggtgctgcaggcggtgctgaggcacagggtctgctgcaggagcagcggcccgaacccgctccagcggcccgccgccgccagcggctcccgcgtcgcgtgtgtacccccgcgcactgaaggaggtccaccagccctcaccagcccccgcggaccgtgcaatggcccagcgtaagaatgccaannnnnnnnnnnnnnnnnnnnnnnnnnnnnnnnnnnnnnnnnnnnnnnnnnnnnnnnnnnnnagccccggggcccggagagagacaaagcatggaggacacaagaatgggaggaaaggcggactctcaggaacttcattcttcacgtggtttatggtgattgcattgctgggcgtctggacatctgtagctgtcgtttggtttgatcttgttgactatgaggaagttctaggaaaactaggaatctatgatgctgatggtgatggagattttgatgtggatgatgccaaagttttattaggacttaaagagagatctacttcagagccagcagtcccgccagaagaggctgagccacacactgagcccgaggagcaggttcctgtggaggcagaaccccagaatatcgaagatgaagcaaaagaacaaattcagtcccttctccatgaaatggtacacgcagaacatgaaaccgagcatagttaccacgtggaagagacagtttcacaagactgtaatcaggatatggaagagatgatgtctgagcattgaaaatccagattccagtgaaccagtagtagaagatgaaagattgcaccatgatacagatgatgtaacataccaagtctatgaggaacaagcagtatatgaacctctagaaaatgaagggatagaaatcacagaagtaactgctccccctgaggataatcctgtagaagattcacaggtaattgtaaaagaagtaagcatttttcctgtggaagaacagcaggaagtaccactatatacttaaagcttcaaaaagactgcccctaccaccccaggaggaccagcctaaccatacgctccaaaagatggctgtgatagatcttgtgaagcaattactgagcagatcaagatctttgggaaggaacactaaagatgttttgaatgaattatagtccactggcattttagtgtannnnnnnnnnnnnnnagaaacacatttctaaaaatgtcatgttacattcctgcatgtcccttttgatagcattagtggatccattggatttcttttttctttttgtgagacagcttttagtcttacctgaatttatgtgtgtttttccgacagtggttaataattatattggtgatgtagcagcaattgtgatggcagggttttcatatattat

SEQ ID NO: 183262 - DNA, 1242 bp, Homo Sapiens
ttggatttcagacaaacatggatttactatattgaactccatgcacaaataccagccccggttccacattgtaagagccaatgacatcttgaaactcccttatagtacatttcggacatacttgttccccgaaactgaattcatcgctgtgactgcataccagaatgataagataacccagttaaaaatagacaacaacccttttgcaaaaggtttccgggacactggaaatggccgaagagaaaaaagaaaacagctcaccctgcagtccatgagggtgtttgatgaaagacacaaaaaggagaatgggacctctgatgagtcctccagtgaacaagcagctttcaactgcttcgcccaggcttcttctccagccgcctccactgtagggacatcgaacctcaaagatttatgtcccagcgagggtgagagcgacgccgaggccgagagcaaagaggagcatggccccgaggcctgcgacgcggccaagatctccaccaccacgtcggaggagccctgccgtgacaagggcagccccgcggtcaaggctcaccttttcgctgctgagcggccccgggacagcgggcggctggacaaagcgtcgcccgactcacgccatagccccgccaccatctcgtccagcactcgcggcctgggcgcggaggagcgcaggagcccggttcgcgagggcacagcgccggccaaggtggaagaggcgcgcgcgctcccgggcaaggaggccttcgcgccgctcacggtgcagacggacgcggccgccgcgcacctggcccagggccccctgcctggcctcggcttcgccccgggcctggcgggccaacagttcttcaacgggcacccgctcttcctgcaccccagccagtttgccatggggggcgccttctccagcatggcggccgctggcatgggtcccctcctggccacggtttctggggcctccaccggtgtctcgggcctggattccacggccatggcctctgccgctgcggcgcagggactgtccggggcgtccgcggccaccctgcccttccacctccagcagcacgtcctggcctctcagggcctggccatgtcccctttcggaagcctgttcccttacccctacacgtacatggccgcagcggcggccgcctcctctgcggcagcctccagctcgggtgcaccgccaccccttcctcaaatctgaacaccatgcgcccgcggctgcgctacagcccctactcc

SEQ ID NO: 183263 - DNA, 3321 bp, Homo Sapiens
  misc_feature (146)..(182): n is a, c, g, or t
ttgggcaagatcgtgtatcccacggagaaggtgaactgtctggataagttctggcataaagcatgcttccattgcgagacctgcaagatgacactgaacatgaagaactacaagggctacgagaagaagccctactgcaacgcacnnnnnnnnnnnnnnnnnnnnnnnnnnnnnnnnnnnnncccggaaaaccttcgcctcaagcaacagagtgagctccagagtcaggtgcgctacaaggaggagtttgagaagaacaagggcaaaggtttcagcgtagtggcagacacgcccgagctccagagaatcaagaagacccaggaccagatcagtaatataaaataccatgaggagttggagaagagccgcatgggccctagcgggggcgagggcatggagccagagcgtcgggattcgcaggacggcagcagctaccggcggcccctggagcagcagcagcctcaccacatcccgaccagtgccccggtttaccagcagccccagcagcagccggtggcccagtcctatggtggctacaaggagcctgcagccccagtctccatacagcgcagcgccccaggtggtggcgggaagcggtaccgcgcggtgtatgactacagcgccgccgacgaggacgaggtctccttccaggacggggacaccatcgtcaacgtgcagcagatcgacgacggctggatgtacgggacggtggagcgcaccggcgacacggggatgctgccggccaactacgtggaggccatctgaacccgcagcgcccccatctgtcttcagcacattccacggcatcgcatccgtcctgggcgtgacccgtccattcttcagtgtctctgttttttaaaacctgcgacagcttgtgattcctacccctcttccagcttcttttgccaactgaagccttcttctgccacttctgcgggctccctcctctggcaggcttcccccttgatcgacttcttggttttctctctggatggaacgggcatgggcctctctgggggagggcgaggcccgtggggcagggctggaatgggagacctgttggcctgtgggcctcacctgcccctctgttctctcccctcacatcctcctgcccagctcctcacatacccacacattccagggctggggtgagcctgactgccaggaccccaggtcaggggctccctacattccccagagtgggatccacttcttggttcctgggatggcgatggggactctgccgctgtgtagagaccagtgggatgggctctacctctctttctcaaagagggggctctgcccacctggggtctctctccctacctccctcctcaggggcaacaacaggagaatggggttcctgctgtggggcgaattcatcccctccccgcgcgttccttcgcacactgtgattttgccctcctgcccacgcagacctgcagcgggcaaagagctcccgaggaagcacagcttgggtcaggttcttgcctttcttaattttagggacagctaccggaaggaggggaacaaggagttctcttccgcagcccctttccccacgcccacccccagtctccagggacccttgcctgcctcctaggctggaagccatggtcccgaagtgtagggcaagggtgcctcaggaccttttggtcttcagcctccctcagcccccaggatctgggttaggtggccgctcctccctgctcctcatgggaagatgtctcagagccttccatgacctcccctccccagcccaatgccaagtggacttggagctgcacaaagtcagcagggaccactaaatctccaagacctggtgtgcggaggcaggagcatgtatgtctgcaggtgtctgacacgcaagtgtgtgagtgtgagtgtgagagatggggcgggggtgtgtctgtaggtgtctctgggcctgtgtgtgggtggggttatgtgagggtatgaagagctgtcttcccctgagagtttcctcagaacccacagtgagaggggagggctcctggggcagagaagttccttaggttttctttggaatgaaattcctccttccccccatctctgagtggaggaagcccaccaatctgccctttgcagtgtgcagggtggaaggtaagaggttggtgtggagttggggctgccatagggtctgcagcctgctggggctaagcggtggaggaaggctctgtcactccaggcatatgtttccccatctctgtctggggctacagaatagggtggcagaagtgtcaccctgtgggtgtctccctcgggggctcttcccctagacctccccctcacttacataaagctcccttgaagcaagaaagagggtcccagggctgcaaaactggaagcacagcctcggggatggggagggaaagacggtgctatatccagttcctgctctctgctcatgggtggctgtgacaaccctggcctcacttgattcatctctggttttcttgccaccctctgggagtccccatcccattttcatcctgagcccaaccaggccctgccattggcctcttgtcccttggcacacttgtacccacaggtgaggggcaggacctgaaggtattggcctgttcaacaatcagtcatcatgggtgtttttgtcaactgcttgttaattgatttggggatgtttgccccgaatgagaggttgaggaaaagactgtgggtggggaggccctgcctgacccatcccttttcctttctggccccagcctaggtggaggcaagtggaatatcttatattgggcgatttgggggctcggggaggcagagaatctcttgggagtcttgggtggcgctggtgcattctgtttcctcttgatctcaaagcacaatgtggatttggggaccaaaggtcagggacacatccccttagaggacctgagtttgggagagtggtgagtggaagggaggagcagcaagaagcagcctgttttcactcagcttaattctccttcccagataaggcaagccagtcatggaatcttgctgcaggccctccctctactcttcctgtcctaaaaataggggccgttttcttacacacccccagagagaggagggactgtcacactggtgctgagtgaccgggggctgctgggcgtctgttctttaccaaaaccatccatccctagaaagagcacagagccctgaggggctgggctgggctgggctgagcccctgggtcttctctacagttcacagaggtctttcagctcatttaatcccaggaaagagcatcaaagctagaatgtgaatataacttttgtggacaatactagaataaca

SEQ ID NO: 183264 - DNA, 1243 bp, Homo Sapiens
ttagattgatattcatgtcatcttagaaacttaaattagaatcactaaatcacagcattactgaaaataagggaagaaaattaaagcaactcaagatggagttctaagttacaccaacattttttgtatctataaaacagtcacaagtctgaatatatctttacaggtattattacttacaaaaaaataattcctggtttcttctaattactatttgttaagtaacatacatttctatttatagcaaaagaaactaacactgaataagaaggttaaaaatcacactggacttaatagatttcttactcgaccatcctgcagcggtgccttgtcagtctgtcataggcgtcatccatatctctgacatctttggaactccagagtctctcaccaacagcacttgcccgaggccataatcttggagtgaggttagttgcatccacatattctccccatagacaagcttctccaccaatgaaaagttgtttctgtttctgagtaccgccaaaatcaagaggttccactttatagtatttcctccaatcttgtccatagctaatcaaatctaagtaccaaggagcagaaaggattacagggaagccagatgctgtgactctactgagttcctcaggatatgcgctgtctttccatacttcaactattgtgcccggcgcaagctttgctttatcatcaaaaacctcctgccagacaatggatcccttgtttatggttgcaataatatccaaaaccttttgaatgtagaaagattctagtttcttaaaatctgtgccaaagcctttttgcctcatgaaatcttgaatttttggatttgattcccaacatttaaattccacttcatctcctcccaaatgaatgaattgatctggaaacacctcactaatttctttgaaaaatgtagtaaggaagctgtatgttgtattcagagtagggtttataggtccaaaagagtccaacttgttttgtctactgtaacatggagtcaggaggtctttctgaccttttccccaagatagtgtatgcccaggggtatcaaattctggcaggactcgaattcctcgtaatctggcatattcaatcaccatacggacatcatttggtgtataaacatgagacaaagaatagcttcctttattgcttaactcaggaaaagtgatgctctgatatgggaaagactggtcatcaactatgtgcgcagtgaagaaccaacttttttgtacaaagt

SEQ ID NO: 183265 - DNA, 1762 bp, Homo Sapiens
ttggattaaggaagttcactggagtaaaatggaggcctcagtaatattacccattctgaagaaaaaaactagccttcctttcaggaggaaaggacagacggagtggcctcattttgacaattccattatgcctcgaacagacaaatatggatgagctgagtgtcaccttagactacctactcagcattccaagtgagaagtgtaaggctagaggatttaccgtgattgtggatggcagaaaatcacagtggaatgtggtgaaaacagtagtcgtaatgctacagaatgttgttccagctgaggtgtcccttgtttgtgtggtaaagccagatgaattctgggataagaaagtaacgcatttttgtttttggaaggagaaggatagacttggctttgaggttattttagtgtccgccaacaaattgactcgttatatagaaccatgccaattaacagaagattttggtgggagtctcacctatgatcacatggactggttaaataagaggctggtttttgagaagtttacaaaggaatctacatcattattagatgaacttgctttgattaacaatggaagtgataaaggaaatcagcaagagaaagaaaggtctgtggatttaaactttcttccatcggttgatcctgaaacagttcttcagacagggcatgaattgttgtccgaattacagcagcgtcgatttaatggctcagacggaggggtttcatggtctcctatggatgatgaacttcttgcacagccacaggttatgaaattattagattcactccgagagcaatatacccgctaccaggaagtttgtaggcaacgtagcaagcgcacacagttagaagagattcaacagaaggtaatgcaggtggtgaactggctagaagggcctggatcagaacaactaagagcccagtggggcattggagactccattagggcctcccaggccctacagcagaaacacgaagagattgagagccagcacagtgaatggtttgcagtgtatgtggaacttaatcagcaaattgcagcactcttgaatgctggcgatgaggaagatcttgtggaactaaagtcactgcagcaacaacttagtgatgtttgttatcgacaggccagtcagctggaatttaggcaaaatctcttacaagcagctcttgaatttcatggtgttgcccaagatttgtctcagcagttggatggcttattagggatgttgtgcgtagatgtagcaccagctgatggagcatcgattcagcaaactttaaaactgcttgaagagaagctgaaaagtgttgatgtgggattgcaaggtttgcgtgaaaaaggtcaaggtctcctggatcagatctccaatcaggcatcctgggcctatggaaaggatgtaaccattgaaaataaagaaaatgtggaccacatacaaggagtgatggaagatatgcagcttagaaaacaaagatgtgaagacatggtagatgtgcgaaggttaaagatgcttcagatggtgcagttgtttaaatgtgaagaagatgctgcccaggcagtagaatggctaagtgaacttctggatgctctgcttaagactcacatcagattgggcgatgatgctcaagaaacgaaagttttgctggaaaagcatagaaaatttgttgatgttgcacagagcacttatgactatggcaggcagttgctacaggccacagttgtgttatgccaatctttgcgctgcacttctcggtcatctgggga

SEQ ID NO: 183266 - DNA, 1124 bp, Homo Sapiens
ttggccccatccctctcccctctccttcctctcgcttcctctctcgcacctgagcgtacgcacctgcccgggcccggctccctcctcctctcccctccctctttccccgcccggccgcgggagcctcgtggctgcgtcaccgccgcccccccagacaagatggacaccgcggaggaagacatatgtagagtgtgtcggtcagaaggaacacctgagaaaccgctttatcatccttgtgtatgtactggcagtattaagtttatccatcaagaatgcttagttcaatggctgaaacacagtcgaaaagaatactgtgaattatgcaagcacagatttgcttttacaccaatttattctccagatatgccttcacggcttccaattcaagacatatttgctggactggttacaagtattggcactgcaatacgatattggtttcattatacacttgtggcctttgcatggttgggagttgttcctcttacagcatgccgcatctacaagtgcttgtttactggctccgtgagctcactactgacgctgccattagatatgctgtcaacggaaaatttgttggcagattgtttgcagggttgttttgtggtgacgtgcacactgtgtgcattcatcagcctggtgtggttgagagagcagatagtccatgggggagcaccaatttggttggagcatgctgccccaccgttcaatgctgcggggcatcaccaaaatgaggctcctccaggaggaaatggtgcagaaaatgttgctgctgatcagcctgctaacccaccagctgagaacgcagtggtgggggaaaaccctgatgcccaggatgaccaggcagaagaggaggaggaggacaatgaggaggaagatgacgctggtgtggaggatgcggcagatgctaataacggagcccaggatgacatgaattggaatgctttagaatgggaccgagctgctgaagagcttacatgggaaagaatgctaggacttgatggatcactagtttttctggaacatgtcttctgggtggtatctttaaatacactgttcattcttgtttttgcattttgcccttaccatattggtcatttctcccttgttggtttggatttgaa

SEQ ID NO: 183267 - DNA, 1941 bp, Homo Sapiens
ataatgccaactttgtacaaaaaagttggctctgaaagatcgagaactgagctttcagtcggctccaggtactaccatgtttctgcattggctagtgggaatggtatatgtcttctactttgcctccttcattctactactgagagaggtacttcgacctggtgtcctgtggtttctaaggaatttgaatgatccagatttcaatccagtacaggaaatgatccatttgccaatatataggcatctccgaagatttattttgtcagtgattgtctttggctccattgtcctcctgatgctttggcttcctatacgtataattaagagtgtgctgcctaattttcttccatacaatgtcatgctctacagtgatgctccagtgagtgaactgtccctcgagctgcttctgcttcaggttgtcttgccagcattactcgaacagggacacacgaggcagtggctgaaggggctggtgcgagcgtggactgtgaccgccggatacttgctggatcttcattcttatttattgggagaccaggaagaaaatgaaaacagtgcaaatcaacaagttaacaataatcagcatgctcgaaataacaacgctattcctgtggtgggagaaggccttcatgcagcccaccaagccatactccagcagggagggcctgttggctttcagccttaccgccgacctttaaattttccactcaggatatttctgttgattgtcttcatgtgtataacattactgattgccagcctcatctgccttactttaccagtatttgctggccgttggttaatgtcgttttggacggggactgccaaaatccatgagctctacacagctgcttgtggtctctatgtttgctggctaaccataagggctgtgacggtgatggtggcatggatgcctcagggacgcagagtgatcttccagaaggttaaagagtggtctctcatgatcatgaagactttgatagttgcggtgctgttggctggagttgtccctctccttctggggctcctgtttgagctggtcattgtggctcccctgagggttcccttggatcagactcctcttttttatccatggcaggactgggcacttggagtcctgcatgccaaaatcattgcagctataacattgatgggtcctcagtggtggttgaaaactgtaattgaacaggtttacgcaaatggcatccggaacattgaccttcactatattgttcgtaaactggcagctcccgtgatctctgtgctgttgctttccctgtgtgtaccttatgtcatagcttctggtgttgttcctttactaggtgttactgcggaaatgcaaaacttagtccatcggcggatttatccatttttactgatggtcgtggtattgatggcaattttgtccttccaagtccgccagtttaagcgcctttatgaacatattaaaaatgacaagtaccttgtgggtcaacgactcgtgaactacgaacggaaatctggcaaacaaggctcatctccaccacctccacagtcatcccaagaataaagtagttgtctcaacaacttgaccttcccctttacatgtccttttttgtggacttctctctttggagatttttcccagtgatctctcagcgttgtttttaagttaaatgtatttgacttgtgttctcagcattcagagagcagcggtgtaagattctgctgttctccctggatcttctgacattactgctgtctgagatttgtatatgtgtaaatacaagttccttgataccctaaaaccttggattaaacagaatgtgcattgtacatctttaaacaaaatgtatattaatttattaaatctagttgtcactttattttggacctgctgtgatctcgacaggaaacgtgccacagagcagtagtgcgcaggcaagacttttcagtgacgcc

SEQ ID NO: 183268 - DNA, 1441 bp, Homo Sapiens
  misc_feature (530)..(541): n is a, c, g, or t
  misc_feature (954)..(962): n is a, c, g, or t
tttgtacaaaaaagttgggtcaattattcttaaagacagtttgaggggatgtgtaggagtggagcatgaaacagtttataaggctggggctgtattatcagcacagcaaattaaagaatgaaagaagtacttctttttacatttcagctccagcagccagctatttaaaaaatatttttaaatatcttccccaaagtttaagatgtgggaccatctacttgtaagaaacagtggcttatttcttcatttctcagtaatcattgtaaaccttttttttcttctccactctaacaaaagtaaaagaacaaaacttttgctgaggtcttggactccactacttgttagttatgttggcctggacagatggcaggtctgtcggcagttcctcagtctgtaaaatgaagattatcattcttgcctctccctttgtcacagtgttgtcgtgaagatcagatatgtatgaatgcagtcaaataaactaaaaactaggaaagtgttaactatcgttgcccaccgaatttgaggtagcnnnnnnnnnnnngaatgttctggtacatgaacagactgagaaggcctttcgacatccctgaagctagtctcctgtctagactaaaaatatccttgaaagaatagtagcaaacagtatgcagtactcctgtgttctaagttcttttatgttttagtttaccctcacagcagccatagtgttaagtcattatgagcttcatcttaaagataagaaaactgaggcaaggggagattaacttactgccaaatttcaaacagttagtagtatttgagaccagtagtatggctctaatcttacccttagccctcccaaccattatgctgtactatctacccataaatacctccaggaaacattcccctcttggtaatttgtccttctatagaagcttcaaagattaaatcaaattaattttcaaaaaaaannnnnnnnnagaaatgttattttccctgtgatagaggatgacttcccagtttcaccaaagtctgtttatatcaacacacacaaaatggaataattctgagtcactaggcaatcaatctactgtggttttactatgtaaggtgaaaattaactggaacgatgtttgtttgctatacttacatagtcaaactttacaagccatgaaattaattgcactctttgtatttgttgttaaatgcctaagaagttttctaaaaattttgtaaaggcactgtcagagaatctggagttgaatgattattccagatactgtataacctgcataactttttgtctttaagtcgtgtttgtaaaagaagtaattgctagaaacatatgataatgtacaaagtagtctataatgactgttcagtacatttttaatatttttttggttatatccaactttttgtaaatatactgggaagcttgataataaaatgtatttcc

SEQ ID NO: 183269 - DNA, 2092 bp, Homo Sapiens
ttgggccactgccgccgcccaggagccctcgtcccctgccttgtccccctactcgttcccgctcccacggcatggagcaggacactgccgcagtggcagccaccgtggcagccgcggatgcgaccgccactatcgtggtcatagaggacgagcagcccgggccgtccacctctcaggaggagggagcggccgccgcggccaccgaagccaccgcggccacggagaagggcgagaagaagaaggagaaaaacgtttcttcatttcaactcaaacttgctgctaaagcgcctaaatctgaaaaggaaatggacccagaatatgaagagaaaatgaaagccgaccgagcaaagagatttgaatttttactgaagcagacagaactttttgcacatttcattcagccttcagcacagaaatctccaacatctccactgaacatgaaattgggacgtccccgaataaagaaagatgaaaagcagagcttaatttctgctggagactaccgccataggcgcacagagcaagaagaagatgaagagctactgtctgagagtcggaaaacatctaatgtgtgtattagatttgaggtgtcaccttcatatgtgaaaggggggccactgagagattatcagattcgaggactgaattggttgatctctttatatgaaaatggagtcaatggcattttggctgatgaaatgggccttgggaaaactttacaaacaattgctttgcttggttacctgaaacactaccgaaatattcctggacctcacatggttttagttccaaagtctactttacacaactggatgaatgaatttaaacgatgggtcccatctctccgtgtcatttgttttgtcggagacaaggatgccagagctgcttttattcgtgatgaaatgatgccaggagagtgggatgtttgcgttacttcttatgagatggtaattaaagaaaaatctgtattcaaaaagtttcactggcgatacctggtcattgatgaagctcacagaataaagaatgaaaaatctaagctttcagagattgttcgtgagttcaagtcgactaaccgcttgctcctaactggaacacctttgcagaataacctgcatgaactgtgggccttactcaactttttattgcctgatgtctttaattctgcagatgactttgattcttggtttgacactaaaaattgtcttggtgatcaaaaactcgtggaaagacttcatgcagttttaaaaccatttttgttacgccgtataaaaactgatgtagagaagagtctgccacctaaaaaggaaataaagatttacttggggctgagtaagatgcaacgagaatggtatacaaaaatcctgatgaaagatattgatgttttaaactcttctggcaagatggacaagatgcgactcttaaacattctgatgcagcttcgaaagtgttgtaatcatccatatctgtttgatggtgctgaacctggtccaccttataccactgatgagcatattgtcagcaacagtggtaaaatggtagttctggataaactattggccaaactcaaagaacagggttcaagggttctcattttcagccagatgactcgcttgctggatattttggaagattattgcatgtggcgtggttatgagtattgtcgactggatggacaaaccccgcatgaagaaagagaggataaattcctagaagtggaatttctgggtcaaagggaagcaatagaggcttttaatgctcctaatagtagcaaattcatctttatgctaagtaccagggctggaggtctcggaattaacctggcaagtgctgatgtggttatactatatgattcagactggaacccacaggttgatctacaagctatggatcgagcacatcgtattggtcagaagaaaccagtacgtgtattccgtctcatcactgacaacactgtttgaagagaggattgtagaaagagctgagataaaactgagactcgattcaattgttatacaacaaggaagactcattgacccaccagtctaacaagctggcaaaagaggaatgttacaaatgatacggcatgggagcc

SEQ ID NO: 183270 - DNA, 782 bp, Homo Sapiens
ttggggagtttctcctcggggtcggagcaggaggcacgcggagtgtgaggccacgcatgagcggacgctaaccccctccccagccacaaagagtctacatgtctagggtctagacatgttcagctttgtggacctccggctcctgctcctcttagcggccaccgccctcctgacgcacggccaagaggaaggccaagtcgagggccaagacgaagacatcccaccaatcacctgcgtacagaacggcctcaggtaccatgaccgagacgtgtggaaacccgagccctgccggatctgcgtctgcgacaacggcaaggtgttgtgcgatgacgtgatctgtgacgagaccaagaactgccccggcgccgaagtccccgagggcgagtgctgtcccgtctgccccgacggctcagagtcacccaccgaccaagaaaccaccggcgtcgagggacccaagggagacactggcccccgaggcccaaggggacccgcaggcccccctggccgagatggcatccctggacagcctggacttcccggaccccccggaccccccggacctcccggaccccctggcctcggaggaaactttgctccccagctgtcttatggctatgatgagaaatctaccggaggaatttccgtgcctggccccatgggtccctctggtcctcgtggtctccctggcccccctggtgcacctggtccccaaggcttccaaggtccccctggtgagcctggcgagcctggagcttcaggtcccatgggtccccaaggtcccc

SEQ ID NO: 183271 - DNA, 1302 bp, Homo Sapiens
  misc_feature (645)..(666): n is a, c, g, or t
ctttgtacaaaaaagttggggattccagtcccgagtatggcggccagggctccgaccctgccgatgtggccatccagctgaccttcctgcgcctgatgtccaccgaggcctcccagaacatcacctaccactgcaagaacagcgtggcctacatggaccagcagactggcaacctcaagaaggccctgctcctccagggctccaacgagatcgagatccgcgccgagggcaacagccgcttcacctacagcgtcactgtcgatggctgcacgagtcacaccggagcctggggcaagacagtgattgaatacaaaaccaccaagacctcccgcctgcccatcatcgatgtggcccccttggacgttggtgccccagaccaggaattcggcttcgacgttggccctgtctgcttcctgtaaactccctccatcccaacctggctccctcccacccaaccaactttccccccaacccggaaacagacaagcaacccaaactgaaccccctcaaaagccaaaaaatgggagacaatttcacatggactttggaaaatatttttttcctttgcattcatctctcaaacttagtttttatctttgaccaaccgaacatgaccaaaaaccaaaagtgcattcaaccttaccnnnnnnnnnnnnnnnnnnnnnngaataaataaataactttttaaaaaaggaagcttggtccacttgcttgaaaacccatgcgggggtaagtccctttctgcccgttgggcttatgaaaccccaatgctgccctttctgctcctttctccacaccccccttggggcctcccctccactccttcccaaatctgtctccccaaaaaacacaggaaacaatgtattgtctgcccagcaatcaaaggcaatgctcaaacacccaagtggcccccaccctcagcccgctcctgcccgcccagcacccccaggccctgggggacctggggttctcagactgccaaagaagccttgccatctggcgctcccatggctcttgcaacacctccccttcgtttttgagggggtcatgccgggggagccaccagcccctcactgggttcggaggagagtcaggaagggccaagcacgacaaagcagaaacatcggatttggggaacgcgtgtcaatcccttgtgccgcagggctgggcgggagagactgttctgttccttgtgtaactgtgttgctgaaagactacctcgttcttgtcttgatgtgtcaccggggcaactgcctgggggcggggatgggggcagggtggaagcgggctccccattttata

SEQ ID NO: 183272 - DNA, 778 bp, Homo Sapiens
gccaactttgtacaaaaaagttggactttttaaaaaaggaagcttggtccacttgcttgaagacccatgcgggggtaagtccctttctgcccgttgggcttatgaaaccccaatgctgccctttctgctcctttctccacaccccccttggggcctcccctccactccttcccaaatctgtctccccagaagacacaggaaacaatgtattgtctgcccagcaatcaaaggcaatgctcaaacacccaagtggcccccaccctcagcccgctcctgcccgcccagcacccccaggccctgggggacctggggttctcagactgccaaagaagccttgccatctggcgctcccatggctcttgcaacatctccccttcgtttttgagggggtcatgccgggggagccaccagcccctcactgggttcggaggagagtcaggaagggccacgacaaagcagaaacatcggatttggggaacgcgtgtcaatcccttgtgccgcagggctgggcgggagagactgttctgttccttgtgtaactgtgttgctgaaagactacctcgttcttgtcttgatgtgtcaccggggcaactgcctgggggcggggatgggggcagggtggaagcggctccccattttataccaaaggtgctacatctatgtgatgggtggggtggggagggaatcactggtgctatagaaattgagatgcccccccaggccagcaaatgttcctttttgttcaaagtctatttttattccttgatatttttctatc

SEQ ID NO: 183273 - DNA, 1433 bp, Homo Sapiens
aaattgatgagcaatgcttttaacatttaaagaaaactttgtacaaaaaagttggaggtgaacaaggccctgctggctcccccggattccagggtctccctggtcctgctggtcctccaggtgaagcaggcaaacctggtgaacagggtgttcctggagaccttggcgcccctggcccctctggagcaagaggcgagagaggtttccctggcgagcgtggtgtgcaaggtccccctggtcctgctggtccccgaggggccaacggtgctcccggcaacgatggtgctaagggtgatgctggtgcccctggagctcccggtagccagggcgcccctggccttcagggaatgcctggtgaacgtggtgcagctggtcttccagggcctaagggtgacagaggtgatgctggtcccaaaggtgctgatggctctcctggcaaagatggcgtccgtggtctgaccggccccattggtcctcctggccctgctggtgcccctggtgacaagggtgaaagtggtcccagcggccctgctggtcccactggagctcgtggtgcccccggagaccgtggtgagcctggtccccccggccctgctggctttgctggcccccctggtgctgacggccaacctggtgctaaaggcgaacctggtgatgctggtgctaaaggcgatgctggtccccctggccctgccggacccgctggaccccctggccccattggtaatgttggtgctcctggagccaaaggtgctcgcggcagcgctggtccccctggtgctactggtttccctggtgctgctggccgagtcggtcctcctggcccctctggaaatgctggaccccctggccctcctggtcctgctggcaaagaaggcggcaaaggtccccgtggtgagactggccctgctggacgtcctggtgaagttggtccccctggtccccctggccctgctggcgagaaaggatcccctggtgctgatggtcctgctggtgctcctggtactcccgggcctcaaggtattgctggacagcgtggtgtggtcggcctgcctggtcagagaggagagagaggcttccctggtcttcctggcccctctggtgaacctggcaaacaaggtccctctggagcaagtggtgaacgtggtccccctggtcccatgggcccccctggattggctggaccccctggtgaatctggacgtgagggggctcctggtgccgaaggttcccctggacgagacggttctcctggcgccaagggtgaccgtggtgagaccggccccgctggaccccctggtgctcctggtgctcctggtgcccctggccccgttggccctgctggcaagagtggtgatcgtggtgagactggtcctgctggtcccgccggtcctgtcggccctgttggcgcccgtggccccgccggaccccaa

SEQ ID NO: 183274 - DNA, 2689 bp, Homo Sapiens
  misc_feature (2070)..(2093): n is a, c, g, or t
ctttgtacaaaaaagttggctcctggagcctaaaaggtgctcgcggcagcgctggtccccctggtgctactggtttccctggtgctgctggccgagtcggtcctcctggcccctctggaaatgctggaccccctggccctcctggtcctgctggcaaagaaggcggcaaaggtccccgtggtgagactggccctgctggacgtcctggtgaagttggtccccctggtccccctggccctgctggcgagaaaggatcccctggtgctgatggtcctgctggtgctcctggtactcccgggcctcaaggtattgctggacagcgtggtgtggtcggcctgcctggtcagagaggagagagaggcttccctggtcttcctggcccctctggtgaacctggcaaacaaggtccctctggagcaagtggtgaacgtggtccccctggtcccatgggcccccctggattggctggaccccctggtgaatctggacgtgagggggctcctggtgccgaaggttcccctggacgagacggttctcctggcgccaagggtgaccgtggtgagaccggccccgctggaccccctggtgctcctggtgctcctggtgcccctggccccgttggccctgctggcaagagtggtgatcgtggtgagactggtcctgctggtcccgccggtcctgtcggccctgttggcgcccgtggccccgccggaccccaaggcccccgtggtgacaagggtgagacaggcgaacagggcgacagaggcataaagggtcaccgtggcttctctggcctccagggtccccctggccctcctggctctcctggtgaacaaggtccctctggagcctctggtcctgctggtccccgaggtccccctggctctgctggtgctcctggcaaagatggactcaacggtctccctggccccattgggccccctggtcctcgcggtcgcactggtgatgctggtcctgttggtccccccggccctcctggacctcctggtccccctggtcctcccagcgctggtttcgacttcagcttcctgccccagccacctcaagagaaggctcacgatggtggccgctactaccgggctgatgatgccaatgtggttcgtgaccgtgacctcgaggtggacaccaccctcaagagcctgagccagcagatcgagaacatccggagcccagagggcagccgcaagaaccccgcccgcacctgccgtgacctcaagatgtgccactctgactggaagagtggagagtactggattgaccccaaccaaggctgcaacctggatgccatcaaagtcttctgcaacatggagactggtgagacctgcgtgtaccccactcagcccagtgtggcccagaagaactggtacatcagcaagaaccccaaggacaagaggcatgtctggttcggcgagagcatgaccgatggattccagttcgagtatggcggccagggctccgaccctgccgatgtggccatccagctgaccttcctgcgcctgatgtccaccgaggcctcccagaacatcacctaccactgcaagaacagcgtggcctacatggaccagcagactggcaacctcaagaaggccctgctcctccagggctccaacgagatcgagatccgcgccgagggcaacagccgcttcacctacagcgtcactgtcgatggctgcacgagtcacaccggagcctggggcaagacagtgattgaatacaaaaccaccaagacctcccgcctgcccatcatcgatgtggcccccttggacgttggtgccccagaccaggaattcggcttcgacgttggccctgtctgcttcctgtaaactccctccatcccaacctggctccctcccacccaaccaactttccccccaacccggaaacagacaagcaacccaaactgaaccccctcaaaagccaaaaaatgggagacaatttcacatggactttggaaaatatttttttcctttgcattcatctctcaaacttagtttttatctttgaccaaccgaacatgaccaaaaaccaaaagtgcattcaaccttaccnnnnnnnnnnnnnnnnnnnnnnnngaataaataaataactttttaaaaaaggaagcttggtccacttgcttgaagacccatgcgggggtaagtccctttctgcccgttgggcttatgaaaccccaatgctgccctttctgctcctttctccacaccccccttggggcctcccctccactccttcccaaatctgtctccccagaagacacaggaaacaatgtattgtctgcccagcaatcaaaggcaatgctcaaacacccaagtggcccccaccctcagcccgctcctgcccgcccagcacccccaggccctgggggacctggggttctcagactgccaaagaagccttgccatctggcgctcccatggctcttgcaacatctcctcttcgtttttgagggggtcatgccgggggagccaccagctcctcactgggttcggaggagagtcaggaagggccaagcacgacaaagcagaaacatcggatttggggaacgcgtgtcaatctctttgtgccgcagggctgggcgggagagactgttctgttccttgtgtaactgtgttgctgaaagactacctcgttcttgtcttgatgtgtcaccggggcaactgcctggggg

SEQ ID NO: 183275 - DNA, 598 bp, Homo Sapiens
ccaactttgtacaaaaaagttggcccaaatctgtctccccagaagacacaggaaacaatgtattgtctgcccagcaatcaaaggcaatgctcaaacacccaagtggcccccaccctcagcccgctcctgcccgcccagcacccccaggccctgggggacctggggttctcagactgccaaagaagccttgccatctggcgctcccatggctcttgcaacatctccccttcgtttttgagggggtcatgccgggggagccaccagcccctcactgggttcggaggagagtcaggaagggccaagcacgacaaagcagaaacatcggatttggggatctcgtgtcaatcccttgtgccgcagggctgggcgggagagactgttctgttccttgtgtaactgtgttgctgaaagactacctcgttcttgtcttgatgtgtcaccggggcaactgcctgggggcggggatgggggcagggtggaagcggctccccattttataccaaaggtgctacatctatgtgatgggtggggtggggagggaatcactggtgctatagaaattgagatgcccccccaggccagcaaatgttcctttttg

SEQ ID NO: 183276 - DNA, 1070 bp, Homo Sapiens
ggccagggggtccagcatttccagaggggccaggaggaccgactcggcccagcagcaccagggaaaccagtagcaccagggggaccagcgctgccgcgagcacctttggctccaggagcaccaacattaccaatggggccagggggtccagcgggtccggcagggccagggggaccagcatcgcctttagcaccagcatcaccaggttcgcctttagcaccaggttggccgtcagcaccaggggggccagcaaagccagcagggccggggggaccaggctcaccacggtctccgggggcaccacgagctccagtgggaccagcagggccgctgggaccactttcacccttgtcaccaggggcaccagcagggccaggaggaccaatggggccggtcagaccacggacgccatctttgccaggagagccatcagcacctttgggaccagcatcacctctgtcacccttaggccctggaagaccagctgcaccacgttcaccaggcattccctgaaggccaggggcgccctggctaccgggagctccaggggcaccagcatcacccttagcaccatcgttgccgggagcaccgttggcccctcggggaccagcaggaccagggggaccttgcacaccacgctcgccagggaaacctctctcgcctcttgctccagaggggccaggggcgccaaggtctccaggaacaccctgttcaccaggtttgcctgcttcacctggaggaccagcaggaccagggagaccctggaatccgggggagccagcagggccttgttcacctctctcgccagcgggaccagcagggccagggggtccctgagctccagcctctccatctttgccagcaggaccgacagcgccagggggtccgggaacacctcgctctccagccttgccgggctctccagcagcacctttaggtccagggaatcccatcacaccagcctgaccacgggcaccaggtgggcctgggggtccggggcgaccatcttgaccggcgggaccctaaggatgggaggcacgaaagcagcagtggggacagcagggagccaa

SEQ ID NO: 183277 - DNA, 665 bp, Homo Sapiens
  misc_feature (546)..(570): n is a, c, g, or t
ctttgtacaaaaaagttggctagtggtccccaccctcagcccgctcctgcccgcccagcacccccaggccctgggggacctggggttctcagactgccaaagaagccttgccatctggcgctcccatggctcttgcaacatctccccttcgtttttgagggggtcatgccgggggagccaccagcccctcactgggttcggaggagagtcaggaagggccaagcacgacaaagcagaaacatcggatttggggaacgcgtgtcaatcccttgtgccgcagggctgggcgggagagactgttctgttccttgtgtaactgtgttgctgaaagactacctcgttcttgtcttgatgtgtcaccggggcaactgcctgggggcggggatgggggcagggtggaagcggctccccattttataccaaaggtgctacatctatgtgatgggtggggtggggagggaatcactggtgctatagaaattgagatgcccccccaggccagcaaatgttcctttttgttcaaagtctatttttattccttgatannnnnnnnnnnnnnnnnnnnnnnnngtggatggggacttgtgaatttttctaaaggtgctatttaacatgggaggaaagcgtgtgcggctccagcccagcccgctgctcactttccaacc

SEQ ID NO: 183278 - DNA, 2263 bp, Homo Sapiens
  misc_feature (344)..(381): n is a, c, g, or t
ttgggtcgagggccaagacgaagacatcccaccaatcacctgcgtacagaacggcctcaggtaccatgaccgagacgtgtggaaacccgagccctgccggatctgcgtctgcgacaacggcaaggtgttgtgcgatgacgtgatctgtgacgagaccaagaactgccccggcgccgaagtccccgagggcgagtgctgtcccgtctgccccgacggctcagagtcacccaccgaccaagaaaccaccggcgtcgagggacccaagggagacactggcccccgaggcccaaggggacccgcaggcccccctggccgagatggcatccctggacagcctggacttnnnnnnnnnnnnnnnnnnnnnnnnnnnnnnnnnnnnnntggcctcggaggaaactttgctccccagctgtcttatggctatgatgagaaatcaaccggaggaatttccgtgcctggccccatgggtccctctggtcctcgtggtctccctggcccccctggtgcacctggtccccaaggcttccaaggtccccctggtgagcctggcgagcctggagcttcaggtcccatgggtccccgaggtcccccaggtccccctggaaagaatggagatgatggggaagctggaaaacctggtcgtcctggtgagcgtgggcctcctgggcctcagggtgctcgaggattgcccggaacagctggcctccctggaatgaagggacacagaggtttcagtggtttggatggtgccaagggagatgctggtcctgctggtcctaagggtgagcctggcagccctggtgaaaatggagctcctggtcagatgggcccccgtggcctgcctggtgagagaggtcgccctggagcccctggccctgctggtgctcgtggaaatgatggtgctactggtgctgccgggccccctggtcccaccggccccgctggtcctcctggcttccctggtgctgttggtgctaagggtgaagctggtccccaagggccccgaggctctgaaggtccccagggtgtgcgtggtgagcctggcccccctggccctgctggtgctgctggccctgctggaaaccctggtgctgatggacagcctggtgctaaaggtgccaatggtgctcctggtattgctggtgctcctggcttccctggtgcccgaggcccctctggaccccagggccccggcggccctcctggtcccaagggtaacagcggtgaacctggtgctcctggcagcaaaggagacactggtgctaagggagagcctggccctgttggtgttcaaggaccccctggccctgctggagaggaaggaaagcgaggagctcgaggtgaacccggacccactggcctgcccggaccccctggcgagcgtggtggacctggtagccgtggtttccctggcgcagatggtgttgctggtcccaagggtcccgctggtgaacgtggttctcctggccctgctggccccaaaggatctcctggtgaagctggtcgtcccggtgaagctggtctgcctggtgccaagggtctgactggaagccctggcagccctggtcctgatggcaaaactggcccccctggtcccgccggtcaagatggtcgccccggacccccaggcccacctggtgcccgtggtcaggctggtgtgatgggattccctggacctaaaggtgctgctggagagcccggcaaggctggagagcgaggtgttcccggaccccctggcgctgtcggtcctgctggcaaagatggagaggctggagctcagggaccccctggccctgctggtcccgctggcgagagaggtgaacaaggccctgctggctcccccggattccagggtctccctggtcctgctggtcctccaggtgaagcaggcaaacctggtgaacagggtgttcctggagaccttggcgcccctggcccctctggagcaagaggcgagagaggtttccctggcgagcgtggtgtgcaaggtccccctggtcctgctggtccccgaggggccaacggtgctcccggcaacgatggtgctaagggtgatgctggtgcccctggagctcccggtagccagggcgcccctggccttcagggaatgcctggtgaacgtggtgcagctggtcttccagggcctaagggtgacagaggtgatgctggtcccaaaggtgctgatggctctcctggcaaagatggcgtcccgtggtctgaccggccccattggtcctcctggccctgctggtgcccctggtga

SEQ ID NO: 183279 - DNA, 891 bp, Homo Sapiens
  misc_feature (529)..(566): n is a, c, g, or t
ttggctcctcggggtcggagcaggaggcacgcggagtgtgaggccacgcatgagcggacgctaaccccctccccagccacaaagagtctacatgtctagggtctagacatgttcagctttgtggacctccggctcctgctcctcttagcggccaccgccctcctgacgcacggccaagaggaaggccaagtcgagggccaagacgaagacatcccaccaatcacctgcgtacagaacggcctcaggtaccatgaccgagacgtgtggaaacccgagccctgccggatctgcgtctgcgacaacggcaaggtgttgtgcgatgacgtgatctgtgacgagaccaagaactgccccggcgccgaagtccccgagggcgagtgctgtcccgtctgccccgacggctcagagtcacccaccgaccaagaaaccaccggcgtcgagggacccaagggagacactggcccccgaggcccaaggggacccgcaggcccccctggccgagatggcatccctggacagcctggacttnnnnnnnnnnnnnnnnnnnnnnnnnnnnnnnnnnnnnntggcctcggaggaaactttgctccccagctgtcttatggctatgatgagaaatcaaccggaggaatttccgtgcctggccccatgggtccctctggtcctcgtggtctccctggcccccctggtgcacctggtccccaaggcttccaaggtccccctggtgagcctggcgagcctggagcttcagtcccatgggtccccgaggtcccccaggtccccctggaaagaatgagatgatggggaagctggaaaacctggtcgtcctgtgagcgtgggcctcctgggcctcaggtgctcgaggattgcccggacagctggcctccctgg

SEQ ID NO: 183280 - DNA, 775 bp, Homo Sapiens
  misc_feature (203)..(240): n is a, c, g, or t
gggaccccatgggacctgaagctccagggctcgccaggctcaccagggggaccttggaagcctttggggaccaggtgcaccaggggggccagtgagaccacgaggaccagagggacccatggggccaggcacggaaattcctccggttgatttctcatcatagccataagacagctggggagcaaagtttcctccgaggccannnnnnnnnnnnnnnnnnnnnnnnnnnnnnnnnnnnnnaagtccaggctgtccagggatgccatctcggccaggggggcctgcgggtccccttgggcctcgggggccagtgtctcccttgggtccctcgacgccggtggtttcttggtcggtgggtgactctgagccgtcggggcagacgggacagcactcgccctcggggacttcggcgccggggcagttcttggtctcgtcacagatcacgtcatcgcacaacaccttgccgttgtcgcagacgcagatccggcagggctcgggtttccacacgtctcggtcatggtacctgaggccgttctgtacgcaggtgattggtgggatgtcttcgtcttggccctcgacttggccttcctcttggccgtgcgtcaggagggcggtggccgctaagaggagcaggagccggaggtccacaaagctgaacatgtctagaccctagacatgtagactctttgtggctggggagggggttagcgtccgctcatgcgtggcctcacactccgcgtgcctcctgctccgaccccgaggagaaactccacaa

SEQ ID NO: 183281 - DNA, 997 bp, Homo Sapiens
  misc_feature (84)..(104): n is a, c, g, or t
  misc_feature (866)..(890): n is a, c, g, or t
caatgctttttcatttaaaaaacaactttgtacaaaaaagttggcgaacatgaccaaaaaccaaaagtgcattcaaccttaccnnnnnnnnnnnnnnnnnnnnngaataaataaataactttttaaaaaaggaagcttggtccacttgcttgaagacccatgcgggggtaagtccctttctgcccgttgggcttatgaaaccccaatgctgccctttctgctcctttctccacaccccccttggggcctcccctccactccttcccaaatctgtctccccagaagacacaggaaacaatgtattgtctgcccagcaatcaaaggcaatgctcaaacacccaagtggcccccaccctcagcccgctcctgcccgcccagcacccccaggccctgggggacctggggttctcagactgccaaagaagccttgccatctggcgctcccatggctcttgcaacatctccccttcgtttttgagggggtcatgccgggggagccaccagcccctcactgggttcggaggagagtcaggaagggccaagcacgacaaagcagaaacatcggatttggggaacgcgtgtcaatcccttgtgccgcagggctgggcgggagagactgttctgttccttgtgtaactgtgttgctgaaagactacctcgttcttgtcttgatgtgtcaccggggcaactgcctgggggcggggatgggggcagggtggaagcggctccccattttataccaaaggtgctacatctatgtgatgggtggggtggggagggaatcactggtgctatagaaattgagatgcccccccaggccagcaaatgttcctttttgttcaaagtctatttttattccttgatannnnnnnnnnnnnnnnnnnnnnnnngtggatggggacttgtgaaatttttctaaaagtgctattttaacatgggaaggagagcggtgtgcggctccaggccagcccgctgctcactttccaccctctctcca

SEQ ID NO: 183282 - DNA, 1577 bp, Homo Sapiens
  misc_feature (221)..(260): n is a, c, g, or t
tacaaaaaagttggtgaagcagccgagaccgacccgcccgcccgcggccccgcagcagctccaagaaggaaccaagagaccgaggccttcccgctgcccggacccgacaccgccaccctcgctccccgccggcagccggcagccagcggcagtggatcgaccccgttctgcggccgttgagtagttttcaattccggttgatttttgtccctctgcgcttnnnnnnnnnnnnnnnnnnnnnnnnnnnnnnnnnnnnnnnnggcactcgctctcctcctctcacggaaaggtcgcggcctgtggccctgcgggcagccgtgccgagatgaaccccagtgcccccagctaccccatggcctcgctctacgtgggggacctccaccccgacgtgaccgaggcgatgctctacgagaagttcagcccggccgggcccatcctctccatccgggtctgcagggacatgatcacccgccgctccttgggctacgcgtatgtgaacttccagcagccggcggacgcggagcgtgctttggacaccatgaattttgatgttataaagggcaagccagtacgcatcatgtggtctcagcgtgatccatcacttcgcaaaagtggagtaggcaacatattcattaaaaatctggacaaatccattgataataaagcactgtatgatacattttctgcttttggtaacatcctttcatgtaaggtggtttgtgatgaaaatggttccaagggctatggatttgtacactttgagacgcaggaagcagctgaaagagctattgaaaaaatgaatggaatgctcctaaatgatcgcaaagtatttgttggacgatttaagtctcgtaaagaacgagaagctgaacttggagctagggcaaaagaattcaccaatgtttacatcaagaattttggagaagacatggatgatgagcgccttaaggatctctttggcaagtttgggcctgccttaagtgtgaaagtaatgactgatgaaagtggaaaatccaaaggatttggatttgtaagctttgaaaggcatgaagatgcacagaaaggtgttaatctttatgtgaaaaatcttgatgatggtattgatgatgaacgtctccggaaagagttttctccatttggtacaatcactagtgcaaaggttatgatggagggtggtcgcagcaaagggtttggttttgtatgtttctcctccccagaagaagccactaaagcagttacagaaatgaacggtagaattgtggccacaaagccattgtatgtagctttagctcagcgcaaagaagagcgccaggctcacctcactaaccagtatatgcagagaatggcaagtgtacgagctgttcccaaccctgtaatcaacccctaccagccagcacctccttcaattacttcatggcagctatcccacagactcagaaccgtgctgcatactatcctcctagccaaattgctcaactaagaccaagtcctcgctgggactgctcagggtgccagacctcatccattccaaaatatgcccggtgctatccgcccagctgctcctagaccaccattta

SEQ ID NO: 183283 - DNA, 1739 bp, Homo Sapiens
  misc_feature (1342)..(1419): n is a, c, g, or t
  misc_feature (1503)..(1546): n is a, c, g, or t
ttggatctttgatttatgtaaaaaaattttttagggcctgccttaagtgtgaaagtaatgactgatgaaagtggaaaatccaaaggatttggatttgtaagctttgaaaggcatgaagatgcacagaaagctgtggatgagatgaacggaaaggagctcaatggaaaacaaatttatgttggtcgagctcagaaaaaggtggaacggcagacggaacttaagcgcaaatttgaacagatgaaacaagataggatcaccagataccagggtgttaatctttatgtgaaaaatcttgatgatggtattgatgatgaacgtctccggaaagagttttctccatttggtacaatcactagtgcaaaggttatgatggagggtggtcgcagcaaagggtttggttttgtatgtttctcctccccagaagaagccactaaagcagttacagaaatgaacggtagaattgtggccacaaagccattgtatgtagctttagctcagcgcaaagaagagcgccaggctcacctcactaaccagtatatgcagagaatggcaagtgtacgagctgttcccaaccctgtaatcaacccctaccagccagcacctccttcaggttacttcatggcagctatcccacagactcagaaccgtgctgcatactatcctcctagccaaattgctcaactaagaccaagtcctcgctggactgctcagggtgccagacctcatccattccaaaatatgcccggtgctatccgcccagctgctcctagaccaccatttagtactatgagaccagcttcttcacaggttccacgagtcatgtcaacacagcgtgttgctaacacatcaacacagacaatgggtccacgtcctgcagctgcagccgctgcagctactcctgctgtccgcaccgttccacagtataaatatgctgcaggagttcgcaatcctcagcaacatcttaatgcacagccacaagttacaatgcaacagcctgctgttcatgtacaaggtcaggaacctttgactgcttccatgttggcatctgcccctcctcaagagcaaaagcaaatgttgggtgaacggctgtttcctcttattcaagccatgcaccctactcttgctggtaaaatcactggcatgttgttggagattgataattcagaacttcttcatatgctcgagtctccagagtcactccgttctaaggttgatgaagctgtagctgtactacaagcccaccaagctaaagaggctgcccagaaagcagttaacagtgccaccggtgttccaactgtttaaaattgatcagggaccatgaaaagaaacttgtgcttcaccnnnnnnnnnnnnnnnnnnnnnnnnnnnnnnnnnnnnnnnnnnnnnnnnnnnnnnnnnnnnnnnnnnnnnnnnnnnnnnggaaaggaaactttgaaccttatgtaccgagcaaatgccaggtctagcaaacataatgctagtcctagattacttattgatttnnnnnnnnnnnnnnnnnnnnnnnnnnnnnnnnnnnnnnnnnnnnttaatgttttatagaccctgggaaaaagaattttcagcaaagtacaaaaatttaaagcattcctttctttaatttgtaattctttactgtggaatagctcagaatgtcagttctgttttagtaacagaatggataactgaaccaggaaacgtaatttggattataaattcttgctttaataaaaatcccttaa

SEQ ID NO: 183284 - DNA, 1615 bp, Homo Sapiens
  misc_feature (249)..(306): n is a, c, g, or t
ttggtttattttttttcttcctcttttataaaataacccggtgaagcagccgagaccgacccgcccgcccgcggccccgcagcagctccaagaaggaaccaagagaccgaggccttcccgctgcccggacccgacaccgccaccctcgctccccgccggcagccggcagccagcggcagtggatcgaccccgttctgcggccgttgagtagttttcaattccggttgatttttgtccctctgcgcttgnnnnnnnnnnnnnnnnnnnnnnnnnnnnnnnnnnnnnnnnnnnnnnnnnnnnnnnnnntcacggaaaggtcgcggcctgtggccctgcgggcagccgtgccgagatgaaccccagtgcccccagctaccccatggcctcgctctacgtgggggacctccaccccgacgtgaccgaggcgatgctctacgagaagttcagcccggccgggcccatcctctccatccgggtctgcagggacatgatcacccgccgctccttgggctacgcgtatgtgaacttccagcagccggcggacgcggagcgtgctttggacaccatgaattttgatgttataaagggcaagccagtacgcatcatgtggtctcagcgtgatccatcacttcgcaaaagtggagtaggcaacatattcattaaaaatctggacaaatccattgataataaagcactgtatgatacattttctgcttttggtaacatcctttcatgtaaggtggtttgtgatgaaaatggttccaagggctatggatttgtacactttgagacgcaggaagcagctgaaagagctattgaaaaaatgaatggaatgctcctaaatgatcgcaaagtatttgttggacgatttaagtctcgtaaagaacgagaagctgaacttggagctagggcaaaagaattcaccaatgtttacatcaagaattttggagaagacatggatgatgagcgccttaaggatctctttgggcctgccttaagtgtgaaagtaatgactgatgaaagtggaaaatccaaaggatttggatttgtaagctttgaaaggcatgaagatgcacagaaagctgtggatgagatgaacggaaaggagctcaatggaaaacaaatttatgttggtcgagctcagaaaaaggtggaacggcagacggaacttaagcgcaaatttgaacagatgaaacaagataggatcaccagataccagggtgttaatctttatgtgaaaaatcttgatgatggtattgatgatgaacgtctccggaaagagttttctccatttggtacaatcactagtgcaaaggttatgatggagggtggtcgcagcaaagggtttggttttgtatgtttctcctccccagaagaagccactaaagcagttacagaaatgaacggtagaattgtggccacaaagccattgtatgtagctttagctcagcgcaaagaagagcgccaggctcacctcactaaccagtatatgcagagaatggcaagtgtacgagctgttcccaaccctgtaatcaacccctaccagccagcacctccttcaggttacttcatggcagctatcccacagactcagaaccgtgctgcatactatcct

SEQ ID NO: 183285 - DNA, 1712 bp, Homo Sapiens
  misc_feature (1470)..(1484): n is a, c, g, or t
atttgtccttttctagtttgcattatttggttttcacggcacatggtttttagtacatatgtttgtgtatttaaaaaactgtgttgaggcgccctggctcgccctgcgccagaggctcgcgcactcagcaggttgggctgcggcggcggcggctggggaagccgaagcgccgcgcgtgagagatcccgggatacatctgcggttgggctccgccaccctccgtctctctcccgcaggtctctgagccgggtgcggaaggagggaacggccctagccttgggaagccaaagcacacccctggctcctgccgacaccgccctccttcccttcccagccgcgggcctcgctccgtgctcggctactctgccgggaggcggcggcggctgccagtctgtggcgagccctgctgccctccagccgggctcctccagccgggctcctccaccggcccttgcaggggcgcagagagctcggcgcccgcccttccgctcgcctttttcgtcagccggctggaggagcatcggtccgggaggtctctgggctgaggcggcgacagctcctctagttccaccatgtccgcgggcggagacttcgggaatccgctgaggaaattcaagctggtgttcctgggggagcaaagcgttgcaaagacatctttgatcaccagattcaggtatgacagttttgacaacacctatcaggcaataattggcattgactttttatcaaaaactatgtacttggaggatggaacaatcgggcttcggctgtgggatacggcgggtcaggaacgtctccgtagcctcattcccagttacatccgtgattctgctgcagctgtagtagtttacgatatcacaaatgttaactcattccagcaaactacaaagtggattgatgatgtcagaacagaaagaggaagtgatgttatcatcatgctagtaggaaataaaacagatcttgctgacaagaggcaagtgtcaattgaggagggagagaggaaagccaaagagctgaatgttatgtttattgaaactagtgcaaaagctggatacaatgtaaagcagctctttcgacgtgtagcagcagctttgccgggaatggaaagcacacaggacagaagcagagaagatatgattgacataaaactggaaaagcctcaggagcaaccagtcagtgaaggaggctgttcctgctaatctcccatgtcatcttcaaccttcttcagaagctcactgctttggcccccttactctttcattgactgcagtgtgaatattggcttgaaccttttcccttcagtaataacgtattgcaattcatcattgctgcctgtctcgtggagatgatctattagcttcacaagcacaacaaaagtcagtgtcttcattatttatattttacaaaaagccaaaatatttcagcatattccagtgataactttaaaaattagatacattttcttaacannnnnnnnnnnnnnnaatgttatgataatgtacttcaaaatgatggaaatctcaacagtatgagtatgggcttggttaacgagcggtatgttcacagcctactttatctctccttgcttttctcacctctcacttacccccattccctattaccctattcttacctagcctcccccgacttcctcaaaacaactagagatggcaaagcagcagttctaccaggccctttggaattatccttta

SEQ ID NO: 183286 - DNA, 1754 bp, Homo Sapiens
  misc_feature (263)..(296): n is a, c, g, or t
  misc_feature (314)..(370): n is a, c, g, or t
  misc_feature (384)..(562): n is a, c, g, or t
  misc_feature (1076)..(1089): n is a, c, g, or t
tgagccaccgcgcccagccctgaacctcactctttatatgaaagataggaatgctactatacagttttgttaaatgaatgatctgtcctttttctgcgtttctgtaatactttattattcaaatgacatttttgctgcttatttcatagctgtttacttttgtcttatcccaccagttaaaaaaacaggaatcatgtctttatacctctttgtatttggtatattgctttttatataatactcgtttatagaatgaatagacnnnnnnnnnnnnnnnnnnnnnnnnnnnnnnnnnnaagacagagtctcgcccnnnnnnnnnnnnnnnnnnnnnnnnnnnnnnnnnnnnnnnnnnnnnnnnnnnnnnnnntgagctgaagcagnnnnnnnnnnnnnnnnnnnnnnnnnnnnnnnnnnnnnnnnnnnnnnnnnnnnnnnnnnnnnnnnnnnnnnnnnnnnnnnnnnnnnnnnnnnnnnnnnnnnnnnnnnnnnnnnnnnnnnnnnnnnnnnnnnnnnnnnnnnnnnnnnnnnnnnnnnnnnnnnnnnnnnnnnnnnnnnnnnngtgtgagccactgcgcccagcattagacagctcactgtacagtgatcataaacctcagtaccctttgctaaatgttccctctcagttatcacttttctctctttcccacagctctttcgacgtgtagcagcagctttgccgggaatggaaagcacacaggacagaagcagagaagatatgattgacataaaactggaaaagcctcaggagcaaccagtcagtgaaggaggctgttcctgctaatctcccatgtcatcttcaaccttcttcagaagctcactgctttggcccccttactctttcattgactgcagtgtgaatattggcttgaaccttttcccttcagtaataacgtattgcaattcatcattgctgcctgtctcgtggagatgatctattagcttcacaagcacaacaaaagtcagtgtcttcattatttatattttacaaaaagccaaaatatttcagcatattccagtgataactttaaaaattagatacattttcttaacannnnnnnnnnnnnnaatgttatgataatgtacttcaaaatgatggaaatctcaacagtatgagtatggcttggttaacgagcggtatgttcacagcctactttatctctccttgcttttctcacctctcacttacccccattccctattaccctattcttacctagcctcccccgacttcctcaaaacaaacaagagatggcaaagcagcagttctaccaagcccattggaattatcctttaattttacagataccacttgctgtaggctacggaccaagatgtccaaaattattcttgagcactgataaaaattacggtcttctttgaggtcaaaattcagccatcatggtaggcagtgcttgaatgagaaaaggctcctggtgcatcttcaaaatgagtcctaaagaacatactgagtacttagaagtagaagaacataagatgtatttctgactaaaacaaatggctctttcacatgtgctttattagactctgggagagaaaattaaccaagtgcttcaggacaggtttttagtatttaattcttcacggtaagaaaatgaagttctaatgaactgtttctcccaaggttttaaaattgtcaagagttattctgtttgtttaaaaaataagaaactctttaagcaatagattttgcttgggttttcttttttaaa

SEQ ID NO: 183287 - DNA, 1820 bp, Homo Sapiens
  misc_feature (1482)..(1494): n is a, c, g, or t
  misc_feature (1537)..(1546): n is a, c, g, or t
gtttgtcgtgtgcgatcctcacactcatgaacatacacaggtctacccccatcacaatagcgagatatgggagatcgcggaacaaaacccaggatttcgaagagttgtcgtctataaggtccgcggagcccagccagagtttcagcccgaacctcggctccccgagcccgcccgagactccgaacttgtcgcattgcgtttcttgtatcgggaaatacttattgttggaacctctggagggagaccacgtttttcgtgccgtgcatctgcacagcggagaggagctggtgtgcaaggtgtttgatatcagctgctaccaggaatccctggcaccgtgcttttgcctgtctgctcatagtaacatcaaccaaatcactgaaattatcctgggtgagaccaaagcctatgtgttctttgagcgaagctatggggacatgcattccttcgtccgcacctgcaagaagctgagagaggaggaggcagccagactgttctaccagattgcctcggcagtggcccactgccatgacggggggctggtgctgcgggacctcaagctgcggaaattcatctttaaggacgaagagaggactcgggtcaagctggaaagcctggaagacgcctacattctgcggggagatgatgattccctctccgacaagcatggctgcccggcttacgtaagcccagagatcttgaacaccagtggcagctactcgggcaaagcagccgacgtgtggagcctgggggtgatgctgtacaccatgttggtggggcggtaccctttccatgacattgaacccagctccctcttcagcaagatccggcgtggccagttcaacattccagagactctgtcgcccaaggccaagtgcctcatccgaagcattctgcgtcgggagccctcagagcggctgacctcgcaggaaattctggaccatccttggttttctacagattttagcgtctcgaattcagcatatggtgctaaggaagtgtctgaccagctggtgccggacgtcaacatggaagagaacttggaccctttctttaactgagctcatgccccacggagacttagcaggttccaggagtgagcgagggcagcggaaaggagttcttccgggggacacgaattgcctggctgagtagcaagaaagacacactcttaagtttcttggttcagagcaggaaaaccttcaaggagctgactgaccacgtagcatgggggcaagaggcgtgggatggggattggggtgagatggatgggagcccgctggagcttgtcttccctaacatagcctgggagaccaccccttgccacttgggccacttccgcctaccccacttttcattttgttccaaaatagttgcagatcctgacagaatcaaaactctctgcctcaaacacacatcctggcatcgcactgttagcatttaacttcttgttaggattcagggaaggaacagttggccaagaannnnnnnnnnnnnaaacaagccaaccacctagctggtaattaatgaggttcacttnnnnnnnnnnttcggtgcacacagactgacatgaaacctgagtgctacagtaaaagaaaacaaaagtccagtttgtgtctcttaatcgctcacttcaactcatttcttctaaataaactatttaatatcctggtcaggaaatgacatgttaatgctttgctccctgaaggggaaaaatctgtcctttaacaagctattctgttttgtgtcaattggttcgtggcaggaagctattaaagtcaaacgtccagatgcattactgctatcttagtttaagggggaaa

SEQ ID NO: 183288 - DNA, 1498 bp, Homo Sapiens
  misc_feature (46)..(55): n is a, c, g, or t
  misc_feature (322)..(362): n is a, c, g, or t
  misc_feature (1297)..(1310): n is a, c, g, or t
  misc_feature (1346)..(1354): n is a, c, g, or t
ttggaacaagccaaccacctagctggtaattaatgaggttcacttnnnnnnnnnnttcggtgcacacagactgacatgaaacctgggtgctacagtaaaagaaaacaaaagtccagtttgtgtctcttaatcgctcacttcaactcatttcttctaaataaactatttaatatcctggtcaggaaatgacatgttaatgctttgctccctgaagggggaaaaaatctgtcctttaacaagctattctgttttgtgtcaattggttcgtggcaggaagctattagaagtcaaacgtccagatgcattactgctatcttagttnnnnnnnnnnnnnnnnnnnnnnnnnnnnnnnnnnnnnnnnntccaactcctttttcatgttttgcttttgaacaatgagggtttgtgtgacaggcattcctctttgctgagatgatagcaatggcctgagattttagcaagctcctggagtctgatgcttttgcagtactctgatcgcaactaaacatttgtctttgttttattagaaactagtgaaacaaagcaggttgtcccacatgtataaaatacagggcagctatttagttttctttacagagaatgatccttttaaggcttgtaaggccctctggtttggcaaaaaccctcagtagagacaagcgggaaggataattagctgaaagctatgatgatataaataaaaacagctctctatcccaatacgcacctttgtattttcaagaactcttctatttattaaggaaaatgtcacattgtgatgtattaagccagtacttcaattacgggttgacttgggatgacatattacatgctgtagttaacatttataattctttttccttgtttgagtatttctgtctctgaaataaccttttacttggcttttctagatagctttatttgatttcgagtggcaaaatgttttttattacggcttttctattgctgtatgatacagaactcttttggcataaatatttgtgttcccagtacctcacttgttcggatttgactgcctgtatatgttttgtgaaatggtcctgtttttgggtaggtgacacgtggactctagtatgtaaatgttacttgaatctgtgcttcataatagtgtgtggcatgtatgtgcagactcttggatgctttatgcctgcgcagcaggagccctgtcctcacgttcccaggagggcggcttcacccttcgtaaccaggagacaaggcggccatggatttgcccttgattctattttgctaatggaagatagaaaggagagaaggnnnnnnnnnnnnnnaacattctgaagatggtgctgtgtcaagaaggaccnnnnnnnnnccctctcccctattttttaagtaccttggaggagagaggttggtgacatgcatggtggggatctatggcctctggtgctttgtcctgtatttggtttaatgtttttgtcctatcttcaatcaataaaattgtgcgtatttaact

SEQ ID NO: 183289 - DNA, 1788 bp, Homo Sapiens
  misc_feature (106)..(132): n is a, c, g, or t
  misc_feature (151)..(197): n is a, c, g, or t
  misc_feature (469)..(508): n is a, c, g, or t
aaggtgtgcacttttattcaactggtctcaagtcagtgtacaggtaagccctggctgcctccacccactcccagggagaccaaaagccttcatacatttcaagttnnnnnnnnnnnnnnnnnnnnnnnnnnncacgaaggctcatcattcnnnnnnnnnnnnnnnnnnnnnnnnnnnnnnnnnnnnnnnnnnnnnnnttgcattacataatttacacgaaagcaatgctatcacctcccctgtgtggacttgggagaggactgggccattctccttagagagaagtggggtggcttttaggatggcaagggacttcctgtaacaacgcatctcatatttggaatgactattaaaaaaacaacaatgtgcaatcaaagtcctcggccacattgtgaactttgggggatgctcgctccaaccgactgctgtcaccttcaccgttccagtttttaaatcctgagtcaagccnnnnnnnnnnnnnnnnnnnnnnnnnnnnnnnnnnnnnnnntaaagccatgccaatctcatcttgttttctgcgcaagttaggttttgtcaagaaagggtgtaacgcaactaagtcatagtccgcctagaagcatttgcggtggacgatggaggggccggactcgtcatactcctgcttgctgatccacatctgctggaaggtggacagcgaggccaggatggagccgccgatccacacggagtacttgcgctcaggaggagcaatgatcttgatcttcattgtgctgggtgccagggcagtgatctccttctgcatcctgtcggcaatgccagggtacatggtggtgccgccagacagcactgtgttggcgtacaggtctttgcggatgtccacgtcacacttcatgatggagttgaaggtagtttcgtggatgccacaggactccatgcccaggaaggaaggctggaagagtgcctcagggcagcggaaccgctcattgccaatggtgatgacctggccgtcaggcagctcgtagctcttctccagggaggagctggaagcagccgtggccatctcttgctcgaagtccagggcgacgtagcacagcttctccttaatgtcacgcacgatttcccgctcggccgtggtggtgaagctgtagccgcgctcggtgaggatcttcatgaggtagtcagtcaggtcccggccagccaggtccagacgcaggatggcatgggggagggcatacccctcgtagatgggcacagtgtgggtgaccccgtcaccggagtccatcacgatgccagtggtacggccagaggcgtacagggatagcacagcctggatagcaacgtacatggctggggtgttgaaggtctcaaacatgatctgggtcatcttctcgcggttggccttggggttcaggggggcctcggtcagcagcacggggtgctcctcgggagccacacgcagctcattgtagaaggtgtggtgccagattttctccatgtcgtcccagttggtgacgatgccgtgctcgatggggtacttcagggtgaggatgcctctcttgctctgggcctcgtcgcccacataggaatccttctgacccatgcccaccatcacgccctggtgcctggggcgccccacgatggaggggaagacggcccggggggcatcgtcgcccgcgaagccggccttgcacatgccggagccgttgtcgacgacgagcgcggcgatatcatcatccatggtgagctggcggcgggtgtggacgggcggcggatcgggaaaggcgagccaacttttttgtacaaagt

SEQ ID NO: 183290 - DNA, 1394 bp, Homo Sapiens
  misc_feature (271)..(314): n is a, c, g, or t
tgcattacataatttacacgaaagcaatgctatcacctcccctgtgtggacttgggagaggactgggccattctccttagagagaagtggggtggcttttaggatggcaagggacttcctgtaacaacgcatctcatatttggaatgactattaaaaaaacaacaatgtgcaatcaaagtcttcggccacattgtgaactttgggggatgctcgctccaaccgactgctgtcaccttcaccgttccagtttttaaatcctgagtcaagccnnnnnnnnnnnnnnnnnnnnnnnnnnnnnnnnnnnnnnnnnnnngccatgccaatctcatcttgttttctgcgcaagttaggttttgtcaagaaagggtgtaacgcaactaagtcatagtccgcctagaagcatttgcggtggacgatggaggggccggactcgtcatactcctgcttgctgatccacatctgctggaaggtggacagcgaggccaggatggagccgccgatccacacggagtacttgcgctcaggaggagcaatgatcttgatcttcattgtgctgggtgccagggcagtgatctccttctgcatcctgtcggcaatgccagggtacatggtggtgccgccagacagcactgtgttggcgtacaggtctttgcggatgtccacgtcacacttcatgatggagttgaaggtagtttcgtggatgccacaggactccatgcccaggaaggaaggctggaagagtgcctcagggcagcggaaacgttcatttccgatggtgatcacttgcccatcaggcaactagtaactcttctcaagggaggatgaggatgcggcagtggccatctcattttcaaagtccagagctacataacacagtttctccttgatgtcccggacaatctcacgctcagcagtagtaacgaaggaatagccacgctcagtcaggatcttcatgaggtagtcagtgagatctcggccagccagatccagacgcatgatggcatggggcaaggcatagccctcatagatggggacattgtgggtgacaccatctccagagtccagcacgatgccagttgtgcgtccagaggcatagagagacagcaccgcctggatagccacatacatggctgggacattgaaagtctcaaacataatttgagtcattttctcccggttggccttggggttcaggggtgcctccgtgagcagggtgggatgctcttcaggggcaacacgaagctcattgtagaaagagtggggccagatcttttccatgtcgtcccagttggtgatgatgccatgttctatcgggtacttcagggtcaggattcctcttttgctctgtcccaacttttttgtacaaagttggctttataaggaaagcattgct

SEQ ID NO: 183291 - DNA, 1667 bp, Homo Sapiens
  misc_feature (1450)..(1493): n is a, c, g, or t
ctttgtacaaaaaagttggcgccgccagctccccatggatgatgatatcgccgcgctcgtcgtcgacaacggctccggcatgtgcaaggccggcttcgcgggcgacgatgccccccgggccgtcttcccctccatcgtggggcgccccaggcaccagggcgtgatggtgggcatgggtcagaaggattcctatgtgggcgacgaggcccagagcaagagaggcatcctcaccctgaagtaccccatcgagcacggcatcgtcaccaactgggacgacatggagaaaatctggcaccacaccttctacaatgagctgcgtgtggctcccgaggagcaccccgtgctgctgaccgaggcccccctgaaccccaaggccaaccgcgagaagatgacccagatcatgtttgagaccttcaacaccccagccatgtacgttgctatccaggctgtgctatccctgtacgcctctggccgtaccactggcatcgtgatggactccggtgacggggtcacccacactgtgcccatctacgaggggtatgccctcccccatgccatcctgcgtctggacctggctggccgggacctgactgactacctcatgaagatcctcaccgagcgcggctacagcttcaccaccacggccgagcgggaaatcgtgcgtgacattaaggagaagctgtgctacgtcgccctggacttcgagcaagagatggccacggctgcttccagctcctccctggagaagagctacgagctgcctgacggccaggtcatcaccattggcaatgagcggttccgctgccctgaggcactcttccagccttccttcctgggtgagtggagactgtctcccggctctgcctgacatgagggttacccctcggggctgtgctgtggaagctaagtcctgccctcatttccctctcaggcatggagtcctgtggcatccacgaaactaccttcaactccatcatgaagtgtgacgtggacatccgcaaagacctgtacgccaacacagtgctgtctggcggcaccaccatgtaccctggcattgccgacaggatgcagaaggagatcactgccctggcacccagcacaatgaagatcaaggtgggtgtctttcctgcctgagctgacctgggcaggtcggctgtggggtcctgtggtgtgtggggagctgtcacatccagggtcctcactgcctgtccccttccctcctcagatcattgctcctcctgagcgcaagtactccgtgtggatcggcggctccatcctggcctcgctgtccaccttccagcagatgtggatcagcaagcaggagtatgacgagtccggcccctccatcgtccaccgcaaatgcttctaggcggactatgacttagttgcgttacaccctttcttgacaaaacctaacttgcgcagaaaacaagatgagattggcatggcnnnnnnnnnnnnnnnnnnnnnnnnnnnnnnnnnnnnnnnnnnnnggcttgactcaggatttaaaaactggaacggtgaaggtgacagcagtcggttggagcgagcatcccccaaagttcacaatgtggccgaggactttgattgcacattgttgtttttttaatagtcattccaaatatgagatgcattgttacaggaagttccttgccatcctaaaa

SEQ ID NO: 183292 - DNA, 2176 bp, Homo Sapiens
  misc_feature (1854)..(1892): n is a, c, g, or t
ttgggaagtggccagggcgggggcgacttcggctcacagcgcgcccggctattctcgcagctcaccatggatgatgatatcgccgcgctcgtcgtcgacaacggctccggcatgtgcaaggccggcttcgcgggcgacgatgccccccgggccgtcttcccctccatcgtggggcgccccaggcaccaggtaggggagctggctgggtggggcagccccgggagcgggcgggaggcaagggcgctttctctgcacaggagcctcccggtttccggggtgggggctgcgcccgtgctcagggcttcttgtcctttccttcccagggcgtgatggtgggcatgggtcagaaggattcctatgtgggcgacgaggcccagagcaagagaggcatcctcaccctgaagtaccccatcgagcacggcatcgtcaccaactgggacgacatggagaaaatctggcaccacaccttctacaatgagctgcgtgtggctcccgaggagcaccccgtgctgctgaccgaggcccccctgaaccccaaggccaaccgcgagaagatgacccaggtgagtggcccgctacctcttctggtggccgcctccctccttcctggcctcccggagctgcgccctttctcactggttctctcttctgccgttttccgtaggactctcttctctgacctgagtctcctttggaactctgcaggttctatttgctttttcccagatgagctctttttctggtgtttgtctctctgactaggtgtctaagacagtgttgtgggtgtaggtactaacactggctcgtgtgacaaggccatgaggctggtgtaaagcggccttggagtgtgtattaagtaggcgcacagtaggtctgaacagactccccatcccaagaccccagcacacttagccgtgttctttgcactttctgcatgtcccccgtctggcctggctgtccccagtggcttccccagtgtgacatggtgtatctctgccttacagatcatgtttgagaccttcaacaccccagccatgtacgttgctatccaggctgtgctatccctgtacgcctctggccgtaccactggcatcgtgatggactccggtgacggggtcacccacactgtgcccatctacgaggggtatgccctcccccatgccatcctgcgtctggacctggctggccgggacctgactgactacctcatgaagatcctcaccgagcgcggctacagcttcaccaccacggccgagcgggaaatcgtgcgtgacattaaggagaagctgtgctacgtcgccctggacttcgagcaagagatggccacggctgcttccagctcctccctggagaagagctacgagctgcctgacggccaggtcatcaccattggcaatgagcggttccgctgccctgaggcactcttccagccttccttcctgggcatggagtcctgtggcatccacgaaactaccttcaactccatcatgaagtgtgacgtggacatccgcaaagacctgtacgccaacacagtgctgtctggcggcaccaccatgtaccctggcattgccgacaggatgcagaaggagatcactgccctggcacccagcacaatgaagatcaagatcattgctcctcctgagcgcaagtactccgtgtggatcggcggctccatcctggcctcgctgtccaccttccagcagatgtggatcagcaagcaggagtatgacgagtccggcccctccatcgtccaccgcaaatgcttctaggcggactatgacttagttgcgttacaccctttcttgacaaaacctaacttgcgcagaaaacaagatgagattggcatggctttannnnnnnnnnnnnnnnnnnnnnnnnnnnnnnnnnnnnnnggcttgactcaggatttaaaaactggaacggtgaaggtgacagcagtcggttggagcgagcatcccccaaagttcacaatgtggccgaggactttgattgcacattgttgtttttttaatagtcattccaaatatgagatgcattgttacaggaagtcccttgccatcctaaaagccaccccacttctctctaaagagaatggcccagtcctctcccaagtccacacacgggaggtgatagcattgctttcgtgtaaattatgtaatgcaaaatttttttaatc

SEQ ID NO: 183293 - DNA, 517 bp, Homo Sapiens
caactttgtacaaaaaagttggatccctattgcgccgcagctatagaagcaggaattcttattgggaaagaaaacctgttggtggaagactctcttatgatagagtgttcagccagagatattttagttaagggtgggacgaatcaggagccagtagattcacagtgctgtttccatcagggactcctttgccagctcgaagacaacacacattgcaagcccctggaagcatatcttcagtgtgccttgaactctatgagtctgatgggaagaactctgccaaagaggaaaccaagtttgcacaggttgtactccaggatttagataaaatataaaatggattacctgatatattagctgttcttactatgaaaagggatggatctttacatgtgacatgccagatcaagaaactggaaaatgtgaagcaatctctattgagatatttttcttagtgttttagagaaatcaagaatttttaaaaacccccaacatcaacatttggttttgtgtttaa

SEQ ID NO: 183294 - DNA, 911 bp, Homo Sapiens
ttggcttgtcagggcttgtccaggagttccgctcctctctccaaccggggtccccctccagcgaccctaaagcttcccagacttccgcttcaattcctgtccgccccccacgcccacctcaacgtggagcgcagtggtctccgaggagcgccggagctgccccgcctgcccagcgggatcagcacttcgcatcaaggcccaagaaaagcaagtcctccagcgttctgagcacccgggcctgagggaaggtcctaacagcccccgggagccagtctccaacgcctcccgcagcagcccgccgctcccaggtgcccgcgtgcgccgctgccgccgcaatcccgcacgcgtcccgcgcccgccccactttgcctatccccgggactaagacgggaatcctgtgaagcagctccagctatgtgtgaagaagaggacagcactgccttggtgtgtgacaatggctctgggctctgtaaggccggctttgctggggacgatgctcccagggctgttttcccatccattgtgggacgtcccagacatcagggggtgatggtgggaatgggacaaaaagacagctacgtgggtgacgaagcacagagcaaaagaggaatcctgaccctgaagtacccgatagaacatggcatcatcaccaactgggacgacatggaaaagatctggcaccactctttctacaatgagcttcgtgttgcccctgaagagcatcccaccctgctcacggaggcacccctgaaccccaaggccaaccgggagaaaatgactcaaattatgtttgagactttcaatgtcccagccatgtatgtggctatccaggcggtgctgtctctctatgcctctggacgcacaactggcatcgtgctggactctggagatggtgtcacccacaatgtccc

SEQ ID NO: 183295 - DNA, 1918 bp, Homo Sapiens
  misc_feature (437)..(467): n is a, c, g, or t
  misc_feature (1613)..(1621): n is a, c, g, or t
ttggctctccctgcacgcattttctctgtagttacatttaggataatctttatggttctacttcctgtaatgtacaattttatataattctgaaatgtttttaatgtatttgtgcacatgtacatatggaaatgttactgtctgactacaacatgcatcatgctcatggggagggagcaggggaaggttgtatgtgtcatttataacttctgtacagtaagaccacctgccaaaagctggaggaaccattgtgctggtgtggtctactaaataatactttaggaaatacgtgattaatatgcaagtgaacaaagtgagaaatgaaatcgaatggagattggcctggttgtttccctagtatatggcatatgaataccaggatagctttataaagcagttagttagttactcactctagtgataaatcgggaaatttnnnnnnnnnnnnnnnnnnnnnnnnnnnnnnngagtaacctgtaactctcaattccctgaaaaactagtaatactgtcttatctgctataaactttacatatttgtctattgtcaagatgctacaatggaaaccatttctggttttatcttcaaagcggagaaacatgttgatttagtcttctttcccaatcttcttttttaaaccagtttaaggaacttctgaagatttgtccacctctgattacatgtatgttcttgtttgtatcattagcaacaacatgctaatgacgacacctagctctaagagcaattctgggagaatgaaaggaagtataaagtaacccataatctgcttggcaatagttaagtcaatctatcttcagtttttctctggcctttaaggtcaaacacaagaggcttccctagtttacaagtcagagtcacttgtagtccatttaaatgccctcatccgtattctttgtgttgataagctgcacatgactacatagtaagtacagaacagtaaagttaaaacggatgtctccattgatctgccaaatcgttatagagagcaatttgtctggactagaaaatctgagttttacaccatactgttaagagtccttttgaattaaactcgactaaaacaagtgtataactaaactaacaagattaaatatccagccagtacagtattttttaaggcaaataaagatgattagctcaccttgagataacaatcaggtaagatcataacaatgtctcatgatgtaaaaaatattaaagatatcaatactaagtgacagtatcactctaatataatatggatcagagcatttattttggggaggaaaacagtggtgattaccggcattttattaaacttaaaactttgtagaaagcaaacaaaattgttcttgggagaaaatcaacttttagattaaaaaaattttaagtatctaggagtatttaaatccttttcccataaataaaagtacagttttcttggtggcagaatgaaaatcagcaacttctagcatatagactatataatcagattgacagcatatagaatatattatcagacaagatgaggaggtataaaagttactattgctcataatgacttacaggctaaaattagttttaaaatactatattaaattctgaatgcaannnnnnnnngttcccttgagaccaaaatttaagttaactgttgctggcagtctaagtgtaaatgttgacagcaggagaagttaagaattgagcagttctgttgcatgatttcccaaatgaaatactgccttggctagagtttgaaaaactattgagcctgtgcctggctagaaaacaagcgtttatttgaatgtgaatagtgtttcaaaggtatgtagttacagaattcctaccaaacagcttaaattcttcaagaaagaattcctgcagcagttattctcttacctgaaggcttcaatcatttgg

SEQ ID NO: 183296 - DNA, 887 bp, Homo Sapiens
  misc_feature (183)..(192): n is a, c, g, or t
ttcaaataaacgctgtttctagccaggcacaggctcaattagtttttcaaactctagccaaggcagtatttcatttgggaaatcatgcaacagaactgctcaatttcttaacttctcctgctgttaacatttacacttagactgccagcaacagttaacttaaattttggtctcaagggaacnnnnnnnnnnttgcattcagaatttaatatagtattttaaaactaattttagcctgtaagtcattatgagcaatagtaacttttatacctcctcatcttgtctgataatatattctatatgctgtcaatctgattatatagtctatatgctagaagttgctgattttcattctgccaccaagaaaactgtacttttatttatgggaaaaggatttaaatactcctagatacttaaaatttttttaatctaaaagttgattttctcccaagaacaattttgtttgctttctacaaagttttaagtttaataaaatgccggtaatcaccactgttttcctccccaaaataaatgctctgatccatattatattagagtgatactgtcacttagtattgatatctttaatattttttacatcatgagacattgttatgatcttacctgattgttatctcaaggtgagctaatcatctttatttgccttaaaaaatactgtactggctggatatttaatcttgttagtttagttatacacttgttttagtctagtttaattcaaaaggactcttaacagtatggtgtaaaactcagattttctagtccagacaaattgctctctataacgatttggcagatcaatggagacatccgttttaactttactgttctgtacttactatgtagccaacttttttgtacaaagt

SEQ ID NO: 183297 - DNA, 1354 bp, Homo Sapiens
  misc_feature (709)..(803): n is a, c, g, or t
  misc_feature (993)..(1048): n is a, c, g, or t
ttggctactgtgtgcttatgtatgtgcatgcgtttttgtttagaagattgtggggctctggattttttcatttatcttgttaaatttatttgcagacaaaaattggttccaaaatgaggcaattatgcatgtctgggggaaattttaagttcctgaactatgaactttccttgaattagactgcttaaaatgtaaatttctctctttgacaactctgggtgagctttttggttcataatttaaggatgtctcaccttgcgttttaaaaaaatccatccctgtagtcatgtgttttcagctgctagaaagtgctttcattgtttagctgttttccttttctcttttttgtgttgctgcttatgatgctatagtacctcaaatcgtttgtgggctgaggatagtactgagaaagaaaaggacagtgttcctacggcagtgaccattcctgttgctccaactgttgtaaatgctgcagcttctaccacaaccctgactacaactactgctggcactgtctcctccacaacagaggtcagggagagacgcagatcatacctcactcctgttagggatgaagagtctgaatcccaaagaaaagcaagatctagacaagcaagacaatctagaagatcaacacagggagtgacattaactgatcttcaagaagctgagaaaacaataggaagaagtcgttctacccgaaccagannnnnnnnnnnnnnnnnnnnnnnnnnnnnnnnnnnnnnnnnnnnnnnnnnnnnnnnnnnnnnnnnnnnnnnnnnnnnnnnnnnnnnnnnnnnnnntgaatataaacaaaagtactccagaacgtatgatgagacttaccagcgttataggccagtatcaacttcaagttcaaccactccatcctcttcactttctactatgagcagttcactgtatgcttcaagtcaactaaacaggccaaatagtcttgtaggcataacttctgcttactccagaggaataacnnnnnnnnnnnnnnnnnnnnnnnnnnnnnnnnnnnnnnnnnnnnnnnnnnnnnnnntaaatcacaacctaaatcaatcagagaacgacgacgaccaagagagaaaagaagatctacaggagtttcattttggacacaagatagtgatgaaaatgaacaagaacaacaatcagacacagaagagggatccaataagaaagaaactcagacggattccatttctagatatgaaaccagttctacatcagctggtgatcgatatgattccgtgctgggtcgctctggatcatacagttacttagaagaaagaaaaccttacagcagcaaggctagaaaaggatgactcaactgactttaaaaagc

SEQ ID NO: 183298 - DNA, 1994 bp, Homo Sapiens
  misc_feature (1810)..(1823): n is a, c, g, or t
ctttgtacaaaaaagttggatttactgaccttagggctaaaatcaaaccttggcacacaggtgtgatacaacttaacaggaatcatcgattcatccataaataatataaggaaaaacttatgcggtagcctgcattagggctttttgatacttgcagattgggggaaaacaacaaatgtcttgaagcatattaatggaattagtttctaatgtggcaaactgtattaagttaaagttctgatttgctcactctatcctggataggtatttagaacctgatagtctttaagccattccagtcatgatgaggtgatgtatgaatacatgcatacattcaaagcactgttttcaaagttaatgcaagtaaatacagcaattcctctttcaacgtttaggcagatcattaattatgagctagccaaatgtgggcatactattacagggaaagtttaaaggtctgataacttgaaataggtttttaggagaattcatctacttagactttttaaatgcctgccataaatgaaattgaaatggtagaatggctgaccacagcaatgaccagccctcattagggccctggatgatttttggtctaataacgcatgctagtgttgatgttttttggtcaagagggtatgaacaggaagaattaaatgcagcaggctttattttaaatgccgattcacattactctgttcaagctgcgttgagatgttaaactggcttactatagacttcgtaaaaatggctccagaagagtaacaaactgaaatctttgagatcacacaggttggaaatatgtacataactgcacaaggtgtcaattctgctctacagtgcagttttagtcagttttagttgcataggtttccattgtatttatagtctgtttatgctaaatctggccaaagatgagcattgtccaccactaaaatgcctctgccactttgaattctgtgctaattttgtggccagaatgcggtgatcaaaacgctccatctttttacagtggcataggaagacggcaaaaatttcctaaagtgcaatagattttcaagtgtattgtgccttgttctaaaacttttattaagtaggtgcacttgacagtattgaggtcatttgttatggtgctatttcaattagtctaggtttaggcccttgtacattttgcccataactttttacaaagtacttcttttattgcacattcagagaattttatatatatgtcttgtgtgcgtgtccttaaacttccaatcttactttgtctcttggagattgttgaacgcagcttgtctaggaaggggatgggactagattctaaaatttatttgggaccatgggaatgatagttgggaagaaaactatttgcacacgacagatttctagatactttttgctgctagttttatgtaatatttattgaacattttgacaaatatttatttttgtaagcctaaaagtgattctttgaaagtttaaagaaacttgaccaaaagacagtacaaaaacactggcacttgaatgttgaatgtcaccgtatgcgtgaaattatatatttcggggtagtgtgagcttttaatgtttaagtcatattaaactcttaagtcaaattaagcagacccggcgttggcagtgtagccataactttctgatgttagtaaaaacaaaattggcgacttgaaattaaatcatgccaaggttttgatacacttgtcttaagatattaatgaaacacttcaaaacactgatgtgaagtgtccagattctcagatgtttgttgtgtggattttgtttagttgtgtgnnnnnnnnnnnnnncagtgaatgtctggcacattgcaatcctcaaacatgtgggttatctttgttgtattggcataatcaggtgacttgtacattcagcaatagcatttgagcaagttttatcagcaagcaatattttcagttaataaggtttcaaaaatcatgtaaggatttaaacttgctgaa

SEQ ID NO: 183299 - DNA, 2109 bp, Homo Sapiens
  misc_feature (1900)..(1909): n is a, c, g, or t
aactttgtacaaaaaagttgggggaagtctagcttcttcagtgatcgtggaagtggatcaaggggaaggtttgatgatcgtggacggagtgattacgatggcattggcagccgtggtgacagaagtggctttggcaaatttgaacgtggtggaaacagtcgctggtgtgacaaatcagatgaagatgattggtcaaaaccactcccaccaagtgaacgcttggaacaggaactcttttctggaggcaacactgggattaattttgagaaatacgatgacattccagttgaggcaacaggcaacaactgtcctccacatattgaaagtttcagtgatgttgagatgggagaaattatcatgggaaacattgagcttactcgttatactcgcccaactccagtgcaaaagcatgctattcctattatcaaagagaaaagagacttgatggcttgtgcccaaacagggtctggaaaaactgcagcatttctgttgcccatcttgagtcagatttattcagatggtccaggcgaggctttgagggccatgaaggaaaatggaaggtatgggcgccgcaaacaatacccaatctccttggtattagcaccaacgagagagttggcagtacagatctacgaggaagccagaaaattttcataccgatctagagttcgtccttgcgtggtttatggtggtgccgatattggtcagcagattcgagacttggaacgtggatgccatttgttagtagccactccaggacgtctagtggatatgatggaaagaggaaagattggattagacttttgcaaatacttggtgttagatgaagctgatcggatgttggatatggggtttgagcctcagattcgtagaatagtcgaacaagatactatgcctccaaagggtgtccgccacactatgatgtttagtgctacttttcctaaggaaatacagatgctggctcgtgatttcttagatgaatatatcttcttggctgtaggaagagttggctctacctctgaaaacatcacacagaaagtagtttgggtggaagaatcagacaaacggtcatttctgcttgacctcctaaatgcaacaggcaaggattcactgaccttagtgtttgtggagaccaaaaagggtgcagattctctggaggatttcttataccatgaaggatacgcatgtaccagcatccatggagaccgttctcagagggatagagaagaggcccttcaccagttccgctcaggaaaaagcccaattttagtggctacagcagtagcagcaagaggactggacatttcaaatgtgaaacatgttatcaattttgacttgccaagtgatattgaagaatatgtacatcgtattggtcgtacgggacgtgtaggaaaccttggcctggcaacctcattctttaacgagaggaacataaatattactaaggatttgttggatcttcttgttgaagctaaacaagaagtgccgtcttggttagaaaacatggcttatgaacaccactacaagggtagcagtcgtggacgttctaagagtagcagatttagtggagggtttggtgccagagactaccgacaaagtagcggtgccagcagttccagcttcagcagcagccgcgcaagcagcagccgcagtggcggaggtggccacggtagcagcagaggatttggtggaggtggctatggaggcttttacaacagtgatggatatggaggaaattataactcccagggggttgactggtggggtaactgagcctgctttgcagtagtcaccctgccaaacaagctaatatggaaaccacatgtaacttagccagactataccttgtgtagcttcaagaactcgcagtacattaccagctgtgattctccactgaaannnnnnnnnnaagggagctcaagtcacaagaagaaatgaaaggaacaatcagcagccctgttcagaagtggtttgaagacttcattgctgtagtttggattaactcccctcccgcctacccccatcccaaactgcatttataattttgtgactgaagatcattgtttggtaatgtactgtgcctttaactttaaaacaactttttatttt

SEQ ID NO: 183300 - DNA, 1092 bp, Homo Sapiens
ttgggttctcccgtgagagggccttcgcggtggaacaaacactcgcttagcagcggaagactccgagttctcggtactcttcagggatgagtcatgtggcagtggaaaatgcgctcgggctggaccagcagtttgctggcctagacctgaactcttcagataatcagagtggaggaagtacagccagcaaagggcgctatattcctcctcatttaaggaaccgagaagctactaaaggtttctacgataaagacagttcagggtggagttctagcaaagataaggatgcgtatagcagttttggatctcgtagtgattcaagagggaagtctagcttcttcagtgatcgtggaagtggatcaaggggaaggtttgatgatcgtggacggagtgattacgatggcattggcagccgtggtgacagaagtggctttggcaaatttgaacgtggtggaaacagtcgctggtgtgacaaatcagatgaagatgattggtcaaaaccactcccaccaagtgaacgcttggaacaggaactcttttctggaggcaacactgggattaattttgagaaatacgatgacattccagttgaggcaacaggcaacaactgtcctccacatattgaaagtttcagtgatgttgagatgggagaaattatcatgggaaacattgagcttactcgttatactcgcccaactccagtgcaaaagcatgctattcctattatcaaagagaaaagagacttgatggcttgtgcccaaacagggtctggaaaaactgcagcatttctgttgcccatcttgagtcagatttattcagatggtccaggcgaggctttgagggccatgaaggaaaatggaagtatgggcgccgcaaacaatacccaatctccttggtattagcaccaacgagagagttggcagtacagatctacgaggaagccagaaaattttcataccgatctagagttcgtccttgcgtggtttatggtggtgccgatattgggtcagcagattcgagacttggaacgtggatgccatttgttagtagccactccaggacgtctagtggatatgatggaaagaggaaaga

SEQ ID NO: 183301 - DNA, 1727 bp, Homo Sapiens
  misc_feature (112)..(132): n is a, c, g, or t
  misc_feature (1508)..(1516): n is a, c, g, or t
  misc_feature (1556)..(1564): n is a, c, g, or t
ccccccaaccatcgtgatttgtcttttcatgcagattagttagaattcactgccaggtttcttctgcccaccaaaatgatccagtctggaataacattttgtaaaaaaaaannnnnnnnnnnnnnnnnnnnngctgactggaagagattaatttcttcccccaacttcttgcatgttgaagatatttgagctatttttcatctaaaagagtaaggtatttggcccttttgtgggagccccatgttttgtttttctgagttggtggggagggagggagggggagggctgaattgttttgcagaggaagatggcatctgtgctttaaatttctcattactgggttagaaaacaaagagggagtgccctgcacattttcttttgtgcttttaaatgtttcttaagttggaacaggtttcctcgggcctgttttgactgattgctggagtgcatttgatagttaaaaattactaattggttttatttcccttcacactctgcctccccacttctccccccgttactgaaaaataaccattttagtgtcaggctagaaattgaattgctgagttttgtgtatcctttaaattaaaaaccacaagtgtttattgtagtggttaaactgtagcatctcagcatctgggtggaagctgcctatatttcttcccagtttaactggggaccatctgtgaaattaattttccatccagacagctgctgtgagcaaatgaacataaatgctcgctggaaatttactaaccagtttttatattgacctgcagtgtaaaaagcacatttaattataaacaatatattcaaaatgggcaaattttattttcaaatgcagtgtagagctagattaaaagcaactctttgccacctactctgcccttttggcaaagttaccttgaacaaagaatcttaagggtttattaagaactctttattttcttcataccctgttctctgcagtgctttctaacagcttctgggtgcagattttcttcggcatccttttgcactcagcttattacaggtaggtagtgcttaagaaaagtcatggaggactaaagcctaagtccttttcacttttcctccatctgaaggtaggtgagttcatcctcttcatagtaatgctgttttaccaagactttatagcagatggacccagaaagaattttctgctattgtgttcactacaacaggatagggacatcagacagccccagaaaccccttccagatctgatatgggactattaatttttatgctgttaattggtattcattcacaatgcagttgaagggggaaggctccactgcattctttggctaaggcctgaatgcttgctcatctgtaagatctatactcgaggttttgttttccttttaaaattctttagggagagagggatggtttctgaggggttctgaaagtatgattcaatgtgcaacatacaggtaggtcttcagcataagctgaaatatatgcatgtaaaaactttgacatcnnnnnnnnnaattttccactttcttcttaactttacttctctttttgtnnnnnnnnnatcttacagaagttgaggccaagggagaatggtaggcacagaagaaacatggcaaactgctctgtgctttcaaaccaaagtgttccccccaaccccaaattgtctaagcactggccagtctgtgtgggcattgttttcctacaaccaaattctgggatttttt

SEQ ID NO: 183302 - DNA, 1477 bp, Homo Sapiens
  misc_feature (244)..(272): n is a, c, g, or t
  misc_feature (923)..(985): n is a, c, g, or t
ttggctttgtttatatgtttataatttttaggtgtttcctgaaattttcacatattatttcacttttgttagtgctttatgggaagaatagggagtctataccagtgctgtgggaaaaatggtaacatttcagggcttctctatttgtgtttcatttctgtagatgtccatcgtgtttcactaactggcgttttcttagccatagagatgactgtagaacaatagaaactttaataatgatagnnnnnnnnnnnnnnnnnnnnnnnnnnnnnaaatcttaaaaccttcatatctaggtatccattgtgacagacaagtaaaattgcaggtgatttgataattaagcacccataccatttataacttctgaatttaaaaagttatacaatgccagtttgcaatagttgattttgatgcctttgtagaatattttttctgaatccttatgctcttttaaagccaatgattcccactctgttctctgccttgtctctctttgtcttaaaatgctttagtttccatcaggttcaagttcttgactattattctcttataagtagtaggcgtaaataatcaggagttagaattctctcagaagggtctatgatcagtattactttattaagaattacctttcattttctctttatgttattctttcacttttgtagattacatttaatagcttgttacctgtgattttattttaaaatatttattttgatatgatgcttaaatattatataaacatttggaaaagtaacaaatagagtaaattgttaatgtaaatagttggtgcttactttcatttatgtttattatcttaaagcaattgatagattttacatctttgatataaagcactgccatatttatattttaaaaggaaattagacattttatatgtagctcagattaatgannnnnnnnnnnnnnnnnnnnnnnnnnnnnnnnnnnnnnnnnnnnnnnnnnnnnnnnnnnnnnnagtcatcttttatatacttttagttccacatgaaataaatgttgttaagcctgtaggactggatgaatggggttgtgaaactgatttgacaagagaataatttacaaaaatcaaatgagtattgagaagccacagaaatatcaaaaatggtgacatcactattaggatgaaaattttatgaaattccaatgctccctttaaccatataattaaattacaaaggtatacataattaatctaataaaggatcatgaggaatgccaaaagctgaaattttagcaagtctggtgttttaaattcattataaactatttattaactaatgtaatgtcctcctctaagaccatattgtaagagtcttgttaaaatgatggattcaacttctgcctcggatgagaggttggaaatgtagctgcttttctttagaaaatatgtagctgtcatcatttggtactgcctaaaaagagttagactctattggcaattgataga

SEQ ID NO: 183303 - DNA, 3487 bp, Homo Sapiens
  misc_feature (218)..(247): n is a, c, g, or t
  misc_feature (3236)..(3292): n is a, c, g, or t
  misc_feature (3319)..(3332): n is a, c, g, or t
ttggggtgtttcctgaaattttcacatattatttcacttttgttagtgctttatgggaagaatagggagtctataccagtgctgtgggaaaaatggtaacatttcagggcttctctatttgtgtttcatttctgtagatgtccatcgtgtttcactaactggcgttttcttagccatagagatgactgtagaacaatagaaactttaataatgatagnnnnnnnnnnnnnnnnnnnnnnnnnnnnnnaatcttaaaaccttcatatctaggtatccattgtgacagacaagtaaaattgcaggtgatttgataattaagcacccataccatttataacttctgaatttaaaaagttatacaatgccagtttgcaatagttgattttgatgcctttgtagaatattttttctgaatccttatgctcttttaaagccaatgattcccactctgttctctgccttgtctctctttgtcttaaaatgctttagtttccatcaggttcaagttcttgactattattctcttataagtagtaggcgtaaataatcaggagttagaattctctcagaagggtctatgatcagtattactttattaagaattacctttcattttctctttatgttattctttcacttttgtagattacatttaatagcttgttacctgtgattttattttaaaatatttattttgatatgatgcttaaatattatataaacatttggaaaagtaacaaatagagtaaattgttaatgtaaatagttggtgcttactttcatttatgtttattatcttaaagcaattgatagattttacatctttgatataaagcactgccatatttatattttaaaaggaaattagacattttatatgtagctcagattaatgacatttttattttgtgtattagtttttgcttttctgagctttttaaagtctaacaaatctttttagtcatcttttatatacttttagttccacatgaaataaatgttgttaagcctgtaggactggatgaatggggttgtgaaactgatttgacaagagaataatttacaaaaatcaaatgagtattgagaagccacagaaatatcaaaaatggtgacatcactattaggatgaaaattttatgaaattccaatgctccctttaaccatataattaaattacaaaggtatacataattaatctaataaaggatcatgaggaatgccaaaagctgaaattttagcaagtctggtgttttaaattcattataaactatttattaactaatgtaatgtcctcctctaagaccatattgtaagagtcttgttaaaatgatggattcaacttctgcctcggatgagaggttggaaatgtagctgcttttctttagaaaatatgtagctgtcatcatttggtactgcctaaaaagagttagactctattggcaattgatagagtattacccacggtgcttattattgtttatgagcttccattgtaatgattcctttttatttgtagcagcataattatttccaaagaccccagtatttgctgctatttttaaaactcccctgatgtacctgaacaagaggatttcctcacatcatttccttgtgtctggacatcaggggtaacaactgtacttactttacaggaagaaattttaaaactgaaaactacctgggatcatagtgtttctgtgattttatttaattgtgtatagtaattatccagtgccagaaaaaccgtcacttgcaaaatactttgcactcaaaatgtttttacaatgcttctaaatgttactggtttctgctttcttttgactacttgactgacaaaatgatctgactactccatttaagagcaaaggtaactcatgtttaggtaattaactgcttgttttaagtgattatatttcttccactgtttttgaaaaataatcaaagatagcattcattgagagacagtgacagatataatttactacatatattgatttttaaataaagttgccttaaataagtgtatgtaagcagtagtagttgctatgtactgatttacctcaaggtgcaaaataattaaacctgtacatattccatttacaaaataaattcagccctgcactttctttagatgccttgatttccagaatggagcttagtgctactgaataccctggccacagagccacctcaggatattcttttctccaccctagtttatttatttatagatatctgtttacaaagtctgtagtaaatcctgatgctgaccatctgaaatgtactttttttctgaatgctgtttcaatctaaaatagcagcttttgagaaaacaatgatgtaaattccttatgataaaaggatgattctatatattctttaatgatattaaatatgccgaagccaagcacacagtctttctaaagtgtgtgtatgtttgtgtgaatgtgaatgatactgatcttatatctgttaaaagttgttttaaaaagctgtggcatcccattgttcatatttgccaagtcttctgtaaagatgtctaggacgaaatattttatgtgctaatgcatgtatttgtaaaccagatttgtttaccactcaaaattaacttgttttcttcatccaaaaaagtttatttcttccacgtacttaaattttctgtgtgggtataatatagctttctaatttttttctttcacaaaggcaggttcaaaattctgttgaaagaaaaatgctttctgaaactgaggtataacaccagagcttgctgtttaaaggattatatgatgtacatcagttctataaatgtgctcagcagtttaacatgtgaatcctgttttaaagtgctcagatttcaactgtgtaagccattgatataacgctgtaattaaaaatgtttatatgaaataacttaatgttttaaatttatttatgtagatcacatcatttttatcgtatgcagtgcaaatatgtgaaatgtcttttggtttattccaacaattatttattttagaaagtaagtttaaagactttaaggacattcaaagtttaaaatagtgttcaaattgcaaaatttggcaatcttcatataaattggtttcttttctaacttttcaaaaactaacattaaatgtcattataggaaaacatagttggaaatgtaatcatccaaagatcatttttaaaatgaaatttaattagcacatattgaacatttgacttaattgttaaacccnnnnnnnnnnnnnnnnnnnnnnnnnnnnnnnnnnnnnnnnnnnnnnnnnnnnnnnnnggcttttgttgctttattattcaaggnnnnnnnnnnnnnncttccccatggggagattgtctcccaatgtttaactacgtttaaataaataaaaatttgaattttattgttcatttatataaaatctgataccttgatgtaatttcacaataccagttccaatttttaatggcttttatattaccatgatatttt

SEQ ID NO: 183304 - DNA, 1607 bp, Homo Sapiens
ttggggttcaatcttgttcagcgaacagcacaagcttgcacagctctggcctttaatcttcgtaggaaatctgaattccttgtggcattagctgattattctattaaatgttttgatacagtcaccaaggagctagttagctggatgagaggacatgaatcatcagtattttcgatctctgtgcatgcatcagggaaatatgccatcacaacttcttctgatacagcacaattatgggacttggatacctttcagagaaaaagaaagctgaatattcgccagtctgtgggtatacagaaggttttctttctaccattaagtaataccatcctcagctgttttaaagataattccatttttgcctgggaatgtgacacacttttttgcaaatatcaattgccagctccacctgaaagctctagtatattatacaaagtgtttgctgtaaccagagatggccgaatcctggctgctggaggcaagtcaaatcatcttcatttgtggtgcttggaagctaggcagctctttagaattatccagatgcccactaaagttcgagccattcgccatctggaatttcttcctgatagttttgatgctggttctaatcaggttcttggagtactaagtcaagatggtattatgagatttatcaatatgcagacttgtaaacttctctttgagattgggagcctcgatgaaggaattagctcatcagcaattagcccacatggacggtacattgcatctattatggaaaatggaagtctaaacatatattcagttcaggctttaacacaagaaataaataaggaagaagttcgtgctcaaaattaatcacacagcgagtaactagcagttctgggtgttccaattcttccaagatcacatgagattgggtgcatttggagtggcatttgccaccttttttttattctaaaaaaaagtttgtgcctcctcctttttgttttatcttttaaaaaattatacaagtagtgtcttattgcagaaaaaaataagaatgtacagaatagcaaacagacaaatacaaatcactgaaagtctcaccattctcagaagattctgatttatatgttcccaatttcttttctatgtgtgtaaatatatatagtcactcctcattatttgtgcattctatacatgagaattcacctgctcactaaaatttatttgtaacttcaaaattaatagttgcagtgctttcatggtcattcagggacatgcacagagcagtgaaaatttgagtcaccagataccctttttcccagctgaagtcaaatgaggcaacactctgtcttcttatttcagctctcatagtgtaaacaagtatcctttttgtgatctacttaataccatttatttttttgcattttgaagctttttgttaagattctactgcttaaagtggtccccaagcgtagcgctgaagcgctatttattgtttctaaatacaggaaggctgtggcttaccttacagagaaaatacatgtgttaaataaactcattcagggaatgagttatagtgctaagctgtgagttcaatgataaggaatcagcaatgtgtattaaataagatgtctttaaac

SEQ ID NO: 183305 - DNA, 2407 bp, Homo Sapiens
  misc_feature (2250)..(2264): n is a, c, g, or t
ctgttcgtttgcaacaaattgatgagcaatgcttttcctattatgcgcaactttgtacaaaaaagttggcactgctccacgggctgctcgggaacccaatatcgaccggagccgtcttcccaaatcgccaccctacactgcttttctaggaaacctaccctatgatgttacagaagagtcaattaaggaattctttcgaggattaaatatcagtgcagtgcgtttaccacgtgaacccagcaatccagagaggttgaaaggttttggttatgctgaatttgaggacctggattccctgctcagtgccctgagtctcaatgaagagtctctaggtaacaggagaattcgagtggacgttgctgatcaagcacaggataaagacagggatgatcgttcttttggccgtgatagaaatcgggattctgacaaaacagatacagactggagggctcgtcctgctacagacagctttgatgactacccacctagaagaggtgatgatagctttggagacaagtatcgagatcgttatgattcagaccggtatcgggatgggtatcgggatgggtatcgggatggcccacgccgggatatggatcgatatggtggccgggatcgctatgatgaccgaggcagcagagactatgatagaggctatgattcccggataggcagtggcagaagagcatttggcagtgggtatcgcagggatgatgactacagaggaggcggggaccgctatgaagaccgatatgacagacgggatgatcggtcgtggagctccagagatgattactctcgggatgattataggcgtgatgatagaggtcccccccaaagacccaaactgaatctaaagcctcggagtactcctaaggaagatgattcctctgctagtacctcccagtccactcgagctgcttctatctttggaggggcaaagcctgttgacacagctgctagagaaagagaagtagaagaacggctacagaaggaacaagagaagttgcagcgtcagctggatgagccaaaactagaacgacggcctcgggagagacacccaagctggcgaagtgaagaaactcaggaacgggaacggtcgaggacaggaagtgagtcatcacaaactgggacctccaccacatctagcagaaatgcacgaaggagagagagtgagaagtctctagaaaatgaaacactcaataaggaggaagattgccactctccaacttctaaacctcccaaacctgatcagcccctaaaggtaatgccagcccctccaccaaaggagaatgcttgggtgaagcgaagttctaaccctcctgctcgatctcagagctcagacacagagcagcagtcccctacaagtggtgggggaaaagtagctccagctcaaccatctgaggaaggaccaggaaggaaagatgaaaataaagtagatgggatgaatgccccaaaaggccaaactgggaactctagccgtggtccaggagacggagggaacagagaccactggaaggagtcagataggaaagatggcaaaaaggatcaagactccagatctgcacctgagccaaagaaacctgaggaaaatccagcttctaagttcagttctgcaagcaagtatgctgctctctctgttgatggtgaagatgaaaatgagggagaagattatgccgaatagacctctacatcctgtgcttttctcctagtttctctccaccctggaacattcgagagcaaatcaaaacctctatccagacaagacaaaataaaactcaacatctcctgaagacctttcttacctttttttaaaaacaaaaaatgaaattattttgcatgctgctgcagcctttaaagtattgaagtaactggagaattgccaatacagccagagagaaagggactacagctttttagaggaaaagttgtggtgcgttatgtcaccatgcagttgccagtgtgattagtgcctaggggtctccatttagcagaaatggtaatgacagtgatataatgcctggaacctggttgggcagtaggggagggaggtagaaggaaaagtgtgagatttctaccttttagtttttatcctattgtggcatatatgaattctcaaacattatctgaataaattttccactcttggaaaggtagatttagcctcaagttgttctagtctccaggaggctgccagcccctcctcttatttaattctgagttttgggggccagcctagagggaattccnnnnnnnnnnnnnnnaaccccccaggggggtagttgggagtgagactataggccataagaatgggactgcattggaccaaaataaatgggaaaatcgtggtttgaaaagaagcttttgggaagtgatgagtcattttgcaccaggtaatagggaaaat

SEQ ID NO: 183306 - DNA, 2110 bp, Homo Sapiens
  misc_feature (1970)..(1978): n is a, c, g, or t
ttggcacctcgcctcagccgggcgggagagagggaggtctcgcgctttccccggggttgcgtcccgccccgcaggctgcgcgcaggcgctgacgagccgctcgcattctacgtaacggacggcgggggctacgtgaagagaggcgcggcgtgactgagctacggttctggctgcgtcctagaggcatccggggcagtaaaaccgctgcgatcgcggaggcggcggccaggccgagaggcaggccgggcaggggtgtcggacgcagggcgctgggccgggtttcggcttcggccacagctttttttctcaaggtgcaatgaaagccttccacactttctgtgttgtccttctggtgtttgggagtgtctctgaagccaagtttgatgattttgaggatgaggaggacatagtagagtatgatgataatgacttcgctgaatttgaggatgtcatggaagactctgttactgaatctcctcaacgggtcataatcactgaagatgatgaagatgagaccactgtggagttggaagggcaggatgaaaaccaagaaggagattttgaagatgcagatacccaggagggagatactgagagtgaaccatatgatgatgaagaatttgaaggttatgaagacaaaccagatacttcttctagcaaaaataaagacccaataacgattgttgatgttcctgcacacctccagaacagctgggagagttattatctagaaattttgatggtgactggtctgcttgcttatatcatgaattacatcattgggaagaataaaaacagtcgccttgcacaggcctggtttaacactcatagggagcttttggagagcaactttactttagtgggggatgatggaactaacaaagaagccacaagcacaggaaagttgaaccaggagaatgagcacatctataacctgtggtgttctggtcgagtgtgctgtgagggcatgcttatccagctgaggttcctcaagagacaagacttactgaatgtcctggcccggatgatgaggccagtgagtgatcaagtgcaaataaaagtaaccatgaatgatgaagacatggatacctacgtatttgctgttggcacacggaaagccttggtgcgactacagaaagagatgcaggatttgagtgagttttgtagtgataaacctaagtctggagcaaagtatggactgccggactctttggccatcctgtcagagatgggagaagtcacagacggaatgatggatacaaagatggttcactttcttacacactatgctgacaagattgaatctgttcatttttcagaccagttctctggtccaaaaattatgcaagaggaaggtcagcctttaaagctacctgacactaagaggacactgttgtttacatttaatgtgcctggctcaggtaacacttacccaaaggatatggaggcactgctacccctgatgaacatggtgatttattctattgataaagccaaaaagttccgactcaacagagaaggcaaacaaaaagcagataagaaccgtgcccgagtagaagagaacttcttgaaactgacacatgtgcaaagacaggaagcagcacagtctcggcgggaggagaaaaaaagagcagagaaggagcgaatcatgaatgaggaagatcctgagaaacagcgcaggctggaggaggctgcattgaggcgtgagcaaaagaagttggaaaagaagcaaatgaaaatgaaacaaatcaaagtgaaagccatgtaaagccatcccagagatttgagttctgatgccacctgtaagctctgaattcacaggaaacatgaaaaacgccagtccatttctcaaccttaaatttcagacagtcttgggcaactgagaaatccttatttcatcatctactctgtttggggtttggggttttacagagattgaagatacctggaaagggctctgtttcaagaannnnnnnnnccagataatcaaattattttgattattttataaaaggaatgatctatgaaaatctgtgtaggttttaaatattttaaaaattataatacaaatcatcagtgcttttagtacttcagtgtttaaagaaatacc

SEQ ID NO: 183307 - DNA, 930 bp, Homo Sapiens
cagaacaggcctgcactaaagcatcaacaaaaaatacccaccaccccactcccaccagaaaacccaacccttacccatccccggcaaaaattacctggtacaagcaatgacctaaaaatgctttcttggtaagaagcatttataaaatgcagagatctgaacaagctaagtgctcgtgcagatacatgggcctctcctccaagagttggttccgcaagaggtggaaagaactctcaatagtttaggaaagctcattttcaaaagtatacttacacatattcatggccatttctttgaaagaacatacccagcctcaactgtggaaaagataaaagcagagggagaagcaacggcacacagccataatatagagaacagagcttctccatgaacatccaccaggctgcagcaaccaagaaggaaaaaacatttgtgatttcacacagaccaatgatcttacctaggtgaagcattaatttttcatgcatttgttactcaagaaaataaacatacaaccacttaaaatacagcattcacgttgtcactggttcgtggtatcaggtaaggaaaaaatgatgctcctgtccctagaattttccatgtacatgtcagtatcctaatgcctacagacttcctattaattttgttatcagcatctcccacctaaaaacatatactacattatgttctgggtccctgaaatttcattactacatacagtgttctaatttttactttttctcaagtttaatgtagacatacaagaaaacatcaagcaatgtttattgtgcaattccaatcattatttgcagaatcttggtttagagtcagtctttatagccatttcaactgcttggtttaaacaaaaagcaacaatctggttatctacctataaatttcatggtatttctccaacttttttgtacaaag

SEQ ID NO: 183308 - DNA, 2358 bp, Homo Sapiens
  misc_feature (1783)..(1825): n is a, c, g, or t
ctttgtacaaaaaagttggaggagacaccgccgcagttgccggtacatcggggatttctggctctttcctcttcgccttaaattcgggtgtcttttatgaataatcaaaagcagcaaaagccaacgctatcaggccagcgttttaaaactagaaaaagagatgaaaaagagaggtttgaccctactcagtttcaagactgtattattcaaggcttaactgaaaccggtactgatttggaagcagtagctaagtttcttgatgcttctggagcaaaacttgattaccgtcgatatgcagaaacactctttgacattctggtggctggtggaatgctggccccaggtggtacactggcagatgacatgatgcgtacagatgtctgcgtgtttgcagcccaagaagatctagagaccatgcaagcatttgctcaggtttttaacaagttaatcaggcgctacaaatacctggagaaaggttttgaagatgaagtaaaaaagctgctgctgttcttgaagggtttttcagagtcggagaggaacaagctagctatgttgactggtgttcttctggctaatggaacacttaatgcatccattcttaatagcctttataatgaaaatttggttaaagaaggagtttcagcagcttttgctgtgaagctctttaaatcatggataaatgaaaaagatatcaatgcagtagctgcaagtcttcggaaagtcagcatggataacagactgatggaactctttcctgccaataagcaaagtgttgaacacttcacaaaatattttactgaggcaggcttgaaagagctttcagaatatgttcggaatcagcaaaccatcggagctcgtaaggagctccagaaagaacttcaagaacagatgtcccgtggtgatccatttaaggatataattttatatgtcaaggaggagaatgaaaaaaacaacatcccagagccagttgtcatcggaatagtctggtcaagtgtaatgagcactgtggaatggaacaaaaaagaggagcttgtagcagagcaagccatcaagcacttgaagcaatacagccctctacttgctgcctttactactcaaggtcagtctgagctgactctgttactgaagattcaggagtattgctatgacaacattcatttcatgaaagccttccagaaaatagtggtgcttttttataaagaatctgaatctgaagctgaagaaggtgactgaattttgaaactacaccctcagtaaagcaaacaggagttgtagataaaatgtcatgtctcatgtgtcctggttcttacatcttcctacctccctgtatcaagcatgatataaagctttcatggcaaattttattttaactgtttctatggttgctggaaatgttgggtttagtttctaaaaccatgttttaagtagctacaggagctatagatttgaatctaatgttgcattagtcttttcagttatcttctacctcctgtattttctactgtaataatgtaatttaaggccttccacaatgaacagttcactttattccctgggttttctataaacagttttaaggatatgatttggttaaaaaataatttgttataaaaattctgtttgcaaattaaactggaaaagtatccagagtctcaaaaggcaatgatttgtgagataatatggcatgcccggagccctgctcatcaatgaaaaacccatatgtaataatcgaattcatttaacatgaatcttgagtacgtggaccattgcttgcatgttaacnnnnnnnnnnnnnnnnnnnnnnnnnnnnnnnnnnnnnnnnnnnaactccagatatcctaaagctcaattgtttggtctctggttttcatccttagagaagccatggagaacagacttgaaaagtttaggaaatcataatgtggcagaggtggtgggaagaagaaagttgagctttttccccttgagaaacttctgcatttagtttctatctttccaggcaaaacaaatgggtattcttttcatacaaccattttcaaatgaaccttagaaaagtcttaacatttaaggtattttatgcacagaatacacttagattgataggaaagaactcgtaatggagtttgagtaaagaaaatgactgatgtactaaacccagtaaaaattgttgaaaatgttaaaggtcagcatgttctaattgggaatctagatatagcttagatttcctattggcttagagtatttgctataacaaatgaagtgcaatgacattatatattcctactcgtcatactggactggcttcgttctccttaatatactcagtaatgactcaagcctctggctattaacataccc

SEQ ID NO: 183309 - DNA, 2076 bp, Homo Sapiens
  misc_feature (1905)..(1942): n is a, c, g, or t
ttggcgacgcagcgggggaagaaaaataagctagtctaggacaagtgtccaggcgacatggaacccaggtgtcttttatgaataatcaaaagcagcaaaagccaacgctatcaggccagcgttttaaaactagaaaaagaggtcccttgtccccccagatgaaaaagagaggtttgaccctactcagtttcaagactgtattattcaaggcttaactgaaaccggtactgatttggaagcagtagctaagtttcttgatgcttctggagcaaaacttgattaccgtcgatatgcagaaacactctttgacattctggtggctggtggaatgctggccccaggtggtacactggcagatgacatgatgcgtacagatgtctgcgtgtttgcagcccaagaagatctagagaccatgcaagcatttgctcaggtttttaacaagttaatcaggcgctacaaatacctggagaaaggttttgaagatgaagtaaaaaagctgctgctgttcttgaagggtttttcagagtcggagaggaacaagctagctatgttgactggtgttcttctggctaatggaacacttaatgcatccattcttaatagcctttataatgaaaatttggttaaagaaggagtttcagcagcttttgctgtgaagctctttaaatcatggataaatgaaaaagatatcaatgcagtagctgcaagtcttcggaaagtcagcatggataacagactgatggaactctttcctgccaataagcaaagtgttgaacacttcacaaaatattttactgaggcaggcttgaaagagctttcagaatatgttcggaatcagcaaaccatcggagctcgtaaggagctccagaaagaacttcaagaacagatgtcccgtggtgatccatttaaggatataattttatatgtcaaggaggagatgaaaaaaaacaacatcccagagccagttgtcatcggaatagtctggtcaagtgtaatgagcactgtggaatggaacaaaaaagaggagcttgtagcagagcaagccatcaagcacttgaagcaatacagccctctacttgctgcctttactactcaaggtcagtctgagctgactctgttactgaagattcaggagtattgctatgacaacattcatttcatgaaagccttccagaaaatagtggtgcttttttataaagctgaagtcctgagcgaggagcccattttgaagtggtataaagatgcacatgttgcaaaggggaagagtgttttccttgagcaaatgaaaaagtttgtagaatggctcaaaaatgctgaagaagaatctgaatctgaagctgaagaaggtgactgaattttgaaactacaccctcagtaaagcaaacaggagttgtagataaaatgtcatgtctcatgtgtcctggttcttacatcttcctacctccctgtatcaagcatgatataagggctttcatggcaaattttattttaactgtttctatggttgctggaaatgttgggtttagtttctaaaaccatgttttaagtagctacaggagctatagatttgaatctaatgttgcattagtcttttcagttatcttctacctcctgtattttctactgtaataatgtaatttaaggccttccacaatgaacagttcactttattccctgggttttctataaacagttttaaggatatgatttggttaaaaaataatttgttataaaaattctgtttgcaaattaaactggaaaagtatccagagtctcaaaaggcaatgatttgtgagataatatggcatgcccggagccctgctcatcaatgaaaaacccatatgtaataatcgaattcatttaacatgaatcttgagtacgtggaccattgcttgcatgttaacnnnnnnnnnnnnnnnnnnnnnnnnnnnnnnnnnnnnnnaactccagatatcctaaagctcaattgtttggtctctggttttcatccttagagaagccatggagaacagacttgaaaagtttagaaatcataatgtggcagagtggtgggaagaagaaagttgagcttttccc

SEQ ID NO: 183310 - DNA, 2087 bp, Homo Sapiens
  misc_feature (1899)..(1949): n is a, c, g, or t
ttggcgctgccttccagccaacctgcttgtgctgctgacagtggtggccgtggtggccggcgtggcgctgggactgggggtgtcgggggccgggggtgcgctggcgttgggcccggagcgcttgagcgccttcgtcttcccgggcgagctgctgctgcgtctgctgcggatgatcatcttgccgctggtggtgtgcagcttgatcggcggcgccgccagcctggaccccggcgcgctcggccgtctgggcgcctgggcgctgctctttttcctggtcaccacgctgctggcgtcggcgctcggagtgggcttggcgctggctctgcagccgggcgccgcctccgccgccatcaacgcctccgtgggagccgcgggcagtgccgaaaatgcccccagcaaggaggtgctcgattcgttcctggatcttgcgagaaatatcttcccttccaacctggtgtcagcagcctttcgctcatactctaccacctatgaagagaggaatatcaccggaaccagggtgaaggtgcccgtggggcaggaggtggaggggatgaacatcctgggcttggtagtgtttgccatcgtctttggtgtggcgctgcggaagctggggcctgaaggggagctgcttatccgcttcttcaactccttcaatgaggccaccatggttctggtctcctggatcatgtggtacgcccctgtgggcatcatgttcctggtggctggcaagatcgtggagatggaggatgtgggtttactctttgcccgccttggcaagtacattctgtgctgcctgctgggtcacgccatccatgggctcctggtactgcccctcatctacttcctcttcacccgcaaaaacccctaccgcttcctgtggggcatcgtgacgccgctggccactgcctttgggacctcttccagttccgccacgctgccgctgatgatgaagtgcgtggaggagaataatggcgtggccaagcacatcagccgtttcatcctgcccatcggcgccaccgtcaacatggacggtgccgcgctcttccagtgcgtggccgcagtgttcattgcacagctcagccagcagtccttggacttcgtaaagatcatcaccatcctggtcacggccacagcgtccagcgtgggggcagcgggcatccctgctggaggtgtcctcactctggccatcatcctcgaagcagtcaacctcccggtcgaccatatctccttgatcctggctgtggactggctagtcgaccggtcctgtaccgtcctcaatgtagaaggtgacgctctgggggcaggactcctccaaaattacgtggaccgtacggagtcgagaagcacagagcctgagttgatacaagtgaagagtgagctgcccctggatccgctgccactccccactgaggaaggaaaccccctcctcaaacactatcgggggcccgcaggggatgccacggtcgcctctgagaaggaatcagtcatgtaaaccccgggagggaccttccctgccctgctgggggtgctctttggacactggattatgaggaatggataaatggatgagctagggctctgggggtctgcctgcacactctggggagccaggggccccagcaccctccaggacaggagatctgggatgcctggctgctggagtacatgtgttcacaagggttactcctcaaaacccccagttctcactcatgtccccaactcaaggctagaaaacagcaagatggagaaataatgttctgctgcgtccccaccgtgacctgcctggcctcccctgtctcagggagcaggtcacaggtcaccatggggaattctagcccccactggggggatgttacaacaccatgctggttattttggcggctgtagttgtggggggannnnnnnnnnnnnnnnnnnnnnnnnnnnnnnnnnnnnnnnnnnnnnnnnnntctgtgacctcctgtccccatggtacgtcccacccctgtccccagatcccctattccctccacaaataacagaaacactcccagggactctgggggagaggcctgaaggacaaatacctgctgtcactccagaggaca

SEQ ID NO: 183311 - DNA, 1392 bp, Homo Sapiens
  misc_feature (399)..(454): n is a, c, g, or t
actttgtacaaaaaagttggctttattcttcctgttaaaagttttatttttaaaagtttcatacagtgtgtatattggtgtgataatcctacagaaaaatcaagcagttatgttttcttcacagataacacataaaatattaaacagaaagcctatgttattcattggactgaagcttttatgcaataaaccttagttggaccaggagtaaatgtatggtttgatattcagagaatctcattcttagaagcaacaaagtgtagttaacactaacttgttcattcttaaatcagtagtcctctcctccccaaaaagagatcttaaattattttcattttaaagtcatctactaacaagtaagtttttattcaacttaattaaatctaacaccacaagacnnnnnnnnnnnnnnnnnnnnnnnnnnnnnnnnnnnnnnnnnnnnnnnnnnnnnnnncttctcagcttaccacagtgcggagactgctttctgaaaaggccactcacgtgaacactagggatgaagatgagtatacccctcttcatcgagcagcctacagtggacacttagatattgttcaggagctcattgcacagggggccgatgttcatgcagtgactgtggatggctggacgcccctgcacagtgcttgtaagtggaataataccagagtggcttctttcttactgcagcatgatgcagatatcaatgcccaaacaaaaggcctcttgacccccttgcatcttgctgctgggaacagagacagcaaggataccctagaactcctcctgatgaaccgttacgtcaaaccagggctgaaaaacaacttggaagaaactgcatttgatattgccaggaggacaagtatctatcactacctctttgaaattgtggaaggctgtacaaattcttcacctcagtcttaacaattctagtaattttcctaagtttctaaataccagtgcctcctgtgtgtgagatgtattcccataatcaaagttgacgtcaaacatcttactacaaaaattcagtgacattcattataacattcttccaagtgaattgcctgactttgatgtcaaaatgtatttgaaagtaatttgcatatatctttaattatttctgtggagtttgtgatttttttatcagaaataattttaatgtgtgtatacttaaaaacttgacacgggttgtacagaaactggtatttttggtgctgatacaagagaaatgtatttttaaatatccccacatccctggatctttgttgggtatttagtatattgacatatatttttattaaggtgaggtaactccaaacttaatttaaaagtctttaaatattctgataacatttcagctgtcttctctaccttacccatagccagttgctt

SEQ ID NO: 183312 - DNA, 1223 bp, Homo Sapiens
ccatccagcggatgggcagcactgccccggccctgcacacggtaatagtccccagcatagaggttccggctcatgccaaagtctgcgattttgatggtgaaattttccccaactaggcagttccgcgtggccaggtcccgatgtacaaagttgagtgtggccagatagcgcatgccggaggcgatctgggctgccacatgcagcagcattgggtagctgatggtgggcccctgcgcagcctgcccgtcccccaggggccccctcggctgccttgtcctccagctggtgggcactgaggaactggttgaggtcgccgttctccatgtagtcagtaatcatgcagagggggtcgtcctgcacacacacgcccagcagccgaatgatgtttgggtccttgagcctcgacatgatcttcacctctttcaggaaatcattcctggcattcttggtggcatctggccgtaagatcttgacagctaccagcaaagggtgtcccttacgcacattaagggggaaatcaagactaaccagatcttgagggctgtcgacctcacacaggtgcacctccccaaactggccctcgccaagcttctccttgaagcggagtcgagatcgagggaaatccactctggggggcccatccccgactgcccctgggggcagtgcaggcacagcataggtgttgcccccggtgacgcccctgggtgttggtgggtttggcccaggcgggtgtgggggggcccgggcctcgagggggacgggcgtaagtggccagaaggaggcggtaggctggattggagagcagcaacgcagagccattggggacacagggagcggagtggggcggattcccacgaggccggggctcctggtacgggggtggctctctaggacctgggcggttgttgatgaggatagtgtccccagggacagagaggtgaaccgtcagctcctcttccaacaccctccgttcagccttgctgaggagcctgcgccagtgcagccgccagagcatgagggcaatgatgagcagcaggagcaggatgatggccaccaggcagccgatgaggatggcggtcgggctcccctcggccttggccacgggctgctggcctctgggctccagctccaagctgctgaagttggtgggaggtgggccaggcggccaccagggggctggcgggaaggtgcctcccagtgccggagaggaattgttcacccaa

SEQ ID NO: 183313 - DNA, 1056 bp, Homo Sapiens
ttgggcatgccacatttagcctcgctgtttacagccagttcaagatgctgcccccacccccttaggcccgagggatcaggagctatgggaccagaggccctgtcatctttactgctgctgctcttggtggcaagtggagatgctgacatgaagggacattttgatcctgccaagtgccgctatgccctgggcatgcaggaccggaccatcccagacagtgacatctctgcttccagctcctggtcagattccactgccgcccgccacagcaggttggagagcagtgacggggatggggcctggtgccccgcagggtcggtgtttcccaaggaggaggagtacttgcaggtggatctacaacgactgcacctggtggctctggtgggcacccagggacggcatgccgggggcctgggcaaggagttctcccggagctaccggctgcgttactcccgggatggtcgccgctggatgggctggaaggaccgctggggtcaggaggtgatctcaggcaatgaggaccctgagggagtggtgctgaaggaccttgggccccccatggttgcccgactggttcgcttctacccccgggctgaccgggtcatgagcgtctgtctgcgggtagagctctatggctgcctctggagggatggactcctgtcttacaccgcccctgtggggcagacaatgtatttatctgaggccgtgtacctcaacgactccacctatgacggacataccgtgggcggactgcagtatgggggtctgggccagctggcagatggtgtggtggggctggatgactttaggaagagtcaggagctgcgggtctggccaggctatgactatgtgggatggagcaaccacagcttctccagtggctatgtggagatggagtttgagtttgaccggctgagggccttccaggctatgcaggtccactgtaacaacatgcacacgctgggagcccgtctgcctggcggggtggaatgtcgcttccggcgtggccctgccatggcctgggagggggagcccatgcgacacaacctaggtggc

SEQ ID NO: 183314 - DNA, 917 bp, Homo Sapiens
ttggcaccttcccgccagccccctggtggccgcctggcccacctcccaccaacttcagcagcttggagctggagcccagaggccagcagcccgtggccaaggccgaggggagcccgaccgccatcctcatcggctgcctggtggccatcatcctgctcctgctgctcatcattgccctcatgctctggcggctgcactggcgcaggctcctcagcaaggctgaacggagggtgttggaagaggagctgacggttcacctctctgtccctggggacactatcctcatcaacaaccgcccaggtcctagagagccacccccgtaccaggagccccggcctcgtgggaatccgccccactccgctccctgtgtccccaatggctctgcctacagtggggactatatggagcctgagaagccaggcgccccgcttctgcccccacctccccagaacagcgtcccccattatgccgaggctgacattgttaccctgcagggcgtcaccgggggcaacacctatgctgtgcctgcactgcccccaggggcagtcggggatgggccccccagagtggatttccctcgatctcgactccgcttcaaggagaagcttggcgagggccagtttggggaggtgcacctgtgtgaggtcgacagccctcaagatctggttagtcttgatttcccccttaatgtgcgtaagggacaccctttgctggtagctgtcaagatcttacggccagatgccaccaagaatgccaggaatgatttcctgaaagaggtgaagatcatgtcgaggctcaaggacccaaacatcattcggctgctgggcgtgtgtgtgcaggacgaccccctctgcatgattactgactacatggagaacggcgacctccaccatttcctcagtgccccaccagctgga

SEQ ID NO: 183315 - DNA, 1831 bp, Homo Sapiens
  misc_feature (133)..(183): n is a, c, g, or t
ttggctttgtattacactcaccatgtttgttccttcatctatcctccatcacccatccttccatccatagtcatacatccttgcatccatccatcaatcttccatcatctgtctttctatctatattcataannnnnnnnnnnnnnnnnnnnnnnnnnnnnnnnnnnnnnnnnnnnnnnnnnnctatattcacacatccatctttccatctgttatccatccatccaacaaaacatctgtttaccatccatccatctattcatacgtcccatctgtccatgcattcattatccagccagccgtccgtcactctgcagatccttgttttatcctgtctgtctcttaatgcaatcatcccatcagccctggtcttgccctattcaaggtctccctgtctgtctagccttgagtctcatcccttccccgtgtttcccctcctccttctcccgacagcgttgctgctctccaatccagcctaccgcctccttctggccacttacgcccgtccccctcgaggcccgggcccccccacacccgcctgggccaaacccaccaacacccaggcctacagtggggactatatggagcctgagaagccaggcgccccgcttctgcccccacctccccagaacagcgtcccccattatgccgaggctgacattgttaccctgcagggcgtcaccgggggcaacacctatgctgtgcctgcactgcccccaggggcagtcggggatgggccccccagagtggatttccctcgatctcgactccgcttcaaggagaagcttggcgagggccagtttggggaggtgcacctgtgtgaggtcgacagccctcaagatctggtcagtcttgatttcccccttaatgtgcgtaagggacaccctttgctggtagctgtcaagatcttacggccagatgccaccaagaatgccaggaatgatttcctgaaagaggtgaagatcatgtcgaggctcaaggacccaaacatcattcggctgctgggcgtgtgtgtgcaggacgaccccctctgcatgattactgactacatggagaacggcgacctcaaccagttcctcagtgcccaccagctggaggacaaggcagccgagggggcccctggggacgggcaggctgcgcaggggcccaccatcagctacccaatgctgctgcatgtggcagcccagatcgcctccggcatgcgctatctggccacactcaactttgtacatcgggacctggccacgcggaactgcctagttggggaaaatttcaccatcaaaatcgcagactttggcatgagccggaacctctatgctggggactattaccgtgtgcagggccgggcagtgctgcccatccgctggatggcctgggagtgcatcctcatggggaagttcacgactgcgagtgacgtgtgggcctttggtgtgaccctgtgggaggtgctgatgctctgtagggcccagccctttgggcagctcaccgacgagcaggtcatcgagaacgcgggggagttcttccgggaccagggccggcaggtgtacctgtcccggccgcctgcctgcccgcagggcctatatgagctgatgcttcggtgctggagccgggagtctgagcagcgaccacccttttcccagctgcatcggttcctggcagaggatgcactcaacacggtgtgaatcacacatccagctgcccctccctcagggagcgatccaggggaagccagtgacactaaaacaagaggacacaatggcacctctgcccttcccctcccgacagcccatcacctctaatagaggcagtgagactgcagtgggctgggccc

SEQ ID NO: 183316 - DNA, 2012 bp, Homo Sapiens
ttggctcttgctcctcttcttcctcctcccgaccactcaactttgtcctggcctcatttttggcctcttctggccagtgatcagaccctctggcccactacggccagagctggctgggcctgagggagtggtgctgaaggaccttgggccccccatggttgcccgactggttcgcttctacccccgggctgaccgggtcatgagcgtctgtctgcgggtagagctctatggctgcctctggagggatggactcctgtcttacaccgcccctgtggggcagacaatgtatttatctgaggccgtgtacctcaacgactccacctatgacggacataccgtgggcggactgcagtatgggggtctgggccagctggcagatggtgtggtggggctggatgactttaggaagagtcaggagctgcgggtctggccaggctatgactatggggatggagcaaccacagcttctccagtggctatgtggagatggagtttgagtttgaccggctgagggccttccaggctatgcaggtccactgtaacaacatgcacacgctgggagcccgtctgcctggcggggtggaatgtcgcttccggcgtggccctgccatggcctgggagggggagcccatgcgccacaacctagggggcaacctgggggaccccagagcccgggctgtctcagtgccccttggcggccgtgtggctcgctttctgcagtgccgcttcctctttgcggggccctggttactcttcagcgaaatctccttcatctctgatgtggtgaacaattcctctccggcactgggaggcaccttcccgccagccccctggtggccgcctggcccacctcccaccaacttcagcagcttggagctggagcccagaggccagcagcccgtggccaaggccgaggggagcccgaccgccatcctcatcggctgcctggtggccatcatcctgctcctgctgctcatcattgccctcatgctctggcggctgcactggcgcaggctcctcagcaaggctgaacggagggtgttggaagaggagctgacggttcacctctctgtccctggggacactatcctcatcaacaaccgcccaggtcctagagagccacccccgtaccaggagccccggcctcgtgggaatccgccccactccgctccctgtgtccccaatggctctgcgttgctgctctccaatccagcctaccgcctccttctggccacttacgcccgtccccctcgaggcccgggcccccccacacccgcctgggccaaacccaccaacacccaggcctacagtggggactatatggagcctgagaagccaggcgccccgcttctgcccccacctccccagaacagcgtcccccattatgccgaggctgacattgttaccctgcagggcgtcaccgggggcaacacctatgctgtgcctgcactgcccccaggggcagtcggggatgggccccccagagtggatttccctcgatctcgactccgcttcaaggagaagcttggcgagggccagtttggggaggtgcacctgtgtgaggtcgacagccctcaagatctggttagtcttgatttcccccttaatgtgcgtaagggacaccctttgctggtagctgtcaagatcttacggccagatgccaccaagaatgccaggaatgatttcctgaaagaggtgaagatcatgtcgaggctcaaggacccaaacatcattcggctgctgggcgtgtgtgtgcaggacgaccccctctgcatgattactgactacatggagaacggcgacctcaaccagttcctcagtgcccacatctggaggacaaggcagccgaggggggcccctggggacgaggcaggctgcgcaagggccccaccatcagctacccaatgctgctgcatgtggcaaccccagatcgccttcggcatgcgctatctgccacatcaaactttgtacatcaggacctggcacgcggaactgcctagttgggaaaattt

SEQ ID NO: 183317 - DNA, 1338 bp, Homo Sapiens
gatgccttaaaaagaggaggtggaggaagaagaagatgatgatgaagattctggagctgaaatagaagatgacgatgaacagggttttgatgatgaagatgagtttgatgatgaacctgatgatgatcttgatactgaggataatgaattggaagaattagaagagagagcagaagctagaaaaaaaactactgaaaaacagtctgcagcggctctttgtgttggagttgggagtttcgctgatccagatgacctgccggggctggcacactttttggagcacatggtattcatgggtagtttgaaatatccagatgagaatggatttgatgccttcctgaagaagcatgggggtagtgataatgcctcaactgattgtgaacgcactgtctttcagtttgatgtccagaggaagtacttcaaggaagctcttgatagatgggcgcagttcttcatccacccactaatgatcagagatgcaattgaccgtgaagttgaagctgttgatagtgaatatcaacttgcaaggccttctgatgcaaacagaaaggaaatgttgtttggaagccttgctagacctggacatcctatgggaaaatttttttggggaaatgctgagacgctcaagcatgagccaagaaagaataatattgatacacatgctagattgagagaattctggatgcgttactactcttctcattacatgactttagtggttcaatccaaagaaacactggatactttggaaaagtgggtgactgaaatcttctctcagataccaaacaatgggttacccagaccaaactttggccatttaacggatccatttgacacaccagcatttaacaaactttatagagttgttccaatcagaaaaattcatgctctgaccatcacatgggcacttcctcctcaacagcaacattacagggtgaagccacttcattatatatcctggctggttggacatgaaggcaaaggcagcattctttctttccttaggaaaaaatgctgggctcttgcactgtttggtggaaatggtgagacaggatttgagcaaaattctacttattcagtgttcagcatttctattacattgactgatgagggttatgaacatttttatgaggttgcttacactgtctttcagtatttaaaaatgctgcagaagctaggcccagaaaaaagaatttttgaagagattcggaaaattgaggataatgaatttcattaccaagaacagacagatccagttgagtatgtggaaaacatgtgtgagaacatgcagctgtacccattgcaggacattctcactggagatcagcttctttttga

SEQ ID NO: 183318 - DNA, 1964 bp, Homo Sapiens
gaaaagaaagatgctgggctcttgcactgtttggtggaaatggtgagacaggatttgagcaaaattctacttattcagtgttcagcatttctattacattgactgatgagggttatgaacatttttatgaggttgcttacactgtctttcagtatttaaaaatgctgcagaagctaggcccagaaaaaagaatttttgaagagattcggaaaattgaggataatgaatttcattaccaagaacagacagatccagttgagtatgtggaaaacatgtgtgagaacatgcagctgtacccattgcaggacattctcactggagatcagcttctttttgaatacaagccagaagtcattggtgaagccttgaatcagctagttcctcaaaaagcaaatcttgttttactgtctggtgctaatgagggaaaatgtgacctcaaggagaaatggtttggaactcaatatagtatagaagatattgaaaactcttgggctgaactgtggaatagtaatttcgaattaaatccagatcttcatcttccagctgaaaacaagtacatagccacggactttacgttgaaggctttcgattgcccggaaacagaatacccagttaaaattgtgaatactccacaaggttgcctgtggtataagaaagacaacaaattcaaaatccccaaagcatatatacgtttccatctaatttcaccgttgatacagaaatctgcagcaaatgtggtcctctttgatatctttgtcaatatccttacgcataaccttgcggaaccagcttatgaagcagatgtggcacagctggagtataaactggtagctggagaacatggtttaattattcgagtgaaaggatttaaccacaaactacctctactgtttcagctcattattgactacttagctgagttcaattccacaccagctgtctttacaatgataactgagcagttgaagaagacctactttaacatcctcatcaagcccgagactttggccaaagatgtacggcttttaatcctggaatatgcccgttggtctatgattgacaagtaccaggctttgatggacggcctttcccttgagtctctgctgagcttcgtcaaagaattcaaatcccagctctttgtggagggcctggtacaagggaatgtcacaagcacagaatctatggatttcctgaaatatgttgttgacaaactaaacttcaagcctctggagcaggagatgcctgtgcagttccaggtggtagagctgcccagtggccaccatctatgcaaagtgaaagctctgaacaagggtgatgccaactctgaagtcactgtgtactaccagtcaggtaccaggagtctaagagaatatacgcttatggagctgcttgtgatgcacatggaagaaccttgttttgacttccttcgaaccaagcagacccttgggtaccatgtctaccctacctgtaggaacacatccgggattctaggattttctgtcactgtggggactcaggcaaccaaatacaattctgaagttgttgataagaagatagaagagtttctttctagctttgaggagaagattgagaacctcactgaagaggcattcaacacccaggtcacagctctcatcaagctgaaggagtgtgaggatacccaccttggggaggaggtggataggaactggaatgaagtggttacacagcagtacctctttgaccgccttgcccacgagattgaagcactgaagtcattctcaaaatcagacctggtcaactggttcaaggcccatagagggccaggaagtaaaatgctcagcgttcatgttgttggatatggggaagtatgaactggaagaggatggtacccctttctagtgaggattcaaattcttcttgtgaagtgatgcagctgacctacctgccaacctctcctctgctggcagattgtatcatcccca

SEQ ID NO: 183319 - DNA, 1018 bp, Homo Sapiens
ttggcaaagtctaaaaatgtcccactaggttcgttctttaaacatgtttacaaacaaatgtaaaaagatgatttacataagaaaaataaggcctttattagagctgcactgcactgctttctgggtctcctgccttcatccactgtgtgcgccgacttgcaggatgagagcgtggtgcttggtgctggccctaaggggagccacatgggtgtctctccacccgctcccaaggagcagaggcagggaagagggtgcaggggctagactggtccccaggttaccccatcccgagtctctccagctgagagaactgctcccagctcacagtctcagccactgaagacaagctccccaaatccagagactaggctaggaaagcgttaaccagtgctaggggcttctcatagtgttgtgatagtgttttcagtccacatcttattaggagctgatatttaacaccagccattttaaatctgttcatgctgcagaataaagcatctcttgctagaaaaagtacagttaaggtcagtcatgaaaatacaacaattgcttgaaattaggtatgcttatttcaggatgattgctgtagagctaggctgcgtccgtaaaggataatgcacatggcttctgtcataattttataaacgtaaaatcctttgtcatggtttatcattaaaaaattaatgataattacaataaatgcataatttacaaaagccctctattcataggatttatacatacaagcattacagtacattcatttgaaagactaaaattaggtataagaacatgatttgaaaggatatttatagcctggatatacatgaaaaagtaagtaactatataaatgaagagtcataagtttacataaatataagaaacattaaattctaaaatattttctctatggtattcatgaatttttcactaattaaaaactctgtaataaaatatcttagggtccatataactatagtaagtgagacaagattaaagccaacttttttgtacaaag

SEQ ID NO: 183320 - DNA, 2363 bp, Homo Sapiens
ttggcgctcaacagacgctgctgtggctgcgccgggctgcgacactgcagttgtctacgcggccggggccgggacgaggaggcgttggacggggtcgcatacgttcgtcccctcgcattgcggccccgacagctgcgccaggatccccgggcggcggcgcggggcgtgaacgctctggggctcagccaggcctgcgcgggcccgaggccggaggaacccggactccggcgtagcggttttgacacaagggcgcatatcttcaaagcacctagtacctcctaccattgtcaactgattctcgctgaagtctgttaattctactttttgagtacttatgaataaccacgtgtcttcaaaaccatctaccatgaagctaaaacataccatcaaccctattcttttatattttatacattttctaatatcactttatactattttaacatacattccgttttattttttctccgagtcaagacaagaaaaatcaaaccgaattaaagcaaagcctgtaaattcaaaacctgattctgcatacagatctgttaatagtttggatggtttggcttcagtattataccctggatgtgatactttagataaagtttttacatatgcaaaaaacaaatttaagaacaaaagactcttgggaacacgtgaagttttaaatgaggaagatgaagtacaaccaaatggaaaaatttttaaaaaggttattcttggacagtataattggctttcctatgaagatgtctttgttcgagcctttaattttggaaatggattacagatgttgggtcagaaaccaaagaccaacatcgccatcttctgtgagaccagggccgagtggatgatagctgcacaggcgtgttttatgtataattttcagcttgttacattatatgccactctaggaggtccagccattgttcatgcattaaatgaaacagaggtgaccaacatcattactagtaaagaactcttacaaacaaagttgaaggatatagtttctttggtcccacgcctgcggcacatcatcactgttgatggaaagccaccgacctggtccgagttccccaagggcatcattgtgcataccatggctgcagtggaggccctgggagccaaggccagcatggaaaaccaacctcatagcaaaccattgccctcagatattgcagtaatcatgtacacaagtggatccacaggacttccaaagggagtcatgatctcacatagtaacattattgctggtataactgggatggcagaaaggattccagaactagagaggaagatgtctacattggatatttgcctctggcccatgttctagaattaagtgctgagcttgtctgtctttctcacggatgccgcattggttactcttcaccacagactttagcagatcagtcttcaaaaattaaaaaaaggaagcaaggggatacatccatgttgaaaccaacactgatggcagcagttccggaaatcatggatcggatctacaaaaatgtcatgaataaagtcagtgaaatgagtagttttcaacgtaatctgtttattctggcctataattacaaaatggaacagatttcaaaaggacgtaatactccactgtgcgacagctttgttttccggaaagttcgaagcttgctagggggaaatattcgtctcctgttgtgtggtggcgctccactttctgcaaccacgcagcgattcatgaacatctgtttctgctgtcctgttggtcagggatacgggctcactgaatctgctggggctggaacaatttccgaagtgtgggactacaatactggcagagtgggagcaccattagtttgctgtgaaatcaaattaaaaaactgggaggaaggtggatactttaatactgataagccacaccccaggggtgaaattcttattgggggccaaagtgtgacaatggggtactacaaaaatgaagcaaaaacaaaagctgatttctttgaagatgaaaatggacaaaggtggctctgtactggggatattggagagtttgaacccgatggatgcttaaagattattgatcgtaaaaaggaccttgtaaaactacaggcaggggaatatgtttctcttgggaaagtagaggcagctttgaagaatcttccactagtagataacatttgtgcatatgcaaacagttatcattcttatgtcattggatttgttgtgccaaatcaaaaggaactaactgaactagctcgaaagaaaggacttaaagggacttgggaggagctgtgtaacagttgtgaattggaaaatgaaggtactttaaagtgctttccgaagctgctatttcagccaagttctgggaaaagtttgaa

SEQ ID NO: 183321 - DNA, 2656 bp, Homo Sapiens
  misc_feature (1752)..(1798): n is a, c, g, or t
tttgtacaaaaaagttggcattcttatgtcattggatttgttgtgccaaatcaaaaggaactaactgaactagctcgaaagaaaggacttaaagggacttgggaggagctgtgtaacagttgtgaaatggaaaatgaggtacttaaagtgctttccgaagctgctatttcagcaagtctggaaaagtttgaaattccagtaaaaattcgtttgagtcctgaaccgtggacccctgaaactggtctggtgacagatgccttcaagctgaaacgcaaagagcttaaaacacattaccaggcggacattgagcgaatgtatggaagaaaataattattctcttctggcatcagtttgctacagtgagctcagatcaaataggaaaatacttgaaatgcatgtctcaagctgcaaggcaaactccattcctcatattaaactattacttctcatgacgtcaccatttttaactgacaggattagtaaaacattaagacagcaaacttgtgtctgtctcttctttcattttccccgccaccaacttactttaccacctatgactgtacttgtcagtatgagaatttttctgaatcatattggggaagcagtgattttaaaacctcaagtttttaaacatgatttatatgttctgtataatgttcagtttgtaactttttaaaagtttggatgtatagagggataaataggaaatataagaattggttatttgggggcttttttacttactgtatttaaaaatacaagggtattgatatgaaattatgtaaatttcaaatgcttatgaatcaaatcattgttgaacaaaagatttgttgctgtgtaattattgtcttgtatgcatttgagagaaataaatatacccatacttatgttttaagaagttgagatcttgtgaatatatgcctgtcagtgtcttctttatatatttattttttattagaaaaaatgaagtttggttggtgatgcatgaaacaaaatagcaagagagggttatagtttaatagtaagggagataacacagcatgtgtagcaccagttgataattggtctctagtagcttactgtcaaaatgttcaatgaagtcttctgttcatctgttgaaactaggaaaatacccaaacttaaatggaagaattctgaaagagaggatagaatttaaagaacaagagtatataaagttattctttgaatatttcgttgactatatgtacattgagttatctatatttgtaaacaaattagtcatggaaaattattctattccaaagtctccttttagtctagataatcattatttcattttaaaattagtgtttttcatagtttgcactgatgcgtgtatggatgtgtgtgagtcagtggtagcttatttaaaaagcaccttatcctttctcccataacctttgtacactaaaaaatgaaagaatttagaatgtatttgatgatagcattctcactaagacacatgagaatttaactttataaccgcgtgagttaagatttaattcataggttttgatgtcattgttgaagttatttgtaattcagaaaccttgcttgtgtgatacatagtaagtctcttcatttattactgcttgtctgttgttatatctggattatcaaaagcaatagtgcaccaattaagatgtgctcaaatcaggacttaaatcataggcaccacatttttcatgtcagactagttactttgttgattctcagttactgtaggcatcnnnnnnnnnnnnnnnnnnnnnnnnnnnnnnnnnnnnnnnnnnnnnnngatgaacctaggtctgtgtaaagtaaggggagtgttaggagcagccaggactgtgtagtgtgtgtttggttgcatcacaaacatcgtatgtggagacattgcaatacagtgttttttgttttcaacttttcttgtattcttgtatatttgtattatgttttgaatgcttttctcttttcataattaaatattaatgtttgggataactgccaagaagaagtaaaaatattgaatggaacttctatatgaggatgctgtgatctaaaaattaaatctcagtgggcggagagaatttgtttctgatgccttgtctttagaataattgtttgctttcagatgattaaaaaaaggagattgtatctaggaaaaaagtgtgaatgcttcaaaggagagatactgataattgtgacttgaaatagtgtcagatgaattatgtagctgatcactgatggaaccatctaatgaggcaggcttaaactctatttagtttcgtttgttttctcatatgaagtttataattcctttcagtcctaaaatgtcagatgccaggtgtcaaatgccacagtagaacgtgaaattaagtagagtccccttttaaacaaatttctctgtaagcaaaactatctttagtgacttaaaaaataatatcctctaaaattaccctttcaagaggaaaaaactgttcaatgaaaaaaccactcaattatgactcatataagaaatactggtttaaccaggagatatttggggagcaaaattttaaggaatttcaaattgctaaatctaatacaaatatctgacaataagatacagatctaaagaatggttcttaagaactattgtttactgggaataaac

SEQ ID NO: 183322 - DNA, 1114 bp, Homo Sapiens
ttgggacaaatgcggcaaggccttccgccggagctccggcctcagtcgccaccggcggatccacagtggggcgcggcgctgcgaatgcagccagtgtggccgcgtgttcaagaggcgctcggcactgcagaagcatcagccaacccaccacgagtagaaacgccctgtggtcccgcgggacagggacggagtccccagaggggatggcagagtcaaaggagatgaacagttttgtagcgcttatatattttgtcttccaaaaggttgagaccgatttatactgccaccagcaatttataagtgttacgttatgcccatcaagagtagcttgtaccatttaacttagtttggctagtttaactggtaggaagtaccatcaaggtatttcagtccacatgccttgaatccaagaatgagagaggacagatctggatgtggggtagggaggggcttagaggtcatcaactccaagctccccccgccccagagaaacacacagagctgttccacgatggcgtcctcataatgtgatcccagctttcctgaagaaaacgttgccctcatgatttttggcctacttgaatttataaatttttagggatgtaaatagaacactcaaatgtcttaaaatatttaatttattaatttagttatacatacatactgtaaatcacatattatataaaataatatattaatttagaaaataccccatttttgccaccctccctttcacgaaatcattttactctgactcctcaccgtcttcaccaacatgggaaccctgtttgagtcatcagacagtttcaagacacacccagtcacttccatccgagctctgcacggtcgctcagtgacgatcccttcatgaggctctcattagaaattttctcccaagccataagaccatatttgcagaacattaggacgatttctcttgtcgtttttttaatctgtcctgtgactgtacaatataaccacttaaggtcatacttttttcaaacaacctttaaaccgtctttttcttttaaagcaccccaaattgtcattgtgaggccaaacgccctagtaacaagttactgaaatctgggttaaaatgtcggtatcttttttt

SEQ ID NO: 183323 - DNA, 851 bp, Homo Sapiens
tttgtacaaaaaagttggagcggagcggcggcgggcgcagctagcgggtcggccgcggagcggaggtgcagctcggcttcccccggcacccctccccctcgggcgccagccccacccctccgccggccgggccgaccccgccgtactatcccctgcggcgcgagcccggggcggctccaagcgccccccagcagacccccatcatgggcagccagagctccaaggctccccggggcgacgtgaccgccgaggaggcagcaggcgcttcccccgcgaaggccaacggccaggagaatggccacgtgaaaagcaatggagacttatcccccaagggtgaaggggagtcgccccctgtgaacggaacagatgaggcagccggggccactggcgatgccatcgagccagcaccccctagccagggtgctgaggccaagggggaggtcccccccaaggagacccccaagaagaagaagaaattctctttcaagaagcctttcaaattgagcggcctgtccttcaagagaaatcggaaggagggtgggggtgattcttctgcctcctcacccacagaggaagagcaggagcagggggagatcggtgcctgcagcgacgagggcactgctcaggaagggaaggccgcagccacccctgagagccaggaaccccaggccaagggggcagaggctagtgcagcctcagaagaagaggcagggccccaggctacagagccatccactccctcggggccggagagtggccctacaccagccagcgctgagcagaatgagtagctaggtaggggcaggtgggtgatctctaagctgcaaaaactgtgctgtccttgtgaggtc

SEQ ID NO: 183324 - DNA, 927 bp, Homo Sapiens
ttggccggagcgcgtgcgccctcttactcggctccccttggtttcctggggtcctgccccttcaagctggggcgggagcggaggaccccgctctcaggggttgccggaccatgcgttgggggctgcgccctcgcgggccgggcgcggccgccctggccactgcccgaagtttgtgggggacgccccgccttccctgcagcccgggatggcaaggggcgacgaagaggcttctggtgcggtcggtctccggggccagtaaccaccagccgaactcgaatagtggcagataccgggacacggtgctgctgccgcagacgagcttccccatgaagctgctgggccgccagcagccggacacggagctggagatccagcagaaatgtggattttcagaactttattcatggcaaagagaaagaaaagtaaagacagaattttgccttcatgatggacctccttatgcaaacggtgaccctcatgttggacatgctttaaataagattttgaaagacatagccaatcgattccatatgatgaatggctccaaaatacattttgtgcccggctgggattgtcatgggttgcccattgaaataaaagtattatcagaacttggtagagaagctcagaatctttcagctatggaaattagaaagaaagctagatcatttgctaaagcagccattgagaaacagaaatcagcatttattcgttggggaataatggcagattggaataattgctactatacatttgatgggaagtatgaagccaaacagttgagaactttttaccaaatgtatgataaagggcttggtttatcgatcttacaaacctgtgttttggtctccgtcatctaggactgcattggctgaagcagaacttgaatataatcctgagcatgtcagtcgttcaatatatgtaaaa

SEQ ID NO: 183325 - DNA, 1775 bp, Homo Sapiens
ttggcattctgcacctcatcttctcaaaaacagaacatgccgagtttttgcactgcaagtccaaaaagtttacagactttgatgaagtccggcaggagattgaagcagagaccgacagggtcacggggaccaacaaaggcatctccccagtgcccatcaaccttcgagtctactcgccacacgtgttgaacttgaccctcatcgacctcccgggtatcaccaaggtgcctgtgggcgaccagcctccagacatcgagtaccagatcaaggacatgatcctgcagttcatcagccgggagagcagcctcattctggctgtcacgcccgccaacatggacctggccaactccgacgccctcaagctggccaaggaagtcgatccccaaggcctacggaccatcggtgtcatcaccaagcttgacctgatggacgagggcaccgacgccagggacgtcttggagaacaagttgctcccgttgagaagaggctacattggcgtggtgaaccgcagccagaaggatattgagggcaagaaggacatccgtgcagcactggcagctgagaggaagttcttcctctcccacccggcctaccggcacatggccgaccgcatgggcacgccacatctgcagaagacgctgaatcagcaactgaccaaccacatccgggagtcgctgccggccctacgtagcaaactacagagccagctgctgtccctggagaaggaggtggaggagtacaagaactttcggcccgacgaccccacccgcaaaaccaaagccctgctgcagatggtccagcagtttggggtggattttgagaagaggatcgagggctcaggagatcaggtggacactctggagctctccgggggcgcccgaatcaatcgcatcttccacgagcggttcccatttgagctggtgaagatggagtttgacgagaaggacttacgacgggagatcagctatgccattaagaacatccatggagtcaggaccgggcttttcaccccggacttggcattcgaggccattgtgaaaaagcaggtcgtcaagctgaaagagccctgtctgaaatgtgtcgacctggttatccaggagctaatcaatacagttaggcagtgtaccagtaagctcagttcctacccccggttgcgagaggagacagagcgaatcgtcaccacttacatccgggaacgggaggggagaacgaaggaccagattcttctgctgatcgacattgagcagtcctacatcaacacgaaccatgaggacttcatcgggtttgccaatgcccagcagaggagcacgcagctgaacaagaagagagccatccccaatcagggggagatcctggtgatccgcaggggctggctgaccatcaacaacatcagcctgatgaaaggcggctccaaggagtactggtttgtgctgactgccgagtcactgtcctggtacaaggatgaggaggagaaagagaagaagtacatgctgcctctggacaacctcaagatccgtgatgtggagaagggcttcatgtccaacaagcacgtcttcgccatcttcaacacggagcagagaaacgtctacaaggacctgcggcagatcgagctggcctgtgactcccaggaagacgtggacagctggaaggcctcgttcctccgagctggcgtctaccccgagaaggaccaggcagaaaacgaggatggggcccaggagaacaccttctccatggacccccaactggagcggcaggtggagaccattcgcaacctg

SEQ ID NO: 183326 - DNA, 1038 bp, Homo Sapiens
ttggttccaaccacacataccagctggatgtcgtggagcggtcccctcaccggcccatcctgcaagcagggttgcccgccaacaaaacagtggccctgggtagcaacgtggagttcatgtgtaaggtgtacagtgacccgcagccgcacatccagtggctaaagcacatcgaggtgaatgggagcaagattggcccagacaacctgccttatgtccagatcttgaagactgctggagttaataccaccgacaaagagatggaggtgcttcacttaagaaatgtctcctttgaggacgcaggggagtatacgtgcttggcgggtaactctatcggactctcccatcactctgcatggttgaccgttctggaagccctggaagagaggccggcagtgatgacctcgcccctgtacctggagatcatcatctattgcacaggggccttcctcatctcctgcatggtggggtcggtcatcgtctacaagatgaagagtggtaccaagaagagtgacttccacagccagatggctgtgcacaagctggccaagagcatccctctgcgcagacaggtaacagtgtctgctgactccagtgcatccatgaactctggggttcttctggttcggccatcacggctctcctccagtgggactcccatgctagcaggggtctctgagtatgagcttcccgaagaccctcgctgggagctgcctcgggacagactggtcttaggcaaacccctgggagagggctgctttgggcaggtggtgttggcagaggctatcgggctggacaaggacaaacccaaccgtgtgaccaaagtggctgtgaagatgttgaagtcggacgcaacagagaaagacttgtcagacctgatctcagaaatggagatgatgaagatgatcgggaagcataagaatatcatcaacctgctgggggcctgcacgcaggatggtctcttgtatgtcatcgtggagtatgcctccaagggcaacctgcgggagtacctgcaggcccggagcccccagggctggaata

SEQ ID NO: 183327 - DNA, 1650 bp, Homo Sapiens
aggtaggtgccccctccccagcccaacccaccggtttcttggaggaaaccatccatggtcgatggctgctgggccttgactctctgcccagcgcctctactgcatggatggggttcctgccctcgaagcagacatcttctttttctgactttccaaaagcagcggagaggcaggaggtgcgtcgtgaggtctgggtgcaggacctggttggaggtcaaggccacgatgcggtccaggtcttccaccagctgcttgaaggtgggtctctgtgagggcactgcatgccagcagtcccgcatcatcatgtacagctcgttggtgcagttactgggcttgtccatgcggtgaccctccttcagcagcttgaaaagttcctccacaggcacaccggggtatggggagccgcccagagtgaagatctcccacaggagcaccccgaaagaccacacatcactctggtgggtgtagatccggtcaaataatgcctcgggtgccatccacttcacaggcagtcggccgttggttgtctttttatagtagtcgatgtggtgaatgtcccgtgcgaggccaaagtctgctatcttcatcacattgtcctctgtcaccaggacattcctggctgccaggtctcggtgtatgcacttcttggaggccagatactccatgcctcgggccacctggtaggcgcaggacaccaggtccttggaggagagctgctcctctgggttgtggctggggttgtagcagtattccagccctgggggcctccgggcctgcaggtactcccgcaggttgcccttggaggcatactccacgatgacatacaagggaccatcctgcgtgcaggcccccagcaggttgatgatattcttatgcttcccgatcatcttcatcatctccatttctgagatcaggtctgacaagtctttctctgttgcgtccgacttcaacatcttcacagccactttggtcacacggttgggtttgtccttgtccagcccgatagcctctgccaacaccacctgcccaaagcagccctctcccaggggtttgcctaagaccagtctgtcccgaggcagctcccagcgagggtcttcgggaagctcatactcagagacccctgctagcatgggagtcccactggaggagagccgtgatggccgaaccagaagaaccccagagttcatggatgcactggagtcagcagacactgttacctgtctgcgcagagggatgctcttggccagcttgtgcacagccatctggctgtggaagtcactcttcttggtaccactcttcatcttgtagacgatgaccgaccccaccatgcaggagatgaggaaggcccctgtgcaatagatgatgatctccaggtacaggggcgaggtcatcactgccggcctctcttccagggcttccagaacggtcaaccatgcagagtgatgggagagtccgatagagttacccgccaagcacgtatactcccctgcgtcctcaaaggagacatttcttaagtgaagcacctccatctctttgtcggtggtattaactccagcagtctagaagagacaacggaagcaaaatggacaagcacaggacatgagacctctaagagacgcagagcaagggaaggagacagaaagaagccaa

SEQ ID NO: 183328 - DNA, 1450 bp, Homo Sapiens
ttggctctcctccaaggacctggtgtcctgcgcctaccaggtggcccgaggcatggagtatctggcctccaagaagtgcatacaccgagacctggcagccaggaatgtcctggtgacagaggacaatgtgatgaagatagcagactttggcctcgcacgggacattcaccacatcgactactataaaaagacaaccaacggccgactgcctgtgaagtggatggcacccgaggcattatttgaccggatctacacccaccagagtgatgtgtggtctttcggggtgctcctgtgggagatcttcactctgggcggctccccataccccggtgtgcctgtggaggaacttttcaagctgctgaaggagggtcaccgcatggacaagcccagtaactgcaccaacgagctgtacatgatgatgcgggactgctggcatgcagtgccctcacagagacccaccttcaagcagctggtggaagacctggaccgcatcgtggccttgacctccaaccaggagtacctggacctgtccatgcccctggaccagtactcccccagctttcccgacacccggagctctacgtgctcctcaggggaggattccgtcttctctcatgagccgctgcccgaggagccctgcctgccccgacacccagcccagcttgccaatggcggactcaaacgccgctgactgccacccacacgccctccccagactccaccgtcagctgtaaccctcacccacagcccctgctgggcccaccacctgtccgtccctgtcccctttcctgctggcaggagccggctgcctaccaggggccttcctgtgtggcctgccttcaccccactcagctcacctctccctccacctcctctccacctgctggtgagaggtgcaaagaggcagatctttgctgccagccacttcatcccctcccagatgttggaccaacacccctccctgccaccaggcactgcctggagggcagggagtgggagccaatgaacaggcatgcaagtgagagcttcctgagctttctcctgtcggtttggtctgttttgccttcacccataagcccctcgcactctggtggcaggtgccttgtcctcagggctacagcagtagggaggtcagtgcttcgtgcctcgattgaaggtgacctctgccccagataggtggtgccagtggcttattaattccgatactagtttgctttgctgaccaaatgcctggtaccagaggatggtgaggcgaaggccaggttgggggcagtgttgtggccctggggcccagccccaaactgggggctctgtatatagctatgaagaaaactcaaaatgtataaatctgaatatatatttacatgtctttttaaaagggtcgttaccagagatttacccatcgggtaagatgctcctggtggctgggaggcatcagttgctatatatt

SEQ ID NO: 183329 - DNA, 1866 bp, Homo Sapiens
actttgtacaaagaagttgcaacagatgtcacacttattagcctcaaggaacagtcatttttgaagatatcagcattgaacattttgaaggaactgtaaccaaagttatcccaaaagtacccagtaaaaaccagaatgacccattgccaggacgcatcaaagttgactttgtgatccctaaagaacttccctttggagacaaagatacgaaatccaaggtgaccctgctggaaggtgaccatgttaggtttaatatttcaacagaccgacgtgacaaattagagcgagcaaccaatatagaagttctgtcaaatacatttcagttcactaatgaagcccgagaaatgggtgtgattgctgccatgagagatggttttggtttcatcaagtgtgtggatcgtgatgttcgtatgttcttccacttcagtgaaattctggatgggaaccagctccatattgcagatgaagtagagtttactgtggttcctgatatgctctctgctcaaagaaatcatgctattaggattaaaaaacttcccaagggcacggtttcatttcattcccattcagatcaccgttttctgggcacggtagaaaaagaagccactttttccaatcctaaaaccactagcccaaataaaggcaaagagaaggaggctgaggatggcattattgcttatgatgactgtggggtgaaactgactattgcttttcaagccaaggatgtggaaggatctacttctcctcaaataggagataaggttgaatttagtattagtgacaaacagaggcctggacagcaggttgcaacttgtgtgcgacttttaggtcgtaattctaactccaagaggctcttgggttatgtggcaactctgaaggataattttggatttattgaaacagccaatcatgataaggaaatctttttccattacagtgagttctctggtgatgttgatagcctggaactgggggacatggtcgagtatagcttgtccaaaggcaaaggcaacaaagtcagtgcagaaaaagtgaacaaaacacactcagtgaatggcattactgaggaagctgatcccaccatttactctggcaaagtaattcgccccctgaggagtgttgatccaacacagactgagtaccaaggaatgattgagattgtggaggagggcgatatgaaaggtgaggtctatccatttggcatcgttgggatggccaacaaaggggattgcctgcagaaaggggagagcgtcaagttccaattgtgtgtcctgggccaaaatgcacaaactatggcttacaacatcacacccctgcgcagggccacagtggaatgtgtgaaagatcagtttggcttcattaactatgaagtaggagatagcaagaagctctttttccatgtgaaagaagttcaggatggcattgagctacaggcaggagatgaggtggagttctcagtgattcttaatcagcgcactggcaagtgcagcgcctgtaatgtttggcgagtctgtgagggccccaaggctgttgcagctcctcgacctgatcggttggtcaatcgcttgaagaatatcactctggatgatgccagtgctcctcgcctaatggttcttcgtcagccaaggggaccagataactcaatggggtttggtgcagaaagaaagatccgtcaagctggtgtcattgactaaccacatccacaaagcacaccattaatccactatgatcaagttggggggaatctggtgaagggttctgaatatctccctcttcatccctcccgaaaatctggaatacttattctattgagctattacaccagtttttacaccttcctcgtgttatgtttaaaaaaataaataa

SEQ ID NO: 183330 - DNA, 1511 bp, Homo Sapiens
ttggatttattcctacgtaccgggccgtgctggcttatggcggcgctggagagggggcgctgagctgttgggtatgaagtgtaacagaacagactttaccacctgaaactgctgcttcaagttcagatcaggcaaggaacaaacctcgtaacaactaacaagaccaaagaagagtacacttaagttgaagacacaacacttgatctgaaacaagaagtttgtgcctactcaacagctttgaaagagcacttcccaacgctgctagtagtctttgttttcttcagtgctgtactgtgagattgcccggtacagcagcagttgtattctttattagcttggtagatcattttctctcgctcttttttttaatactagcaactttcatcctttgaaacgtgtgctgaaaaagaagaatcagcaaatactactgaaagtgcaatatttgagtatcactgcgagatgagctttgatccaaaccttctccacaacaatggacataatgggtaccctaatggtacttcagcagcactgcgtgaaactggggttattgaaaaactgttaacctcttacggatttattcagtgttcagaacgtcaagctagacttttcttccactgttcacagtataatggcaacctgcaagacttaaaagtaggagatgatgttgaatttgaagtatcatcggaccgacggactgggaaacccattgctgttaaactggtgaagataaaacaagaaatcctccctgaagaacgaatgaatggacaagaagtgttttatctgacttacacccctgaagatgtcgaagggaacgttcagctggaaactggagataaaataaactttgtaattgataacaataaacatactggtgctgtaagtgctcgcaacattatgctgttgaaaaagaaacaagcccgctgtcagggagtagtttgtgccatgaaggaggcatttggctttattgaaagaggtgatgttgtaaaagagatattctttcactatagtgaatttaagggtgacttagaaaccttacagcctggcgatgatgtggaattcacaatcaaggacagaaatggtaaagaagttgcaacagatgtcagactattgcctcaaggaacagtcatttttgaagatatcagcattgaacattttgaaggaactgtaaccaaagttatcccaaaagtacccagtaaaaaccagaatgacccattgccaggacgcatcaaagttgactttgtgatccctaaagaacttccctttggagacaaagatacgaaatccaaggtgaccctgctggaagtgaccatgttaggtttaatatttcaacagaccgacgtgacaaattagagcgagcaaccaatatagaagttctgtcaaatacatttcagttcactaatgaagcccgagaaatgggtgtgattgctgccatgagagatggttttggtttcatcaagtgtgtggatcgtgatgttcgtatgttcttccacttcagtgaaattctggatggg

SEQ ID NO: 183331 - DNA, 1260 bp, Homo Sapiens
gagcaatgctttttccctttatagccaactttgtacaaaaaagtaggagatgatgttgaatttgaagtatcatcggaccgacggactgggaaacccattgctgttaaactggtgaagataaaacaagaaatcctccctgaagaacgaatgaatggacaagaagtgttttatctgacttacacccctgaagatgtcgaagggaacgttcagctggaaactggagataaaataaactttgtaattgataacaataaacatactggtgctgtaagtgctcgcaacattatgctgttgaaaaagaaacaagcccgctgtcagggagtagtttgtgccatgaaggaggcatttggctttattgaaagaggtgatgttgtaaaagagatattctttcactatagtgaatttaagggtgacttagaaaccttacagcctggcgatgatgtggaattcacaatcaaggacagaaatggtaaagaagttgcaacagatgtcagactattgcctcaaggaacagtcatttttgaagatatcagcattgaacattttgaaggaactgtaaccaaagttatcccaaaagtacccagtaaaaaccagaatgacccattgccaggacgcatcaaagttgactttgtgatccctaaagaacttccctttggagacaaagatacgaaatccaaggtgaccctgctggaaggtgaccatgttaggtttaatatttcaacagaccgacgtgacaaattagagcgagcaaccaatatagaagttctgtcaaatacatttcagttcactaatgaagcccgagaaatgggtgtgattgctgccatgagagatggttttggtttcatcaagtgtgtggatcgtgatgttcgtatgttcttccacttcagtgaaattctggatgggaaccagctccatattgcagatgaagtagagtttactgtggttcctgatatgctctctgctcaaagaaatcatgctattaggattaaaaaacttcccaagggcacggtttcatttcattcccattcagatcaccgttttctgggcacggtagaaaaagaagccactttttccaatcctaaaaccactagcccaaataaaggcaaagagaagaggctgaggatggcattattgcttatgatgactgtggggtgaaactgactattgcttttcaagcccaaggatgtgagaaggatctacttctcctcaataggagataagtttgaatttagtattagtgacaacagaggcctggacagc

SEQ ID NO: 183332 - DNA, 2329 bp, Homo Sapiens
tttgtacaaaaaagttggcttgacaaaaccatttacaacgtggaactcaagctcttctccacagaggaggacagagcagacagcagagaccatggagtctccctcggcccctccccacagatggtgcatcccctggcagaggctcctgctcacagcctcacttctaaccttctggaacccgcccaccactgccaagctcactattgaatccacgccgttcaatgtcgcagaggggaaggaggtgcttctacttgtccacaatctgccccagcatctttttggctacagctggtacaaaggtgaaagagtggatggcaaccgtcaaattataggatatgtaataggaactcaacaagctaccccagggcccgcatacagtggtcgagagataatataccccaatgcatccctgctgatccagaacatcatccagaatgacacaggattctacaccctacacgtcataaagtcagatcttgtgaatgaagaagcaactggccagttccgggtatacccggagctgcccaagccctccatctccagcaacaactccaaacccgtggaggacaaggatgctgtggccttcacctgtgaacctgagactcaggacgcaacctacctgtggtgggtaaacaatcagagcctcccggtcagtcccaggctgcagctgtccaatggcaacaggaccctcactctattcaatgtcacaagaaatgacacagcaagctacaaatgtgaaacccagaacccagtgagtgccaggcgcagtgattcagtcatcctgaatgtcctctatggcccggatgcccccaccatttcccctctaaacacatcttacagatcaggggaaaatctgaacctctcctgccacgcagcctctaacccacctgcacagtactcttggtttgtcaatgggactttccagcaatccacccaagagctctttatccccaacatcactgtgaataatagtggatcctatacgtgccaagcccataactcagacactggcctcaataggaccacagtcacgacgatcacagtctatgcagagccacccaaacccttcatcaccagcaacaactccaaccccgtggaggatgaggatgctgtagccttaacctgtgaacctgagattcagaacacaacctacctgtggtgggtaaataatcagagcctcccggtcagtcccaggctgcagctgtccaatgacaacaggaccctcactctactcagtgtcacaaggaatgatgtaggaccctatgagtgtggaatccagaacgaattaagtgttgaccacagcgacccagtcatcctgaatgtcctctatggcccagacgaccccaccatttccccctcatacacctattaccgtccaggggtgaacctcagcctctcctgccatgcagcctctaacccacctgcacagtattcttggctgattgatgggaacatccagcaacacacacaagagctctttatctccaacatcactgagaagaacagcggactctatacctgccaggccaataactcagccagtggccacagcaggactacagtcaagacaatcacagtctctgcggagctgcccaagccctccatctccagcaacaactccaaacccgtggaggacaaggatgctgtggccttcacctgtgaacctgaggctcagaacacaacctacctgtggtgggtaaatggtcagagcctcccagtcagtcccaggctgcagctgtccaatggcaacaggaccctcactctattcaatgtcacaagaaatgacgcaagagcctatgtatgtggaatccagaactcagtgagtgcaaaccgcagtgacccagtcaccctggatgtcctctatgggccggacacccccatcatttcccccccagactcgtcttacctttcgggagcgaacctcaacctctcctgccactcggcctctaacccatccccgcagtattcttggcgtatcaatgggataccgcagcaacacacacaagttctctttatcgccaaaatcacgccaaataataacgggacctatgcctgttttgtctctaacttggctactggccgcaataattccatagtcaagagcatcacagtctctgcatctggaacttctcctggtctctcagctggggccactgtcggcatcatgattggagtgctggttggggttgctctgatatagcagccctggtgtagtttcttcatttcaggaagactgacagttgttttgcttcttccttaaagcatttgcaacagctacagtctaaaattgcttctttaccaaggatatttacagaaaagactctgacca

SEQ ID NO: 183333 - DNA, 428 bp, Homo Sapiens
ctttgtacaaaaaagttggcctcaacctctcctgccactcggcctctaacccatccccgcagtattcttggcgtatcaatgggataccgcagcaacacacacaagttctctttatcgccaaaatcacgccaaataataacgggacctatgcctgttttgtctctaacttggctactggccgcaataattccatagtcaagagcatcacagtctctgcatctggaacttctcctggtctctcagctggggccactgtcggcatcatgattggagtgctggttggggttgctctgatatagcagccctggtgtagtttcttcatttcaggaagactgacagttgttttgcttcttccttaaagcatttgcaacagctacagtctaaaattgcttctttaccaaggatatttacagaaaagactctgacca

SEQ ID NO: 183334 - DNA, 1092 bp, Homo Sapiens
ttggggaaaacagcagaggtgacagagcagccgtgctcgaagcgttcctggagcccaagctctcctccacaggtgaagacagggccagcaggagacaccatggggcacctctcagccccacttcacagagtgcgtgtaccctggcaggggcttctgctcacagcctcacttctaaccttctggaacccgcccaccactgcccagctcactactgaatccatgccattcaatgttgcagaggggaaggaggttcttctccttgtccacaatctgccccagcaactttttggctacagctggtacaaaggggaaagagtggatggcaaccgtcaaattgtaggatatgcaataggaactcaacaagctaccccagggcccgcaaacagcggtcgagagacaatataccccaatgcatccctgctgatccagaacgtcacccagaatgacacaggattctacaccctacaagtcataaagtcagatcttgtgaatgaagaagcaactggacagttccatgtatacccggagctgcccaagccctccatctccagcaacaactccaaccctgtggaggacaaggatgctgtggccttcacctgtgaacctgagactcaggacacaacctacctgtggtggataaacaatcagagcctcccggtcagtcccaggctgcagctgtccaatggcaacaggaccctcactctactcagtgtcacaaggaatgacacaggaccctatgagtgtgaaatacagaacccagtgagtgcgaaccgcagtgacccagtcaccttgaatgtcacctatggcccggacacccccaccatttccccttcagacacctattaccgtccaggggcaaacctcagcctctcctgctatgcagcctctaacccacctgcacagtactcctggcttatcaatggaacattccagcaaagcacacaagagctctttatccctaacatcactgtgaataatagtggatcctatacctgccacgccaataactcagtcactggctgcaacaggaccacagtcaagacgatcatagtcactgagctaagtccagtagtagcaaagccccaaatcaaa

SEQ ID NO: 183335 - DNA, 2115 bp, Homo Sapiens
  misc_feature (1835)..(1866): n is a, c, g, or t
actttgtacaaaaaagttgggatcttgtgaatgaagaagcaaccggacagttccatgtatacccggagctgcccaagccctccatctccagcaacaactccaaccccgtggaggacaaggatgctgtggccttcacctgtgaacctgaggttcagaacacaacctacctgtggtgggtaaatggtcagagcctcccggtcagtcccaggctgcagctgtccaatggcaacatgaccctcactctactcagcgtcaaaaggaacgatgcaggatcctatgaatgtgaaatacagaacccagcgagtgccaaccgcagtgacccagtcaccctgaatgtcctctatggcccagatggccccaccatttccccctcaaaggccaattaccgtccaggggaaaatctgaacctctcctgccacgcagcctctaacccacctgcacagtactcttggtttatcaatgggacgttccagcaatccacacaagagctctttatccccaacatcactgtgaataatagcggatcctatatgtgccaagcccataactcagccactggcctcaataggaccacagtcacgatgatcacagtctctggaagtgctcctgtcctctcagctgtggccaccgtcggcatcacgattggagtgctggccagggtggctctgatatagcagccctggtgtattttcgatatttcaggaagactggcagattggaccagaccctgaattcttctagctcctccaatcccattttatcccatggaaccactaaaaacaaggtctgctctgctcctgaagccctatatgctggagatggacaactcaatgaaaatttaaagggaaaaccctcaggcctgaggtgtgtgccactcagagacttcacctaactagagacagtcaaactgcaaaccatggtgagaaattgacgacttcacactatggacagcttttcccaagatgtcaaaacaagactcctcatcatgataaggctcttacccccttttaatttgtccttgcttatgcctgcctctttcgcttggcaggatgatgctgtcattagtatttcacaagaagtagcttcagagggtaacttaacagagtgtcagatctatcttgtcaatcccaacgttttacataaaataagagatcctttagtgcacccagtgactgacattagcagcatctttaacacagccgtgtgttcaaatgtacagtggtccttttcagagttggacttctagactcacctgttctcactccctgttttaattcaacccagccatgcaatgccaaataatagaattgctccctaccagctgaacagggaggagtctgtgcagtttctgacacttgttgttgaacatggctaaatacaatgggtatcgctgagactaagttgtagaaattaacaaatgtgctgcttggttaaaatggctacactcatctgactcattctttattctattttagttggtttgtatcttgcctaaggtgcgtagtccaactcttggtattaccctcctaatagtcatactagtagtcatactccctggtgtagtgtattctctaaaagctttaaatgtctgcatgcagccagccatcaaatagtgaatggtctctctttggctggaattacaaaactcagagaaatgtgtcatcaggagaacatcataacccatgaaggataaaagccccaaatggtggtaactgataatagcactaatgctttaagatttggtcacactctcacctaggtgagcgcattgagccagtggtgctaaatgctacatactccaactgaaatgttaaggaagaagatagatccaattnnnnnnnnnnnnnnnnnnnnnnnnnnnnnnnngaacacaggagattccagtctacttgagttagcataatacagaagtcccctctactttaacttttacaaaaaagtaacctgaactaatctgatgttaaccaatgtatttatttctgtggttctgtttccttgttccaatttgacaaaacccactgttcttgtattgtattgcccagggggagctatcactgtacttgtagagtggtgctgctttaattcataaatcacaaataaaagccaattagctct

SEQ ID NO: 183336 - DNA, 981 bp, Homo Sapiens
ctttgtacaaaaaagttggggcagagggacctaaggacagcagaccagacagtcacagcagccttgacaaaacgttcctggaactcaagctcttctccacagaggaggacagagcagacagcagagaccatggagtctccctcggcccctccccacagatggtgcatcccctggcagaggctcctgctcacagcctcacttctaaccttctggaacccgcccaccactgccaagctcactattgaatccacgccgttcaatgtcgcagaggggaaggaggtgcttctacttgtccacaatctgccccagcatctttttggctacagctggtacaaaggtgaaagagtggatggcaaccgtcaaattataggatatgtaataggaactcaacaagctaccccagggcccgcatacagtggtcgagagataatataccccaatgcatccctgctgatccagaacatcatccagaatgacacaggattctacaccctacacgtcataaagtcagatcttgtgaatgaagaagcaactggccagttccgggtatacccggagctgcccaagccctccatctccagcaacaactccaaacccgtggaggacaaggatgctgtggccttcacctgtgaacctgagactcaggacgcaacctacctgtggtgggtaaacaatcagagcctcccggtcagtcccaggctgcagctgtccaatggcaacaggaccctcactctattcaatgtcacaagaaatgacacagcaagctacaaatgtgaaacccagaacccagtgagtgccaggcgcagtgattcagtcatcctgaatgtcctctatggcccggatgcccccaccatttcccctctaaacacatcttacagatcaagggaaaatctgaacctctcctgccacgcagcctctaacccacctgcacagtactcttggtttgtcaatgggactttccagcaatccacccaagagctc

SEQ ID NO: 183337 - DNA, 1228 bp, Homo Sapiens
  misc_feature (367)..(581): n is a, c, g, or t
ttggcaatgggataccccagcaacacacacaagttctctttatcgccaaaatcacgccaaataataacgggacctatgcctgttttgtctctaacttggctactggccgcaataattccatagtcaagagcatcacagtctctggacgattcagcatctggaacttctcctggtctctcagctggggccactgtcggcatcatgattggagtgctggttggggttgctctgatatagcagccctggtgtagtttcttcatttcaggaagactgacagttgttttgcttcttccttaaagcatttgcaacagctacagtctaaaattgcttctttaccaaggatatttacagaaaagactctgaccannnnnnnnnnnnnnnnnnnnnnnnnnnnnnnnnnnnnnnnnnnnnnnnnnnnnnnnnnnnnnnnnnnnnnnnnnnnnnnnnnnnnnnnnnnnnnnnnnnnnnnnnnnnnnnnnnnnnnnnnnnnnnnnnnnnnnnnnnnnnnnnnnnnnnnnnnnnnnnnnnnnnnnnnnnnnnnnnnnnnnnnnnnnnnnnnnnnnnnnnnnnnnnnnnnnnnnaagaaaagaagactctgacctgtactcttgaatacaagtttctgataccactgcactgtctgagaatttccaaaactttaatgaactaactgacagcttcatgaaactgtccaccaagatcaagcagagaaaataattaatttcatgggactaaatgaactaatgaggataatattttcataattttttatttgaaattttgctgattctttaaatgtcttgtttcccagatttcaggaaactttttttcttttaagctatccacagcttacagcaatttgataaaatatacttttgtgaacaaaaattgagacatttacattttctccctatgtggtcgctccagacttgggaaactattcatgaatatttatattgtatggtaatatagttattgcacaagttcaataaaaatctgctctttgtatgacagaatacatttgaaaacattggttatattaccaagactttgactagaatgtcgtatttgaggatataaacccataggtaataaacccacaggtactacaaacaaagtctgaagtcagccttggtttggcttcctagtgtcaattaaacttctaaaagtttaatttgagattccttataaaaacttccagcaaagcaactttaaaaaagtctgtgtg

SEQ ID NO: 183338 - DNA, 1348 bp, Homo Sapiens
  misc_feature (1135)..(1162): n is a, c, g, or t
ttggggttccaagtgtggagaaagcggctctggggctagattgagggatactccccctttccaccatgggcaagaagggcaaagttggcaagagccgacgagacaagttttatcacttggcgaaggagacgggttaccgttcccgatctgctttcaagctgatccagctcaatcgccgctttcagttcctgcagaaagcccgagccttgctggacctgtgtgctgcgccagggggatggctgcaggtagctgccaagtttatgcctgtatccagccttattgtgggagtggacctggttccaatcaagcctctccccaatgtggtgactctccaggaggacatcacaacagaacgttgtaggcaggccctgaggaaggagctgaagacctggaaggttgatgttgtgctcaatgatggggcccccaacgttggggctagctgggtccatgatgcttactcacaagcccatttgacactgatggctctacgtttggcttgtgactttttggcccgtggtggcagcttcatcacaaaggttttccgttctcgtgactatcagcctctgctatggatctttcagcagctgttccgccgtgtccaggccaccaagccccaagcctctcgccatgaatctgcagagatctttgtagtctgccaaggattcctggcccctgacaaggttgacagtaaattctttgaccccaaatttgcctttaaggaggttgaagttcaggctaagaccgttactgaattggttactaagaagaagccaaaggctgaaggctatgctgagggtgacctcactctctatcaccgtacctcagtcactgacttcctccgagctgccaaccctgttgacttcctctccaaggccagcgaaatcatggtagatgatgaagagttggcacagcatccagctaccactgaggacatacgggtgtgctgtcaggacatcagagtgttggggcgcaaggagctcaggtcgctactaaactggagaacaaaacttcggcgatatgtggccaagaagctgaaagaacaagcaaaggcactggacatcagcctcagctctggagaggaagatgaaggtgatgaggaggactcaacagctggaaccacaaagcagccctctannnnnnnnnnnnnnnnnnnnnnnnnnnnacaactgaaccagaccttggcagaaatgaaggcccaggatgtggcggaattgaagaggaagaaaaagaagctgttgcgtgagcagagaaagcagcgggagcgtgtggagctgaagatggatctgcctggggtttccattgcagacgagggggagactggcatgttctccttgtgcaccatccgggg

SEQ ID NO: 183339 - DNA, 1210 bp, Homo Sapiens
  misc_feature (114)..(153): n is a, c, g, or t
ttggaaagtcgaggcacagacacagagagctcaggtgaagataaggactctgacagcatggaggacactggtcattactccattaatgatgaaaatcgagtccatgaccgctcnnnnnnnnnnnnnnnnnnnnnnnnnnnnnnnnnnnnnnnncagcctcggcgccgtgtacagcgcaagcgggctaaccgtgaccaggactcatcagatgatgagcgggccctagaggactgggtgtcctcagaaacatcagctctaccccgacctcgctggcaagccctccctgcccttcgggagcgggagctgggttcaagtgcccgctttgtctatgaggcctgtggggcaagagtctttgtgcagcgtttccgcctgcagcatgggcttgagggccatactggttgtgtcaataccctgcactttaaccagcgcggcacctggctggccagtggcagcgatgacctgaaggtggtggtgtgggattgggtacggcggcagccagtactggactttgagagtggccacaaaagtaatgtgttccaggccaagtttcttcctaacagtggtgattctactctggccatgtgtgcccgtgacgggcaggttcgagtagcagaactgtctgccacacagtgttgcaagaatacaaaacgtgtggcccagcacaagggagcgtcccacaagttggcactggaaccagactctccctgtacgttcttatctgcaggtgaagatgcagttgttttcaccattgacctgagacaagaccgcccagcgtcgaaactggtggtgacaaaagagaaagagaagaaagtggggctgtatacgatctatgtgaatcctgccaatacccaccagtttgcagtgggtggacgagatcagtttgtaaggatttatgaccagaggaaaattgatgagaatgagaacaatggagtactcaagaagttctgtcctcatcacctggtgaacagtgagtccaaagcaaacatcacctgtcttgtgtacagccacgacggcacagagctcctggccagttacaatgatgaagacatttacctcttcaactcctctcacagtgatggggcccagtatgttaagagatacaagggccacagaaataatgccacagtaaaaggcgtcaatttctatggccccaagagtgagtttgtggtgagcggtagtgactgtgggcacatcttcctctggggagaaa

SEQ ID NO: 183340 - DNA, 984 bp, Homo Sapiens
ccacccctcccccagcccaagaaacaagggagattaaagaaaaagaaaccccattccctatcccaaaccagttaacaaaataggcttccctctcctctcaaaaagaggctttggggagaggccatttctgccgagtcctatgcacctctccatggagccccattccagggctcaactcccattcctaggtactctttgttggttcactcctctggtttgtccttctcctgggatgtctttcttttatctaaagcaaaaagtccaaagtgcgtttctgctgaatgtagggcctgggacaggaaagggttgcccaggcaggatcaggttggcagccccagcctgccccacctaggtatgaggcctcaagatggcatgcactgcacccggtcagggccctcctcctcgtccgatgtgtctgaggagctgggagactcatcagagtccgcgtctgtggccccaaccccaggttctcgccagcgccggtgatggcgtctctgtctcaggtgatgcataaggaaccacagcatgtgactatcaaacaggtcagtttggtgcaagctatcttcatcccgctcccgcttgttcttcttaatcacatcttttaaccctgtcagctcagtggaagcttcagctgtgggtgcccagatcttcacatcatggtctaggccactggttgccagcacaggcaggtgagggtggggctcaagacagtttacctggtcaggaagaaaggaaaacacagactcagcagtgtgtgggagtagggtttaaaaaccactactcaccttgagccaaataactgcccttgatcagggctgaggcagctgctggggaagggaggcccacccatcctgagcctaagccaaagggcactgagggtagagaaaccagacacagactgggtataagaccaggcacatcaatcatttcctatgtataggtcgggggtggcttcatccccaccaacttttttgtacaaagttg

SEQ ID NO: 183341 - DNA, 3937 bp, Homo Sapiens
  misc_feature (2385)..(2415): n is a, c, g, or t
  misc_feature (2522)..(2533): n is a, c, g, or t
  misc_feature (3402)..(3462): n is a, c, g, or t
  misc_feature (3468)..(3487): n is a, c, g, or t
ttggcagatgccttctgcaccaaggctggttcgagctggcatcacatgggtcacgttgcagtggagtaagccagaaggctgttcacccgaggaagtgatcacctacaccttggaaattcaggaggatgaaaatgataaccttttccacccaaaatacactggagaggatttaacctgtactgtgaaaaatctcaaaagaagcacacagtataaattcaggctgactgcttctaatacggaaggaaaaagctgtccaagcgaagttcttgtttgtacgacgagtcctgacaggcctggacctcctaccagaccgcttgtcaaaggcccagttacatctcatggctttagtgtcaaatgggatccccctaaggacaatggtggttcagaaatcctcaagtacttgctagagattactgatggaaattctgaagcgaatcagtgggaagtggcctacagtgggtcggctaccgaatacaccttcacccacttgaaaccaggcactttgtacaaactccgagcatgctgcatcagtaccggcggacacagccagtgttctgaaagtctccctgttcgcacactaagcattgcaccaggtcaatgtcgaccaccgagggttttgggtagaccaaagcacaaagaagtccacttagagtgggatgttcctgcatcggaaagtggctgtgaggtctcagagtacagcgtggagatgacggagcccgaagacgtagcctcggaagtgtaccatggcccagagctggagtgcaccgtcggcaacctgcttcctggaaccgtgtatcgcttccgggtgagggctctgaatgatggagggtatggtccctattctgatgtctcagaaattaccactgctgcagggcctcctggacaatgcaaagcaccttgtatttcttgtacacctgatggatgtgtcttagtgggttgggagagtcctgatagttctggtgctgacatctcagagtacaggttggaatggggagaagatgaagaatccttagaactcatttatcatgggacagacacccgttttgaaataagagacctgttgcctgctgcacagtattgctgtagactacaggccttcaatcaagcaggggcagggccgtacagtgaacttgtcctttgccagacgccagcgtctgcccctgaccccgtctccactctctgtgtcctggaggaggagccccttgatgcctaccctgattcaccttctgcgtgccttgtactgaactgggaagagccgtgcaataacggatctgaaatccttgcttacaccattgatctaggagacactagcattaccgtgggcaacaccaccatgcatgttatgaaagatctccttccagaaaccacctaccggatcagaattcaggctataaatgaaattggagctggaccatttagtcagttcattaaagcaaaaactcggccattaccacccttgcctcctaggctagaatgtgctgctgctggtcctcagagcctgaagctaaaatggggagacagtaactccaagacacatgctgctgaggacattgtgtacacactacagctggaggacagaaacaagaggtttatttcaatctacagaggacccagccacacctacaaggtccagagactgacggaattcacatgctactccttcagaatccaggcagcaagcgaggctggagaagggcccttctcagaaacctataccttcagcacaaccaaaagtgtcccccccaccatcaaagcacctcgagtaacacagttagaaggaaattcatgtgaaattttatgggagacggtaccatcaatgaaaggtgaccctgttaactacattctgcaggtattggttggaagagaatctgagtacaaacaggtgtacaagggagaagaagccacattccaaatctcaggcctccagaccaacacagactacaggttccgcgtatgtgcgtgtcgtcgctgtttagacacctctcaggagctaagcggagccttcagcccctctgcggcttttgtattacaacgaagtgaggtcatgcttacaggggacatggggagcttagatgatcccaaaatgaagagcatgatgcctactgatgaacagtttgcagccatcattgtgcttggctttgcaactttgtccattttatttgcctttatattacagtacttcttaatgaagtaaacccaacaaaactagaggtatgaattaatgctacacattttaatacacacatttattcagatactcccctttttaaagcccttttgttttttgatttatatactctgttttacagatttagctagaaaaaaaatgtcagtgttttggtgcacctttttgaaatgcaaaactaggaaaaggttaaactggannnnnnnnnnnnnnnnnnnnnnnnnnnnnnngaagaaaagtataccagataccaaaagctagctttcttatgttttcctttaaattttcagatttaccttcattctgttttcactgatgtcttttgcaagcctttgannnnnnnnnnnngttacagtttagtaatttatattcaccagtcacttcttatgtcttgaacatctgtatctgtaaacatgaatcaccgtgtgtgtacttacagggctaggatttcagtgttgtcagagtattaccacacagcaacagcaacatacagaagatatgttcactcagataagactgccctaaacaaccattttgtcactcagttatttaactgtgtttagctcatttaaatcaaaatgtgtactttaatctaaaatgttttaataatctgtatttcttataattttaacactatgagctgcctatataagaaatcaagtaaccagaatgcacctataaattatggagcattgtagattttaccacatcaattcatagcagtaactttaagagggcattgtgcaatagttagttgttttcttgttcagctattttaaaggctgctttaacttgtttgtttgtctttgtatataactacttctaatctaatcactagagttattatattctgttatgtttgaccagaattatatgacaagaactggtgacagtttagtgcctctgcccattgtccatgatttacactaattgtgagcagtcttcttatgtgtcagctcattatttttgaaacatttgcctttaggctgttctttgaggtatcaatgaagtgattgaatttcaataccttaattcagtgcacataatactaatgtaacagcagatgaaaattgataaaacccaaaagagagtcatctaaatttgtagttcctatttctgtgggtttgcctggccatggttggagagggaatggtgtttgatggtaaacacagggtgtttggggatcaaggagcctagattctctccctggatctgtnnnnnnnnnnnnnnnnnnnnnnnnnnnnnnnnnnnnnnnnnnnnnnnnnnnnnnnnnnnnngcatgnnnnnnnnnnnnnnnnnnnncggggattctaatgtttgtaagtgctttgagatctttgaccaacaggtgctattggagtgcaaagtgttactcttacgtgtttattttgagtcatgagataatcaattttaacccaaagtcattggattatttatatgaagtccataatgttcgagtacctcagggacatttaagagttggaggtgcaaatatattccaaaagggtgcaacagacacagtgtatccccctgcttctgtttttgtatatttttgctacttggtttttcttgatcatagctattttgtgcttgatctttattgtctaagatgcagtatcctgtactagcttataatattcccataccaaagtcatggggaaacaaacattattttgtttttggtttatttatactatattctgcatacagtactttaaatgccaattacagtgcaatctttattattgtaaa

SEQ ID NO: 183342 - DNA, 1561 bp, Homo Sapiens
  misc_feature (195)..(255): n is a, c, g, or t
  misc_feature (261)..(280): n is a, c, g, or t
  misc_feature (907)..(916): n is a, c, g, or t
  misc_feature (1350)..(1358): n is a, c, g, or t
ttggccttaattcagtgcacataatactaatgtaacagcagatgaaaattgataaaacccaaaagagagtcatctaaatttgtagttcctatttctgtgggtttgcctggccatggttggagagggaatggtgtttgatggtaaacacagggtgtttggggatcaaggagcctagattctctccctggatctgtnnnnnnnnnnnnnnnnnnnnnnnnnnnnnnnnnnnnnnnnnnnnnnnnnnnnnnnnnnnnngcatgnnnnnnnnnnnnnnnnnnnncggggattctaatgtttgtaagtgctttgagatctttgaccaacaggtgctattggagtgcaaagtgttactcttacgtgtttattttgagtcatgagataatcaattttaacccaaagtcattggattatttatatgaagtccataatgttcgagtacctcagggacatttaagagttggaggtgcaaatatattccaaaagggtgcaacagacacagtgtatccccctgcttctgtttttgtatatttttgctacttggtttttcttgatcatagctattttgtgcttgatctttattgtctaagatgcagtatcctgtactagcttataatattcccataccaaagtcatggggaaacaaacattattttgtttttggtttatttatactatattctgcatacagtactttaaatgccaattacagtgcaatctttatttattgtaaaattttttaagtgtacttatgtactaattttcccttgtagcatgttatatttttgtgttttatacttttgtaattttaggtcagtcttgttccttggcaacatctgtagtattattaatcttctgacattttcttatgtttttaaaaagataagagcatctagtgcattaaatgccnnnnnnnnnntacattatcagtgattgaaacgtttacatgtacccaaaaaccataatcatctcttggaagaaaatgctgagatcaatgaattattctgtgtgcctatattgacgtagtgagtactagagagttctgtattttattattgactataataattagtttaattagctttgcaaactgatggcatcaaggtaaatatatttttgccaaagttctggccttccaaaactcacccccttatttaaatgtgtgctatgacccactatgaccacagcatctgcattttctaaaaaattccatgcaggtgttttggggagaggtattttttaagcaatgaaaattcaactgagtacaaagccccctcttggggggttggggaagtctcttttttgaaacacttcagaactgctgctataaagaaattctctaattggttgaannnnnnnnnaagtaaatagtactttaggccaaaatttatatgaatatttgatcttcttgagattttcatactatcatttaaccaccaggaagctgaagtgtgtgaagtacaaagctgacagcactttattttattgctctccattatttggtattcattatattccttcagtcagaaaattattactctctatggcactgttttttatcaca

SEQ ID NO: 183343 - DNA, 3416 bp, Homo Sapiens
  misc_feature (3077)..(3085): n is a, c, g, or t
ttggcgagacggcccttcgacgctgagcgcctggccagttagggattccgcgtggccaggacaacggccaatcgtcgtggagcgcggcgcctccgcggagagttcgagccgccgcccgaaaggccgggccgtcgtcttaggaggagtcgccgccgccgccacctccgccatggagctgatcaccattctcgagaagaccgtgtctcccgatcggctggagctggaagcggcgcagaagttcctggagcgtgcggccgtggagaacctgcccactttccttgtggaactgtccagagtgctggcaaatccaggaaacagtcaggttgccagagttgcagctggtctacaaatcaagaactctttgacatctaaagatccagatatcaaggcacaatatcagcagaggtggcttgctattgatgctaatgctcgacgagaagtcaagaactatgttttgcagacattgggtacagaaacttaccggcctagttctgcctcacagtgtgtggctggtattgcttgtgcagagatcccagtaaaccagtggccagaactcattcctcagctggtggccaatgtcacaaaccccaacagcacagagcacatgaaggagtcgacattggaagccatcggttatatttgccaagatatagacccagagcagctacaagataaatccaatgagattctgactgccataatccaggggatgaggaaagaagagcctagtaataatgtgaagctagctgctacgaatgcactcctgaactcattggagttcaccaaagcaaactttgataaagagtctgaaaggcactttattatgcaggtggtctgtgaagccacacagtgtccagatacgagggtacgagtggctgctttacagaatctggtgaagataatgtccttatattatcagtacatggagacatatatgggtcctgctctttttgcaatcacaatcgaagcaatgaaaagtgacattgatgaggtggctttacaagggatagaattctggtccaatgtctgtgatgaggaaatggatttggccattgaagcttcagaggcagcagaacaaggacggccccctgagcacaccagcaagttttatgcgaagggagcactacagtatctggttccaatcctcacacagacactaactaaacaggacgaaaatgatgatgacgatgactggaacccctgcaaagcagcaggggtgtgcctcatgcttctggccacctgctgtgaagatgacattgtcccacatgtcctccccttcattaaagaacacatcaagaacccagattggcggtaccgggatgcagcagtgatggcttttggttgtatcttggaaggaccagagcccagtcagctcaaaccactagttatacaggctatgcccaccctaatagaattaatgaaagaccccagtgtagttgttcgagatacagctgcatggactgtaggcagaatttgtgagctgcttcctgaagctgccatcaatgatgtctacttggctcccctgctacagtgtctgattgagggtctcagtgctgaacccagagtggcttcaaatgtgtgctgggctttctccagtctggctgaagctgcttatgaagctgcagacgttgctgatgatcaggaagaaccagctacttactgcttatcttcttcatttgaactcatagttcagaagctcctagagactacagacagacctgatggacaccagaacaacctgaggagttctgcatatgaatctctgatggaaattgtgaaaaacagtgccaaggattgttatcctgctgtccagaaaacgactttggtcatcatggaacgactgcaacaggttcttcagatggagtcacatatccagagcacatccgatagaatccagttcaatgaccttcagtctttactctgtgcaactcttcagaatgttcttcggaaagtgcaacatcaagatgctttgcagatctctgatgtggttatggcctccctgttaaggatgttccaaagcacagctgggtctgggggagtacaagaggatgccctgatggcagttagcacactggtggaagtgttgggtggtgaattcctcaagtacatggaggcctttaaacccttcctgggcattggattaaaaaattatgctgaataccaggtttgtttggcagctgtgggcttagtgggagacttgtgccgtgccctgcaatccaacatcatacctttctgtgacgaggtgatgcagctgcttctggaaaatttggggaatgagaacgtccacaggtctgtgaagccgcagattctgtcagtgtttggtgatattgcccttgctattggaggagagtttaaaaaatacttagaggttgtattgaatactcttcagcaggcctcccaagcccaggtggacaagtcagactatgacatggtggattatctgaatgagctaagggaaagctgcttggaagcctatactggaatcgtccagggattaaagggggatcaggagaacgtacacccggatgtgatgctggtacaacccagagtagaatttattctgtctttcattgaccacattgctggagatgaggatcacacagatggagtagtagcttgtgctgctggactaataggggacttatgtacagcatttgggaaggatgtactgaaattagtagaagctaggccaatgatccatgaattgttaactgaagggcggagatcgaagactaacaaagcaaaaacccttgctacatgggcaacaaaagaactgaggaaactgaagaaccaagcttgatctgttaccattgggatgataacctgaggacccccactggaaatctcccatcttttgaaaaacctggaagtgaggagtgtgcacggatgctgaatgtttgggaatgagaggatgagtgagtgaggcttgaaaacacaccacattgaaaatcctgccacagcagcagccgcagccgccaacagcagcgctgttagtgagctaagtaagcactgacttcgtagaaaaccataacatcggccatcttggaaaagagaaaaacaatggagttacttatttnnnnnnnnngaaagaaagttatctcttcccaggagaggctagaagtagcttttctgtcttttggccagtgccgagtggaatgcctggtttgggggaggaggagggactgggttcagctgtggtgctttgttgtaaaaggcagcctggcctttgctactgaggagaaagatggagcctgggtctcaagcccacctttcgctgtacctttgccacatggtactgtatgcttgccagctagaaagagggtcaaggaattttacagtctgaaaatggagtgtgtgtgaattgaggcggtatcccacattcctcaacttcaagtcaatggcagtttctttttccc

SEQ ID NO: 183344 - DNA, 865 bp, Homo Sapiens
  misc_feature (99)..(152): n is a, c, g, or t
ttggcagcagcccatttggagggaggaagtaagggaagaggagaggaaggggagccggaccgactacccagacagagccggtgaatgggtttgtggtgnnnnnnnnnnnnnnnnnnnnnnnnnnnnnnnnnnnnnnnnnnnnnnnnnnnnnncagttcgagccgccgcccgaaaggccgggccgtcgtcttaggaggagtcgccgccgccgccacctccgccatggagctgatcaccattctcgagaagaccgtgtctcccgatcggctggagctggaagcggcgcagaagttcctggagcgtgcggccgtggagaacctgcccactttccttgtggaactgtccagagtgctggcaaatccaggaaacagtcaggttgccagagttgcagctggtctacaaatcaagaactctttgacatctaaagatccagatatcaaggcacaatatcagcagaggtggcttgctattgatgctaatgctcgacgagaagtcaagaactatgttttgcagacattgggtacagaaacttaccggcctagttctgcctcacagtgtgtggctggtattgcttgtgcagagatcccagtaaaccagtggccagaactcattcctcagctggtggccaatgtcacaaaccccaacagcacagagcacatgaaggagtcgacattggaagccatcggttatatttgccaagatatagacccagagcagctacaagataaatccaatgagattctgactgccataatccaggggatgaggaaagaagagcctagtaataatgtgaagctagctgctacgaatgcactcctgaactcattggagttcaccaaagcaaacttttgataaagagtctgaa

SEQ ID NO: 183345 - DNA, 2622 bp, Homo Sapiens
gccaactttgtacaaaaaagttggcaagaatatcccaggaagatggtgatgaacagcctcagtttacttttccaccagatgaattcactagcaaaaaaattacaacaaaaatattacagcagattgaggaaccattggcactggcaagtggggctctgccagactggtgtgaacaattaaccagcaaatgtccttttctaataccatttgaaactagacagctttatttcacatgtacagcatttggcgcctcaagagcaatagtatggttacagaaccgacgtgaagccactgtggaacgaacgagaaccacaagcagtgttaggcgagatgaccctggagagtttcgagttggtcgtctcaagcatgaaagagtaaaagttccacgtggcgagtcactgatggaatgggctgagaatgtcatgcaaatacatgcagatcggaaatcagttcttgaggttgaatttttaggagaagaaggaactggcttgggacccacattagagttttatgctctggtggcagcagaattccagagaactgacttgggagcttggctttgtgatgataattttccagatgatgaatctcgtcacgttgatcttggaggtggattgaaacctcctggatattatgtgcagaggtcatgtggactgttcacagcaccatttccacaggatagtgatgagcttgaaaggatcacgaaactgtttcatttccttggaattttcttggccaaatgcattcaagacaatagacttgtggacttacctatttctaaacctttttttaaacttatgtgtatgggtgacattaaaagcaatatgagtaaactgatttatgagtcacgaggtgatagagacttacactgtactgaaagtcagtctgaagcttctacagaagaaggtcatgattcactctcggtaggaagctttgaagaggattcaaaatcagaatttattcttgatccccctaaaccaaaacccccagcttggtttaatggaattttgacttgggaagactttgaattagtaaacccacacagagccagatttttaaaagaaattaaagaccttgctatcaagaggcgccaaattttaagcaacaaaggtctttctgaagatgagaagaacacaaaattacaggaactagtgctgaagaatccatcaggttctgggcctccacttagcatagaggatttaggtttaaatttccagttttgcccttcctcaagaatatatggttttacagctgtggatctcaagccaagtggtgaagatgagatgataacaatggataatgcagaagaatatgtggatttgatgtttgacttttgtatgcatacgggtattcagaaacaaatggaagcctttagagatgggtttaataaagtttttccaatggagaaattaagttccttcagccatgaagaagtccaaatgattctttgtggaaaccagtcaccatcctgggcagcagaggatattatcaattacactgaacctaagctgggttatacacgtgacagccctggtttcctgaggtttgtgagggttttatgtggcatgtcttctgatgaaaggaaagcattcttgcagtttaccactggttgttcaactctacccccaggtggactggctaacctgcatcccaggctcacggttgtacgcaaggttgatgctactgatgcaagctatccatcagtcaatacatgtgtgcattaccttaagttgcctgaatattcttccgaggagatcatgagagagcgcctgctagctgctacaatggagaaaggctttcatctcaattgagctttgaagtgcaatgggagacatcagagactttaaaaatactagtgaagcctcttgtgtttgtgtgcagagaagtatatgatccaccatgctaatgacacttgcctttttttccaccattaaggctttaagaacatgtggaataagttttttagctgctaatgacaaaacaaatcctgtaactacccagccagcaagtatatagcacagaacactgtgttactttacaagggcttatgtgactggaataaggtggtcccacttgactgttccaaagagcagcttctcagatcttcagtgttcactggtaaatttctaacagtgtatttgtgtaaagtttgtcatttcatactccatacactacagttgctgtcactgatccctgttttgctggcttttaagctacttggtcaaaaatcctgcttccttaaaacatagagaattaatgagcatctcaagctttttcttttcctttttaatgatgcctgcactatcaagagtattctagtgttctctctttgtttggcatataatcatgcaccaaactttttatttctttaaggtgggagtatatttttatttcctaaatgccatactatgaagatcaaagtcttaagtgtgtttgcagctcaaaaataaagatgtattaaggggggaaaacctggtctaagtgcaaggcacacttacagcgagttttactttcggttgtattttctttgtatattataaacatttatttaacttgttgccgtttgaagtaaaaaatttccaaaatgtatgctcaacaataatcattaaaatgtttgcagcg

SEQ ID NO: 183346 - DNA, 914 bp, Homo Sapiens
ttggctaccaccatgctggcctcagggctgcttctggtggccttgctggcctgcctgactgtgatggtcttgatgtctgtctggcagcagaggaagagcagggggaagctgcctccgggacccaccccactgcccttcattggaaactacctccagctgaacacagagcacatatgtgactccatcatgaagttcagtgagtgctatggccccgtgttcaccattcacttggggccccggcgggtcgtggtgctgtgtggacatgatgccgtcagggaggctctggtggaccaggctgaggagttcagcgggcgaggcgagcaagccaccttcgactgggtcttcaaaggctatggcgtggcgttcagcaacggggagcgcgccaagcagctcctgcgctttgccatcgccaccctgagggacttcggggtgggcaagcgaggcatcgaggagcgcatccaggaggagtcgggcttcctcatcgaggccatccggagcacgcacggcgccaatatcgatcccaccttcttcctgagccgcacagtctccaatgtcatcagctccattgtctttggggaccgctttgactatgaggacaaagagttcctgtcactgctgagcatgatgctaggaatcttccagttcacgtcaacctccacggggcagctctatgagatgttctcttcggtgatgaaacacctgccaggaccacagcaacaggcctttaagttgctgcaagggctggaggacttcatagccaagaaggtggagcacaaccagcgcacgctggatcccaattccccacaggacttcatcgactcctttctcatccacatgcaggaggaggagaagaaccccaacacggagttctacttgaagaacctgatgatgagcacgttgaacctcttcattgc

SEQ ID NO: 183347 - DNA, 947 bp, Homo Sapiens
tacaaaaaagttggcaccatgctggcctcagggctgcttctggtggccttgctggcctgcctgactgtgatggtcttgatgtctgtctggcagcagaggaagagcagggggaagctgcctccgggacccaccccactgcccttcattggaaactacctccagctgaacacagagcacatatgtgactccatcatgaagatcagtgagcgctatggccccgtgttcaccattcacctggggccccggcgggtcgtggtgctgtgtggacatgatgccgtcagggaggctctggtggaccaggctgaggagttcagcgggcgaggcgagcaagccaccttcgactgggtcttcaaaggctatggcgtggtgttcagcaacggggagcgcgccaagcagctccggcgcttctccatcgccaccctgagggacttcggggtgggcaagcgaggcatcgaggagcgcatccaggaggaggcgggcttcctcatcgaggccatccggagcacgcacggcgccaatatcgagcccaccttcttcctgagccgcacagtctccaatgtcatcagctccattgtctttggggaccgctttgactatgaggacaaagagttcctgtcactgctgagcatgatgctaggaatcttccagttcacgtcaacctccacggggcagctctatgagatgttctcttcggtgatgaaacacctgccaggaccacagcaacaggcctttaagttgctgcaagggctggaggacttcatagccaagaaggtggagcacaaccagcgcacgctggatcccaattccccacaggacttcatcgactcctttctcatccgcatgcaggaggaggagaagaaccccaacacggagttctacttgaagaacctgatgatgagcacgttgaacctcttcattgcaagcaccgagacggtcagcaccaccct

SEQ ID NO: 183348 - DNA, 1066 bp, Homo Sapiens
tttgtacaaaaaagttggcataccatgctggcctcagggatgcttctggtggccttgctggtctgcctgactgtgatggtcttgatgtctgtttggcagcagaggaagagcaaggggaagctgcctccgggacccaccccattgcccttcattggaaactacctgcagctgaacacagagcagatgtacaactccctcatgaagatcagtgagcgctatggccccgtgttcaccattcacttggggccccggcgggtcgtggtgctgtgtggacatgatgccgtcagggaggctctggtggaccaggctgaggagttcagcgggcgaggcgagcaagccaccttcgactgggtcttcaaaggctatggcgtggtattcagcaacggggagcgcgccaagcagctccggcgcttctccatcgccaccctgcgggacttcggggtgggcaagcgaggcatcgaggagcgcatccaggaggaggcgggcttcctcatcgacgccctccggggcactggcggcgccaatatcgatcccaccttcttcctgagccgcacagtctccaatgtcatcagctccattgtctttggggaccgctttgactataaggacaaagagttcctgtcactgttgcgcatgatgctaggaatcttccagttcacgtcaacctccacggggcagctctatgagatgttctcttcggtgatgaaacacctgccaggaccacagcaacaggcctttcagttgctgcaagggctggaggacttcatagccaagaaggtggagcacaaccagcgcacgctggatcccaattccccacgggacttcattgactcctttctcatccgcatgcaggaggaggagaagaaccccaacacggagttctacttgaaaaacctggtgatgaccacgttgaacctcttcattgggggcaccgagaccgtcagcaccaccctgcgctatggcttcttgctgctcatgaagcacccagaggtggaggccaaagtccatgaggagattgacagagtgatcggcagaaccggcagcccaagtttgaggaccgggccaa

SEQ ID NO: 183349 - DNA, 1621 bp, Homo Sapiens
ttggcaccatgctggcctcagggctgcttctggtggccttgctggcctgcctgactgtgatggtcttgatgtctgtctggcagcagaggaagagcagggggaagctgcctccgggacccaccccactgcccttcattggaaactacctccagctgaacacagagcacatatgtgactccatcatgaaggtgtcccaagatcagtgagcgctatggccccgtgttcaccattcacctggggccccggcgggtcgtggtgctgtgtggacatgatgccgtcagggaggctctggtggaccaggctgaggagttcagcgggcgaggcgagcaagccaccttcgactgggtcttcaaaggctatggcgtggtgttcagcaacggggagcgcgccaagcagctccggcgcttctccatcgccaccctgagggacttcggggtgggcaagcgaggcatcgaggagcgcatccaggaggaggcgggcttcctcatcgaggccatccggagcacgcacggcgccaatatcgagcccaccttcttcctgagccgcacagtctccaatgtcatcagctccattgtctttggggaccgctttgactatgaggacaaagagttcctgtcactgctgagcatgatgctaggaatcttccagttcacgtcaacctccacggggcagctctatgagatgttctcttcggtgatgaaacacctgccaggaccacagcaacaggcctttaagttgctgcaagggctggaggacttcatagccaagaaggtggagcacaaccagcgcacgctggatcccaattccccacaggacttcatcgactcctttctcatccgcatgcaggaggaggagaagaaccccaacacggagttctacttgaagaacctgatgatgagcacgttgaacctcttcattgcaggcaccgagacggtcagcaccaccctgtgctatggcttcttgctgctcatgaagcacccagaggtggaggccaaggtccatgaggagattgacagagtgatcggcaagaaccggcagcccaagtttgaggaccggaccaagatgccctacatggaggcagtgatccacgagatccaaagatttggagacgtgatccccacgagtttggcccgcagggttaaaaaggacaccaagtttcgggattttttcctccctaagggcaccgaagtgttccctatgctgggctccgtgctgagagaccccagcttcttctccaaccctcaggacttcaatccccagcatttcctggatgacaaggggcagtttaagaagagtgatgcttttgtgcccttttccatcggaaagcggaactgtttcggagaaggcctggccagaatggagctctttctcttcttcaccaccgtcatgcagaacttccgcctcaagtcctcccagtcacctaaggacattgacgtgtcccccaaacacgtggggctttgccacgatcccacgaaactacaccatgagcttcctgccccgctgagcgagggctgtgccggtgcagtctggtgggcggggccagggaaaggcggggtcaggcggggttcgcggaagaggcgggtataagatggggggaagatgcgggaaaggaagggcgtgg

SEQ ID NO: 183350 - DNA, 1582 bp, Homo Sapiens
ttggcgccccggcccgctcaagcagcagaataaagctcataaaggcggacggcatcggggtcggggatctgcacagcgggacggcaagggccgtctggcactgaaaaccctaagcaagaaggtgagaaaagaactcagcagagtcgaccagaggcatcgcgccagccagctccgaaagcagaagaaggaggcggttctggcagagaagagacagctgggtggcaaggatggccctcctcatcaggtactggtggtgcccctgcacagcagaatttccctgccagaggccatgcagctgcttcaagatagggacactggaacagtacacttgaatgaattgggaaacacccagaactttatgctgctgtgcccccgcttgaaacatcggtggtttttcacctcagcaaggccaggggatctgcacgttgtgttagacatggctaaagtagctgataccatcctgttcctccttgatccactagaaggctgggacagcaccggtgattactgtctttcctgcctctttgctcagggccttccgacctatacactagctgtccaggggatttctggcctcccactgaagaaacaaatagataccaggaagaagctaagtaaagcagtggagaagcgctttccgcatgacaaactcctcttgttagacactcaacaggaggcagggatgctgcttaggcagttggctaaccagaagcaacagcatcttgcttttcgagatcggcgggcctacctatttgcccatgctgttgattttgttcctagtgaagagaataacttggtgggcaccttgaaaatttcaggctatgttcgagggcagactctgaatgtcaataggttgctgcatatcgttggatatggtgatttccagatgaaacagatagatgcccccggagaccctttccctttaaatcctagaggaattaaaccccaaaaggacccagacatggcaatggagatttgtgctacggatgctgtagatgatatggaagaaggtcttaaagtcctaatgaaggcagaccctggtagacaggaatccttgcaagcagaggttatcccagatccaatggagggagagcaaacctggcccactgaggaggagctgagcgaggcaaaggatttcttgaaggaaagttctaaggtggtaaagaaggtccccaaaggaacatccagttaccaagctgaatggattttggatggtggcagccaaagtggtggggaaggagatgaatatgaatatgatgatatggaacatgaggattttatggaggaggaatctcaggatgagagtagtgaagaagaggaagaatatgaaactatgactattggggagtctgtgcatgatgatctgtatgataagaaagtagatgaagaagctgaggcaaaaatgttggagaaatataaacaagaaagactggaagagatgtttccagatgaagtggacacgccccgtgatgtggctgctcgaattcgatttcagaaatacagaggcccttaagagcttccggacatctccatgggatcctaagaaaaccttcctcaagattatgctcgaatatttcagttt

SEQ ID NO: 183351 - DNA, 1892 bp, Homo Sapiens
tacaaaaaagttggcaagcttctgggtatttctattgcgcgaggcattgtgggttgctgggcggcccggtctcggagaagaggggagagtggagggccgctgaataagcttccaaaatgatgcccacaccagttatcctattgaaagaggggactgatagctcccaaggcatcccccagcttgtgagtaacatcagtgcctgccaggtgattgctgaggctgtaagaactaccctgggtccccgtggcatggacaagcttattgtagatggcagaggcaaagcaacaatttctaatgatggggccacaattctgaaacttcttgatgttgtccatcctgcagcaaagactttggtagacattgccaaatcccaagatgctgaggtgggtgatggcaccacctcagtgaccttgctggctgcagagtttctgaagcaggtgaaaccctatgtggaggaaggtttacacccccagatcatcattcgagctttccgcacagccacccagctggcagttaacaagatcaaagagattgctgtgaccgtgaagaaggcagataaagtggagcagaggaagctgctggaaaagtgtgccatgaccgctctgagctccaagctgatctcccagcagaaagctttctttgctaagatggtggtggatgcagtgatgatgctcgatgatttgctgcagcttaaaatgattggaatcaagaaggtacagggtggagccctcgaggattctcagctggtagctggtgttgcattcaagaagactttctcttacgctgggtttgaaatgcaacccaaaaagtaccacaatcccaagattgcccttttgaatgtcgagctcgagttgaaagctgagaaagacaatgctgagataagagtccacacagttgaggattatcaggcaattgttgatgctgagtggaacattctctatgacaagttagagaagatccatcattctggagccaaagttgtcttgtccaaactccccattggggatgtggccacccagtactttgctgacagggacatgttctgtgctggccgagtacctgaggaggatctgaagaggacaatgatggcctgtggaggctcaatccagaccagtgtgaatgctctgtcagcagatgtgctgggtcgatgccaggtgtttgaagagacccagattggaggcgagaggtacaatttttttactggctgccccaaggccaagacatgcaccttcattctccgtggcggcgccgagcagtttatggaggagacagagcggtccctgcatgatgccatcatgatcgtcaggagggccatcaagaatgattcagtggtggctggtggcggggccattgagatggaactctccaagtacctgcgggattactcaaggactattccaggaaaacagcagctgttgattggggcttatgccaaggccttggagattatcccacgccagctgtgtgacaatgctggctttgatgccacaaacattctcaacaagctgcgggctcggcatgcccaggggggtacatggtatggagtagacatcaacaacgaggacattgctgacaactttgaagctttcgtgtgggagccagctatggtgcggatcaatgcgctgacagcagcctctgaggctgcgtgcctgatcgtgtctgtagatgaaaccatcaagaacccccgctcgactgtggatgctcccacagcagcaggccggggccgtggtcgtggccgcccccactgagaggcaccccacccatcacatggctggctggctgctgggtgcacttaccctccttggcttggttacttcattttacaaggaaggggtagtaattggcccactctcttcttactggaggctatttaaataaaatgtaagacttcc

SEQ ID NO: 183352 - DNA, 1571 bp, Homo Sapiens
actttgtacaaaaaagttggcatactgttaatattttattgaaaatttatttcagagcggagaaacttaagctaaagtctgttatacagaattgaaagccttcgtatcttgaacctcccaacatttttcttatggctgttgaaaagtatagagctaaattgatttaattacactttcctttgtactttaaaaaaaagtatgctagcactattgtaccttgaaaggatttccaccagactgtcttgagtagtgacttctttggtgaggcaagaaggatatacattattttagaatcatttactatttaaatgagacaatcatattattttagaatcatttattttaaatgagacaatcattttaagttttaagataacagaagtgaccaatgtaatttcacaacacctaaggattttttggttgatcaggttactgtagatttttactgattgtcctggatgaatagactgtgctttttctttttctctcccttccttcttggtttcccatagtataataagcatgcatactttaacttctatagttttctcctttagagggtcgtcttcagttttagaggtttacttctcccttgcctttgactcattggactagtgcagaggctttaagtagtttaaaatgggcttttgcttttctaggtcattaacgttttttatttagtttctttagccaatagtggctgagtttcgcacttgattttcaatattttatagtaagaaatgacaaactgctttgtttcatttcataaacaaactctgcatttagataactattaaaggttgttaagatgaagatttactgtttctttgttactcgttggtacagctgtttgttttacttgcacatttgtacatatacttaatgttttcaagtgccttaattgtttaaaatctctggcttcaaagtttcttggggaaaggtcggtttacctcacattttttgtttccattagtaatattctaggtacctcacaaaatgtattatggtgccatggctgttagtttttagtgagtgctgtaggattaattcgaaaataggcagaattccattcctcccaaggtggcaaaaattagctatactgatgtaattgtcatttacctgggtatgaattccctgacacacattcatgtcaacatatgtagcaaattttgtgaaaacataacaatttgaagcttctgtaattttgagcactgctctaacaacaagcataatataaaattagttagattttgcaagtctacaaatgagctcttgcaacagaactcacagcctttttacttttttcccctaactttagcaatgtagtatcttgagccattaatttttgggtttttttaaaatccagaaggtatatagaaaccttttcagatttttcatctgatttgttcttgcagatgttcttctatcaaataccttattttaccttacagatatttgttgcacaggcagatactgctgtatttagacatttctatttcagttcattaaaaactgcaaaaccaatctgtatcatgtaccaaactgacttaaataaatctacatgtttattg

SEQ ID NO: 183353 - DNA, 1302 bp, Homo Sapiens
ctttgtacaaaaaagttggattgagaatatagagaacagtgccttagaagacagtgaaaggtaagctctagcttaatgtctatgatttgttctttgacattaaggaaggtaaggattggtcagaggatgtaacttgatgtgagcagtagtaaacctgttttagatatcatactgttaatattttattgaaaatttatttcagagcggagaaacttaagctaaagtctgttatacagaattgaaagccttcgtatcttgaacctcccaacatttttcttatggctgttgaaaagtatagagctaaattgatttaattacactttcctttgtactttaaaaaaaagtatgctagcactattgtaccttgaaaggatttccaccagactgtcttgagtagtgacttctttggtgaggcaagaaggatatacattattttagaatcatttactatttaaatgagacaatcatattattttagaatcatttattttaaatgagacaatcattttaagttttaagataacagaagtgaccaatgtaatttcacaacacctaaggattttttggttgatcaggttactgtagatttttactgattgtcctggatgaatagactgtgctttttctttttctctcccttccttcttggtttcccatagtataataagcatgcatactttaacttctatagttttctcctttagagggtcttcttcagttttagaggtttacttctcccttgcctttgactcattggactagtgcagaggctttaagtagtttaaaatgggcttttgcttttctaggtcattaacgttttttatttagtttctttagccaatagtggctgagtttcgcacttgattttcaatattttatagtaagaaatgacaaactgctttgtttcatttcataaacaaactctgcatttagataactattaaaggttgttaagatgaagatttactgtttctttgttactcgttggtacagctgtttgttttacttgcacatttgtacatatacttaatgttttcaagtgccttaattgtttaaaatctctggcttcaaagtttcttggggaaaggtcggttctaggtacctcacaaaatgtattatggtgccatggctgttagtttttagtgagtgctgtaggattaattcgaaaatacgcagaattccattcctcccaaggtggcaaaaattagctatactgatgtaattgtcatttacctgggtatgaattccctgacacacattcttgtcaacatatggagcaaattttgtgaaaacataacaatt

SEQ ID NO: 183354 - DNA, 2184 bp, Homo Sapiens
ctttgtacaaaaaagttggggggttggctgagcgttgcgagccttagctttctcccgaacgccagcgctgaggacacgatgtcgcggctctcccgctcactgctttgggccgccacctgcctgggcgtgctctgcgtgctgtccgcggacaagaacacgacccagcacccgaacgtgacgactttagcgcccatctccaacgtaacctcggcgccggtgacgtccctcccgctggtcaccactccggcaccagaaacctgtgaaggtcgaaacagctgcgtttcctgttttaatgttagcgttgttaatactacctgcttttggatagaatgtaaagatgagagctattgttcacataactcaacagttagtgattgtcaagtggggaacacgacagacttctgttccgtttccacggccactccagtgccaacagccaattctacagctaaacccacagttcagccctccccttctacaacttccaagacagttactacatcaggtacaacaaataacactgtgactccaacctcacaacctgtgcgaaagtctacctttgatgcagccagtttcattggaggaattgtcctggtcttgggtgtgcaggctgtaattttctttctttataaattctgcaaatctaaagaacgaaattaccacactctgtaaacagacccattgaattaataaggactggtgattcatttgtgtaactcactgaagccaaaatactatcttttaagatgtcccacatggaagacgctattccaggatctttaaatttccatggatgcatataggatgtttgggagcataatccgtgaagaaaaaatcaattaaatcattgtgttcaacaggaatatttaaaatattctgcatgaatcctgtggctgtcttattttaaatagctgctgctgtgggattatattttttttccttaacatgccaaatataactttctgaaagtgatggaaaatgttgtcttgtgcagacaacatcatggctcttggcagtttaaatttagtaattttaatttagtgaacagaattgagaagaacgtgccaaatgagaatcaattaggtggatttttggctgtcatttcaaaagtggaataaatttattaatttagtagtactaaatggtatccttagattaaaattttgtgcttgataacagctgttttttctacattagaaataagatgccacacaaggaactacattccagatttaaagaaatgaaaggataccattagtgtgtataacagattattgttcatacttgtaaagcaccttatgtcattgagaatataaagaacagtgccttagaagacagtgaaaggtaagctctagcttaatgtctatgatttgttctttgacattaaggaaggtaaggattggtcagaggatgtaacttgatgtgagcagtagtaaacctgttttagatatcatactgttaatattttattgaaaatttatttcagagcggagaaacttaagctaaagtctgttatacagaattgaaagccttcgtatcttgaacctcccaacatttttcttatggctgttgaaaagtatagagctaaattgatttaattacactttcctttgtactttaaaaaaaagtatgctagcactattgtaccttgaaaggatttccaccagactgtcttgagtagtgacttctttggtgaggcaagaaggatatacattattttagaatcatttactatttaaatgagacaatcatattattttagaatcatttattttaaatgagacaatcattttaagttttaagataacagaagtgaccaatgtaatttcacaacacctaaggattttttggttgatcaggttactgtagatttttactgattgtcctggatgaatagactgtgctttttctttttctctcccttccttcttggtttcccatagtataataagcatgcatactttaacttctatagttttctcctttagagggtcttcttcagttttagaggtttacttctcccttgcctttgactcattggactagtgcagaggctttaagtagtttaaaatgggcttttgcttttctaggtcattaacgttttttatttagtttctttagccaatagtggctgagtttcgcacttgattttcatattttatagtaagaaatgacaaactgctt

SEQ ID NO: 183355 - DNA, 2453 bp, Homo Sapiens
  misc_feature (2331)..(2346): n is a, c, g, or t
ttgggcacttcctttcacaggacgtgaaacgggggcggtttgggaagtttagagaccattctccgccgaccaaaacccgtcaaaggattatcagacacgcgggtcggacggtccacatcagccggcagcccgggcgggtcccggggtgcgagcagcgcacttccgtagtgcagcttcggctggtgtcatcggtgtccttcctccgctgccgcccccgcaaggcttcgccgtcatcgaggccatttccagcgacttgtcgcacgcttttctatatacttcgttccccgccaaccgcaaccattgacgccatgtcgggttattcgagtgaccgagaccgcggccgggaccgagggtttggtgcacctcgatttggaggaagtagggcagggcccttatctggaaagaagtttggaaaccctggggagaaattagttaaaaagaagtggaatcttgatgagctgcctaaatttgagaagaatttttatcaagagcaccctgatttggctaggcgcacagcacaagaggtggaaacatacagaagaagcaaggaaattacagttagaggtcacaactgcccgaagccagttctaaatttttatgaagccaatttccctgcaaatgtcatggatgttattgcaagacagaatttcactgaacccactgctattcaagctcagggatggccagttgctctaagtggattggatatggttggagtggcacagactggatctgggaaaacattgtcttatttgcttcctgccattgtccacatcaatcatcagccattcctagagagaggcgatgggcctatttgtttggtgctggcaccaactcgggaactggcccaacaggtgcagcaagtagctgctgaatattgtagagcatgtcgcttgaagtctacttgtatctacggtggtgctcctaagggaccacaaatacgtgatttggagagaggtgtggaaatctgtattgcaacacctggaagactgattgactttttagagtgtggaaaaaccaatctgagaagaacaacctaccttgtccttgatgaagcagatagaatgcttgatatgggctttgaaccccaaataaggaagattgtggatcaaataagacctgataggcaaactctaatgtggagtgcgacttggccaaaagaagtaagacagcttgctgaagatttcctgaaagactatattcatataaacattggtgcacttgaactgagtgcaaaccacaacattcttcagattgtggatgtgtgtcatgacgtagaaaaggatgaaaaacttattcgtctaatggaagagatcatgagtgagaaggagaataaaaccattgtttttgtggaaaccaaaagaagatgtgatgagcttaccagaaaaatgaggagagatgggtggcctgccatgggtatccatggtgacaagagtcaacaagagcgtgactgggttctaaatgaattcaaacatggaaaagctcctattctgattgctacagatgtggcctccagagggctagatgtggaagatgtgaaatttgtcatcaattatgactaccctaactcctcagaggattatattcatcgaattggaagaactgctcgcagtaccaaaacaggcacagcatacactttctttacacctaataacataaagcaagtgagcgaccttatctctgtgcttcgtgaagctaatcaagcaattaatcccaagttgcttcagttggtcgaagacagaggttcaggtcgttccaggggtagaggaggcatgaaggatgaccgtcgggacagatactctgcgggcaaaaggggtggatttaatacctttagagacagggaaaattatgacagaggttactctagcctgcttaaaagagattttggggcaaaaactcagaatggtgtttacagtgctgcaaattacaccaatgggagctttggaagtaattttgtgtctgctggtatacagaccagttttaggactggtaatccaacagggacttaccagaatggttatgatagcactcagcaatacggaagtaatgttccaaatatgcacaatggtatgaaccaacaggcatatgcatatcctgctactgcagctgcacctatgattggttatccaatgccaacaggatattcccaataagactttagaagtatatgtaaatgtctgtttttcataattgctctttatattgtgtgttatctgacaagatagttatttaagaaacatgggaattgcagaaatgactgcagtgcagcagtaattatggtgcactttttcgctatttaagttggatatttctctacattcctgaaacaannnnnnnnnnnnnnnngtactagaaaatgcaggcagtgttttcacaaaagtaaatgtacagtgatttgaaatacaataaatgaaggcaatgcatggccttcccataaaaaatatttgagactg

SEQ ID NO: 183356 - DNA, 1979 bp, Homo Sapiens
  misc_feature (1483)..(1501): n is a, c, g, or t
ctttgtacaaaaaagttggctaccggtctctagtagtgcagcttcggctggtgtcatcggtgtccttcctccgctgccgcccccgcaaggcttcgccgtcatcgaggccatttccagcgacttgtcgcacgcttttctatatacttcgttccccgccaaccgcaaccattgacgccatgtcgggttattcgagtgaccgagaccgcggccgggaccgagggtttggtgcacctcgatttggaggaagtagggcagggcccttatctggaaagaagtttggaaaccctggggagaaattagttaaaaagaagtggaatcttgatgagctgcctaaatttgagaagaatttttatcaagagcaccctgatttggctaggcgcacagcacaagaggtggaaacatacagaagaagcaaggaaattacagttagaggtcacaactgcccgaagccagttctaaatttttatgaagccaatttccctgcaaatgtcatggatgttattgcaagacagaatttcactgaacccactgctattcaagctcagggatggccagttgctctaagtggattggatatggttggagtggcacagactggatctgggaaaacattgtcttatttgcttcctgccattgtccacatcaatcatcagccattcctagagagaggcgatgggcctatttgtttggtgctggcaccaactcgggaactggcccaacaggtgcagcaagtagctgctgaatattgtagagcatgtcgcttgaagtctacttgtatctacggtggtgctcctaagggaccacaaatacgtgatttggagagaggtgtggaaatctgtattgcaacacctggaagactgattgactttttagagtgtggaaaaaccaatctgagaagaacaacctaccttgtccttgatgaagcagatagaatgcttgatatgggctttgaaccccaaataaggaagattgtggatcaaataagacctgataggcaaactctaatgtggagtgcgacttggccaaaagaagtaagacagcttgctgaagatttcctgaaagactatattcatataaacattggtgcacttgaactgagtgcaaaccacaacattcttcagattgtggatgtgtgtcatgacgtagaaaaggatgaaaaacttattcgtctaatggaagagatcatgagtgagaaggagaataaaaccattgtttttgtggaaaccaaaagaagatgtgatgagcttaccagaaaaatgaggagagatgggtggcctgccatgggtatccatggtgacaagagtcaacaagagcgtgactgggttctaaatgaattcaaacatggaaaagctcctattctgattgctacagatgtggcctccagagggctaggttagtacaaactcgcattcatggcttggtttcccagaagatctccatttaacttttttaaagaaagtttattgctttctttaacctgcannnnnnnnnnnnnnnnnnncacataaaggtgctgtctttgtggcaaggcctaggcatgacaatcggaggactcgagggggatggaggactagtgatcggctggctgcttccagtcgattagagaggtgaaaaagctgaacgtgtgccagtaatcttcaaaaggcagaacatatcacctctgccccgtaaactgttctctccgagggaaaaaatggaagttatcctcacagttcactgccgtggtatttcttctgtcccatgctttgcatgactgccatggtacagccttgtttcaaactgttcactgtgatctgtgggtctttgagtttcagtgagtttgctgaatgtcgaagaagtagttccaaacttcaatgttcaatgaaatttttgttcaagtttgaaatggagagagcagctttaaaggtactaagccttttacaaattggtgagtactggcacatgagatctagagcagagcaacttctcacacatagtaa

SEQ ID NO: 183357 - DNA, 1250 bp, Homo Sapiens
ttcaaagcccatatcaagcattctatctgcttcatcaaggacaaggtaggttgttctctcagattggtttttccacactctaaaaagtcaatcagtcttccaggtgttgcaatacagatttccacacctttaattaaatacgtaagtgtaactacaatactaggatatttagcaccaatgacaaataaaacccttttcattacatacctctctccaaatcacgtatttgtggtcccttaggagcaccaccgtagatacaagtagacttcaagcgacatgctctacaatattcagcagctacttgctgcacctgttgggccagttcccgagttggtgccagcaccaaacactaaggaaagagaaacagctttcagcacaaacctggatactagttttaaactgctaacttattatactagcagatcctttcttcatgtgttgtccaatacccaaaacagctccagctgaatagggtgagctaacctctatataaaaccaccacaaatgattacatctttagctatgtagtctaaaatctacacattatgcttctaataaaaagttaaaaatatatacttacaataggcccatcgcctctctctaggaatggctgatgattgatgtggacaatggcaggaagcaaatactatttagggtgaaagtggggacaaacagaaatcacattaaaatactcgtttttaaattaccattacattttcttgcatatatcagatcaactcaagagttctcccaaacttacagacaatgttttcccagatccagtctgtgccactccaaccatatccaatccacttagagcaactggccatccctgagcttgaatagcagtgggttcagtgaaattctgtcttgcaataacatccatgacatttgctataattagtaacagatatttagtaaaaattagtgatgccaagaaaaagagggggtaggtggaaacaaaaacacgggtaggtagaactgaaaagtagcacttaccagggaaattggcttcataaaaatttagaactggcttcgggcagttgtgacctctaactgtaatttccttgcttcttctgtatgtttccacctcttgtgctgtgcgcctagccaaatcagggtgctcttgataaaaattcttctcaaatttaggcagctcatcaagattccacttctttttaactaatttctccccagggtttccaaacttctttccagataagggccctgccctactccaacttttttgt

SEQ ID NO: 183358 - DNA, 1804 bp, Homo Sapiens
ttggcgatgcctgagatcagagtcacgcccttgggggccggccaggacgtgggccgaagctgcatcctggtctccattgcgggcaagaatgtcatgctggactgtggaatgcacatgggcttcaatgacgaccgacgcttccctgacttctcctacatcacccagaacggccgcctaacagacttcctggactgtgtgatcattagcgagatggtgggctacgacggccccatctacatgactcaccccacccaggccatctgccccatcttgctggaggactaccgcaagatcgccgtagacaagaagggcgaggccaacttcttcacctcccagatgatcaaagactgcatgaagaaggtggtggctgtccacctccaccagacggtccaggtagatgatgagctggagatcaaggcctactatgcaggccacgtgctgggggcagccatgttccagattaaagtgggctcagagtctgtggtctacacgggtgattataacatgaccccagaccgacacttaggagctgcctggattgacaagtgccgccccaacctgctcatcacagagtccacgtacgccacgaccatccgtgactccaagcgctgccgggagcgagacttcctgaagaaagtccacgagaccgtggagcgtggtgggaaggtgctgatacctgtgttcgcgctgggccgcgcccaggagctctgcatcctcctggagaccttctgggagcgcatgaacctgaaggtgcccatctacttctccacggggctgaccgagaaggccaaccactactacaagctgttcatcccctggaccaaccagaagatccgcaagacttttgtgcagaggaacatgtttgagttcaagcacatcaaggccttcgaccgggcttttgctgacaacccaggaccgatggttgtgtttgccacgccaggaatgctgcacgctgggcagtccctgcagatcttccggaaatgggccggaaacgaaaagaacatggtcatcatgcccggctactgcgtgcagggcaccgtcggccacaagatcctcagcgggcagcggaagctcgagatggaggggcggcaggtgctggaggtcaagatgcaggtggagtacatgtcattcagcgcacacgcggacgccaagggcatcatgcagctggtgggccaggcagagccggagagcgtgctgctggtgcatggcgaggccaagaagatggagttcctgaagcagaagatcgagcaggagctccgggtcaactgctacatgccggccaatggcgagacggtgacgctgcccacaagccccagcatccccgtaggcatctcgctggggctgctgaagcgggagatggcgcaggggctgctccctgaggccaagaagcctcggctcctgcacggcaccctgatcatgaaggacagcaacttccggctggtgtcctcagagcaagccctcaaagagctgggtctggctgagcaccagctgcgcttcacctgccgcgtgcacctgcatgacacacgcaaggagcaggagacggcattgcgcgtctacagccacctcaagagcgtcctgaaggaccactgtgtgcagcacctcccgggacggctctgtgactgtggagtccgtcctcttccaagccgccgccccttctgaggacccaggcaccaaggtgctgctgggtctcctggacctaccagacgaggagctggggagcttcctcacatctctgctgaaaagggcctccccaagcccccagctgaggccggcaactcacccagccgccactctgccctcctcc

SEQ ID NO: 183359 - DNA, 842 bp, Homo Sapiens
ttggatcaccgcacgcgggcctcgcgggtccgggagcgcggcggagacgatgcctgagatcagagtcacgcccttgggggccggccaggacgtgggccgaagctgcatcctggtctccattgcgggcaagaatgtcatgctggactgtggaatgcacatgggcttcaatgacgaccgacgcttccctgacttctcctacatcacccagaacggccgcctaacagacttcctggactgtgtgatcattagccacttccacctggaccactgcggggcactcccctacttcagcgagatggtgggctacgacggccccatctacatgactcaccccacccaggccatctgccccatcttgctggaggactaccgcaagatcgccgtagacaagaagggcgaggccaacttcttcacctcccagatgatcaaagactgcatgaagaaggtggtggctgtccacctccaccagacggtccaggtagatgatgagctggagatcaaggcctactatgcaggccacgtgctgggggcagccatgttccagattaaagtgggctcagagtctgtggtctacacgggtgattataacatgaccccagaccgacacttaggagctgcctggattgacaagtgccgccccaacctgctcatcacagagtccacgtacgccacgaccatccgtgactccaagcgctgccgggagcgagacttcctgaagaaagtccacgagaccgtggagcgtggtgggaaggtgctgatacctgtgttcgcgctgggccgcgcccaggagctctgcatccctcctggaaaccttctgggagcgcatgaacctgaaggtgccc

SEQ ID NO: 183360 - DNA, 2095 bp, Homo Sapiens
ttggcacgcgcccgccgccgccagcctctcagcgctcccatgatcgcccggtgccttttggctgtgcgaagcctccgcagagttggtggttccaggattttactcagaatgacgttaggaagagaagtgatgtctcctcttcaggcaatgtcttcctatactgtggctggcagaaatgttttaagatgggatctttcaccagagcaaattaaaacaagaactgaggagctcattgtgcagaccaaacaggtgtacgatgctgttggaatgctcggtattgaggaagtaacttacgagaactgtctgcaggcactggcagatgtagaagtaaagtatatagtggaaaggaccatgctagactttccccagcatgtatcctctgacaaagaagtacgagcagcaagtacagaagcagacaaaagactttctcgttttgatattgagatgagcatgagaggagatatatttgagagaattgttcatttacaggaaacctgtgatctggggaagataaaacctgaggccagacgatacttggaaaagtcaattaaaatggggaaaagaaatgggctccatcttcctgaacaagtacagaatgaaatcaaatcaatgaagaaaagaatgagtgagctatgtattgattttaacaaaaacctcaatgaggatgataccttccttgtattttccaaggctgaacttggtgctcttcctgatgatttcattgacagtttagaaaagacagatgatgacaagtataaaattaccttaaaatatccacactatttccctgtcatgaagaaatgttgtatccctgaaaccagaagaaggatggaaatggcttttaatacaaggtgcaaagaggaaaacaccataattttgcagcagctactcccactgcgaaccaaggtggccaaactactcggttatagcacacatgctgacttcgtccttgaaatgaacactgcaaagagcacaagccgcgtaacagcctttctagatgatttaagccagaagttaaaacccttgggtgaagcagaacgagagtttattttgaatttgaagaaaaaggaatgcaaagacaggggttttgaatatgatgggaaaatcaatgcctgggatctatattactacatgactcagacagaggaactcaagtattccatagaccaagagttcctcaaggaatacttcccaattgaggtggtcactgaaggcttgctgaacacctaccaggagttgttgggactttcatttgaacaaatgacagatgctcatgtttggaacaagagtgttacactttatactgtgaaggataaagctacaggagaagtattgggacagttctatttggacctctatccaagggaaggaaaatacaatcatgcggcctgcttcggtctccagcctggctgccttctgcctgatggaagccggatgatggcagtggctgccctcgtggtgaacttctcacagccagtggcaggtcgtccctctctcctgagacacgacgaggtgaggacttactttcatgagtttggtcacgtgatgcatcagatttgtgcacagactgattttgcacgatttagcggaacaaatgtggaaactgactttgtagaggtgccatcgcaaatgcttgaaaattgggtgtgggacgtcgattccctccgaagattgtcaaaacattataaagatggaagccctattgcagacgatctgcttgaaaaacttgttgcttctaggctggtcaacacaggtcttctgaccctgcgccagattgttttgagcaaagttgatcagtctcttcataccaacacatcgctggatgctgcaagtgaatatgccaaatactgctcagaaatattaggagttgcagctactccaggcacaaatatgccagctacctttggacatttggcagggggatacgatggccaatattatggatatctttggagtgaagtattttccatggatatgttttacagctgttttaaaaagacgggataatgaatctggagttgggatgaatacagaaacctaatcctgaaacctgggggatctctggacggcatggacatgctcacatttcttgaaa

SEQ ID NO: 183361 - DNA, 1211 bp, Homo Sapiens
ttggctgattcagccagtgagctgtcaccactgactaaagaagagaaaactgcggcagagcaattcaaatttcacatgccagatttatgaagaaatggacttggaaaggaaattctaacagagaagagcttaattccggagaaatttaggaagatgtcttgttaacccttgatgtctagagattgggggctggtgaagggggtttggcttcaatgactggataatgatatctttcttgagagagattataagaagaagggcagataatatatgaataaagttcagccaaaaggatcaaatgagaataaaacgatttaaatatatgtacacacgcatgcacacacacacttagtcttgtaatttcaggccagaaattctcaacactattttgcatctgttttctttttctaagtcatgataatatagatgttctggtctatcataaaagaatgtttatgtacatttcagtcattcggtatgtggctttgtaaattaaagtataggcaaaacatttgtgttatacatgatatataatttcattttgtaaatgttgattgcacatgtggtcacattattgttgagactgcttttatgtgacctgtagtctcccacagaacctaaagtaataagctggcttttctgtgatagccacgtttgcgtatttctttccctatttcccttgcctgctaatgttgaacagcatgaacttgctttctgatgctgttttagactgtccctgttgtatctcaataatatctttgttttccttcagcctttattactataattgttcattctacatgaaagctaggaaactgaaattagaagagcacttatctgctacttgccagttttgcgtgagtgtgttatatgtatgtgtcaatttccctttaaaataactatttattttaaaataactattggcaataaggaaactgttcaaagtagaggcagatcttgatagaaagatgttaatcacagggttgtttataatagcaatatacatacacatttggctagtactagtgaataggaaaataaatcatgctgtatgtatacaataagaggtcaagttgccaataaattattactgttaatgttctgggaaatgctgaaactatgctaagtgggggagagggaaagcaggtattgcagttttgtagtgaagattgggctttggagtcatatctgagatgtaagtagcagctttt

SEQ ID NO: 183362 - DNA, 1645 bp, Homo Sapiens
ttgggaacactgttgctcttggtggacgggcccagaggaattcagagttaaaccttgagtgcctgcgtccgtgagaattcagcatggaatgtctctactatttcctgggatttctgctcctggctgcaagattgccacttgatgccgccaaacgatttcatgatgtgctgggcaatgaaagaccttctgcttacatgagggagcacaatcaattaaatggctggtcttctgatgaaaatgactggaatgaaaaactctacccagtgtggaagcggggagacatgaggtggaaaaactcctggaagggaggccgtgtgcaggcggtcctgaccagtgactcaccagccctcgtgggctcaaatataacatttgcggtgaacctgatattccctagatgccaaaaggaagatgccaatggcaacatagtctatgagaagaactgcagaaatgaggctggtttatctgctgatccgtatgtttacaactggacagcatggtcagaggacagtgacggggaaaatggcaccggccaaagccatcataacgtcttccctgatgggaaaccttttcctcaccaccccggatggagaagatggaatttcatctacgtcttccacacacttggtcagtatttccagaaattgggacgatgttcagtgagagtttctgtgaacacagccaatgtgacacttgggcctcaactcatggaagtgactgtctacagaagacatggacgggcatatgttcccatcgcacaagtgaaagatgtgtacgtggtaacagatcagattcctgtgtttgtgactatgttccagaagaacgatcgaaattcatccgacgaaaccttcctcaaagatctccccattatgtttgatgtcctgattcatgatcctagccacttcctcaattattctaccattaactacaagtggagcttcggggataatactggcctgtttgtttccaccaatcatactgtgaatcacacgtatgtgctcaatggaaccttcagccttaacctcactgtgaaagctgcagcaccaggaccttgtccgccaccgccaccaccacccagaccttcaaaacccaccccttctttagcaactactctaaaatcttatgattcaaacaccccaggacctgctggtgacaaccccctggagctgagtaggattcctgatgaaaactgccagattaacagatatggccactttcaagccaccatcacaattgtagagggaatcttagaggttaacatcatccagatgacagacgtcctgatgccggtgccatggcctgaaagctccctaatagactttgtcgtgacctgccaagggagcattcccacggaggtctgtaccatcatttctgaccccacctgcgagatcacccagaacacagtctgcagccctgtggatgtggatgagatgtgtctgctgactgtgagacgaaccttcaatgggtctgggacgtactgtgtgaacctcaccctgggggatgacacaagcctggctctcacgagcaccctgatttctgttcctgacagagacccagcctcgcctttaagatggcaaacagtgccctgatctccgttggctgcttggccatatttgtcactgtgatctccctcttggtgtacaaaaac

SEQ ID NO: 183363 - DNA, 1310 bp, Homo Sapiens
actttgtacaaaaaagttggcatggtcagaggacagtgacggggaaaatggcaccggccaaagccatcataacgtcttccctgatgggaaaccttttcctcaccaccccggatggagaagatggaatttcatctacgtcttccacacacttggtcagtatttccagaaattgggacgatgttcagtgagagtttctgtgaacacagccaatgtgacacttgggcctcaactcatggaagtgactgtctacagaagacatggacgggcatatgttcccatcgcacaagtgaaagatgtgtacgtggtaacagatcagattcctgtgtttgtgactatgttccagaagaacgatcgaaattcatccgacgaaaccttcctcaaagatctccccattatgtttgatgtcctgattcatgatcctagccacttcctcaattattctaccattaactacaagtggagcttcggggataatactggcctgtttgtttccaccaatcatactgtgaatcacacgtatgtgctcaatggaaccttcagccttaacctcactgtgaaagctgcagcaccaggaccttgtccgccaccgccaccaccacccagaccttcaaaacccaccccttctttaggacctgctggtgacaaccccctggagctgagtaggattcctgatgaaaactgccagattaacagatatggccactttcaagccaccatcacaattgtagagggaatcttagaggttaacatcatccagatgacagacgtcctgatgccggtgccatggcctgaaagctccctaatagactttgtcgtgacctgccaagggagcattcccacggaggtctgtaccatcatttctgaccccacctgcgagatcacccagaacacagtctgcagccctgtggatgtggatgagatgtgtctgctgactgtgagacgaaccttcaatgggtctgggacgtactgtgtgaacctcaccctgggggatgacacaagcctggctctcacgagcaccctgatttctgttcctgacagagacccagcctcgcctttaaggatggcaaacagtgccctgatctccgttggctgcttggccatatttgtcactgtgatctccctcttggtgtacaaaaaacacaaggaatacaacccaatagaaaatagtcctgggaatgtggtcagaagcaaaggcctgagtgtctttctcaaccgtgcaaaagccgtgttcttcccgggaaaccaggaaaggatccgctactcaaaaaccaagaatttaaaggagtttcttaaatttcgaccttgtttct

SEQ ID NO: 183364 - DNA, 823 bp, Homo Sapiens
tttgtacaaaaaagttggctcgtaaaaccgacactaaaacgtccctgcctacaaatcatccggccaaattatgagttcattgtattatgcgaatgctttattttctaaatatccagcctcaagttcggttttcgctaccggagccttcccagaacaaacttcttgtgcgtttgcttccaacccccagcgcccgggctatggagcgggttcgggcgcttccttcgccgcctcgatgcagggcttgtaccccggcggggggggcatggcgggccagagcgcggccggcgtctacgcggccggctatgggctcgagccgagttccttcaacatgcactgcgcgccctttgagcagaacctctccggggtgtgtcccggcgactccgccaaggcggcgggcgccaaggagcagagggactcggacttggcggccgagagtaacttccggatctacccctggatgcgaagctcaggaactgaccgcaaacgaggccgccagacctacacccgctaccagaccctggagctggagaaagaatttcactacaatcgctacctgacgcggcggcggcgcatcgagatcgcgcacacgctctgcctcacggaaagacagatcaagatttggtttcagaaccggcgcatgaagtggaaaaaggagaacaagaccgcgggcccggggaccaccggccaagacagggctgaagcagaggaggaagaggaagagtgagggatggagaaagggcagaggaagagacatgagaaagggagaggaagagaagctcagctctgggaactgaatcatgaaactcaaatcgaatagggaagt

SEQ ID NO: 183365 - DNA, 1487 bp, Homo Sapiens
ttggcagcccgcgaacccaggccgggaggggggttcggcctgggggggaagggactgacatgtctctcgaagaccccttttttgtagtccgagggtgagtgacaacgacgggggagggcggagggtgctctgtacccaagccagccagtgcccgggtgccggccccagcgtgcccggcgggctgggcaaggccgtcggggtgcagagtgggaggcgcacgcaggggtatataggggtctccggagtcccccatgcgtttgggtttgcagtcgggggcagaggcaggcgggaggaccgcctgcccccagccgcgcccgccgtgcccctgcccgcagcgaggtgcagaaggcggtgaacacggcccgcgggctgtaccagcgctggtgcgagctcctgcaggaaagcgcggcggtcggacgcgaggagctggactggacgaccaatgagctgcggaatggcctgcgcagcatcgagtgggacctcgaggacctggaagagaccatcggtatagtggaagccaacccaggcaagttcaagctcccagccggggacctgcaggagagaaaggtgttcgtggagcggatgcgagaggcagtccaggaaatgaaggaccatatggtcagcccaacagccgtagcatttttggagaggaataacagagagatactcgcaggcaagccagctgcccagaagtcacccagcgacctgctggatgccagcgcagtctcggccacatctcgctacatcgaggagcagcaggccacacagcagctgatcatggatgaacaggatcaacagctggagatggtgtctgggagcatccaggttctgaagcacatgtccggccgcgttggagaagagctggacgagcagggcatcatgctggatgccttcgcccaagagatggaccacacccagtcccgcatggacggggtcctcaggaagttggccaaagtatcccacatgacgagtggtgagtcccctcaggggaggggtcagtcctggtgggggcaggttgtaggtggtaccctctccccgtgacccctgaccttctcgttcccagaccgccgacagtggtgtgccatcgccgtgctagtgggggtgcttctcctcgttctcatcttactattctctctctgaccccagccctccctggcaggctggtcccttaagcctggggagccaccaagcactttggagctggcctcgccccctaggaggagagggtccctcctgggtagctggagagtagagggtcccgcctggggagctgtccccatggctctctcctagagccagtgggacccttcggaccctgggctggaaccaccaccactggtcctgtctcaagtgcacttaggggtggtggaggcagggacacctgagacacacctgtctccattccagttccaggaccccaaagccatttgcctctgtgccttatacacgtgccaacctggaaataaaatgtcagccttttttatatg

SEQ ID NO: 183366 - DNA, 1676 bp, Homo Sapiens
  misc_feature (1436)..(1474): n is a, c, g, or t
actttgtacaaaaaagttggcccctcctccccccagcctaggagaagaagttcgtagtcccagaggtgaggcaggaggcggcagtttctggcgggtgagggcggagctgaagtgacagcggaggcggaagcaacggtcggtggggcggagaagggggctggccccaggaggaggaggaaacccttccgagaaaacagcaacaagctgagctgctgtgacagaggggaacaagatggcggcgccgaaggggagcctctgggtgaggacccaactggggctcccgccgctgctgctgctgaccatggccttggccggaggttcggggaccgcttcggctgaagcatttgactcggtcttgggtgatacggcgtcttgccaccgggcctgtcagttgacctaccccttgcacacctaccctaaggaagaggagttgtacgcatgtcagagaggttgcaggctgttttcaatttgtcagtttgtggatgatggaattgacttaaatcgaactaaattggaatgtgaatctgcatgtacagaagcatattcccaatctgatgagcaatatgcttgccatcttggttgccagaatcagctgccattcgctgaactgagacaagaacaacttatgtccctgatgccaaaaatgcacctactctttcctctaactctggtgaggtcattctggagtgacatgatggactccgcacagagcttcataacctcttcatggactttttatcttcaagccgatgacggaaaaatagttatattccagtctaagccagaaatccagtacgcaccacatttggagcaggagcctacaaatttgagagaatcatctctaagcaaaatgtcctatctgcaaatgagaaattcacaagcgcacaggaattttcttgaagatggagaaagtgatggctttttaagatgcctctctcttaactctgggtggattttaactacaactcttgtcctctcggtgatggtattgctttggatttgttgtgcaactgttgctacagctgtggagcagtatgttccctctgagaagctgagtatctatggtgacttggagtttatgaatgaacaaaagctaaacagatatccagcttcttctcttgtggttgttagatctaaaactgaagatcatgaagaagcagggcctctacctacaaaagtgaatcttgctcattctgaaatttaagcatttttcttttaaaagacaagtgtaatagacatctaaaattccactcctcatagagcttttaaaatggtttcattggatataggccttaagaaatcactataaaatgcaaataaagttactcaaatctgtgaagactgtatttgctataactttattggtattgtttttgtagtaatttaagaggtggatgtttgggattgtattattattttactaatatctgtagctnnnnnnnnnnnnnnnnnnnnnnnnnnnnnnnnnnnnnnncttagctatgagctgatcattgctccttctcacctcctgccatgatactgtcagttaccttagttaacaagctgaatatttagtagaaatgatgcttctgctcaggaatggcccacaaatctgtaatttgaaatttagcaggaaatgacctttaatgacactacattttcaggaactgaaatcattaaaattttatttgaat

SEQ ID NO: 183367 - DNA, 2546 bp, Homo Sapiens
actttgtacaaaaaagttgggtcctgccagactgccgatgttcccagtgccactgcccccggggcccctggagccgggtcctggctgtgtgaccccagggcctgcacttggcttcctggagccctccgggcctggcctcccacctggtgtgccacctctgcaggaaaggagacacttgctccaggaagccaggagcccagacccagggtgaatcctggttctttcgttggctacctggaaagaaaaagacagaagcttatttgccagatgacaagaacaaatcgattgtttgggatgaaaagaaaaaccagtgggtgaatttaaatgagccagaagaggagaagaaagccccgcccccacctccaacctcgatgcccaagactgtgcaagctgccccgcctgccctcccagggcctcctggagcccccgtgaacatgtactctagaagagcagcaggaaccagagctcgctacgttgacgtcctgaacccaagcgggacccagcggagcgagccggctctcgctcctgcggactttgtcgctccactcgcgccactcccaattccttctaacttgttcgtgccaaccccagatgcagaagaaccacagcttccagacgggactggcagggaagggcctgcagcagctaggggcctggccaatccagagcctgccccagagcccaaggttttaagctctgcagcgtcactccctggctctgaactcccctcctccaggcctgagggttcccagggaggagaggctcctggcgacctccctgctgcagggggccctcccagcggggccatgcccttctacaaccctgctcagctggcacaggcctgcgccacctccgggagctcaaggctagggaggattggccagaggaagcacctggtgctgaactaggcttgccctgctgtgaacttgcacttggagccctgacgctgctgttctccccgaagaacccgaccgacctccgcgatctccgtcccgcccccagggagacacagcagtgactcagagctggtcgcacactgtgcctccctcctcaccgcccatcgtaatgaattattttgaaaattaattccaccatcctttcagattctggatggaaagactgaatctttgactcagaattgtttgccgaaaagaatgatgtgactttcttagtcatttaggatgatttaaggatatagtattcctggtcatttaagaatgttcattcattgaagccggagctgtctctgccacaggagagccacatggtcggtagtaaccagggcctctccaagcccagctgtgagtcactgcccagtgagtcccgcgcttcctttaaggtgctgggagcaaagagagggtgactgaggcagaccccaacccctgctctgcaccatctgggccctcgccgtgtttgaacctggctgaatgagtggagggcgctgtgttctcaatcagcgcctccgaggagccgtggggttccttcggcattagttcacggtttttgagagaggccctagttactgcagtgaatttctttcctgttgcaaagacgcttccagcctcactttactttctgtggcctgatgaggaccatgggtgattttgtgtacccaaagcgctggggactgcccaccgtgtggcccagtcactgggaaggagccccagagagccggctgtctgacatgatggctcagggtggtcatccaggttgaaaactgaccgtgtgatgtttgatttgggcttcatttcgtgtgtaggagcacggttagactcactgttaaggaagctggatgcacttctctaaaaggctgcactttccgtgagcacttttcgtggtacaatccacatgacccactttctcccctgggggacgttggttcagaggttggtagcacttggggagagtatcttaacacagtttcttgacagcagctctggaacttagtatttctgccccgagttttgccacactgagactttgagtagctcctggtggactcaaccctgttcaactcagagacgggcctcctctcactgatgcaaagctttaaggcttctctgactgttctgaaactcttcgtattcttgtcaagtctaaagagactgaagaaaagatttaaatactaataaaaatcagtagataatttctgtaggttctgctggaggaatacaaactgtttggtgttttaaatttaagtgtagaaattgtagaatgtggaattagcacagatccttcctggctttctgtttcacttgatcatttagcccagaccacccaggatgttttccaaaatgttccacaggcgtgtcccgctggatccatttgtccttgtcacttggagaaaggccagtccctgtgacggggcagccctctctgtccctcggtcagctcgtgtgaatcctgagacctcttccggtcggctctgcccgctgttctggggtcgactgccacgacttttgattcaagaagcttcctccaggcggggagcggctatttttcctaaatgagaattgttacattgcaaattgttgaataaaatattt

SEQ ID NO: 183368 - DNA, 2991 bp, Homo Sapiens
ttggggaccggcgcagcgtccacagcgagcactcggcacggagcctgcacagcgcacacagcctggccagccgccgcagcagcctcagctcccactcgcaccagagtcagatttacagaagccacaatgtggctgccggttcctacgaggccccgcttcctccaggctcctttcacggcgattttgcctacggcacctaccgcagcaatttcagcagtggccccggcttcccagagtatggctaccctgccgacaccgtctggcctgccatggagcaagtttcatcaagaccaacttctcctgaaaaattttcagtgcctcatgtctgtgccaggtttggccctggcggtcagcttatcaaagtgattcccaatctgccttcagaaggacagccggccttggtggaggtccacagcatggaggccttgctgcagcacacgtctgagcaggaggagatgcgggcgttcccgggacccctggccaaagacgacacccataaggtggatgtcattaattttgcacagaacaaagctatgaaatgtttgcagaatgaaaacttaattgacaaagagtctgcaagtcttctttggaattttattgttctcttatgcagacaaaatgggaccgtggtagggaccgacattgcggagcttctgttacgagaccacagaacagtgtggcttcctgggaagtcgcccaatgaagcaaacctgattgatttcacgaatgaggcagtggagcaggtggaagaggaggagtctggtgaggcccagctctctttcctcactggtggtccggcggctgccgccagctcgctcgagagagagaccgagaggttcagggagctgttgctgtatggccgtaagaaggatgctttggagtctgcaatgaagaatggcctgtggggtcacgctctgctacttgcaagtaagatggacagccggacacacgcccgagtcatgaccaggtttgctaacagcctcccaatcaacgaccctctgcagacagtctaccagctcatgtccggacggatgcctgccgcgtccacgtgctgtggagacgagaaatggggagattggaggccgcacctcgccatggtcttgtccaacttgaacaacaacatggacgtcgagtccaggacgatggctaccatgggcgacactctggcttcaaggggcctcttggatgcggcccacttctgctacctcatggcccaggcgggatttggtgtttacacgaagaaaactacaaagcttgtcttaatcggatccaatcacagtttgccattcttaaagttcgcaaccaacgaagcaatccagaggacggaagcctatgagtacgcccagtccctgggtgccgagacctgccccctgcctagtttccaggtgtttaagttcatctactcctgccgcctggcggaaatggggctggccacgcaagccttccactactgtgaggccatcgcgaagagcatcctgacgcagccgcacctgtattccccggtgttgatcagccagcttgtgcagatggcttcccagttacgactcttcgatccccagctgaaagagaagccagaagaggagtccttggccgcacccacgtggctggttcacctgcagcaggtggagcggcagattaaggagggggctggagtatggcatcaggatggagccctcccgcagcagtgtcctggcactccgagttccgagatggagcagttggacaggccaggactcagtcagccaggagccctggggatcgccaaccctctgctggcggtgcctgcaccgagccctgagcactcgagcccgagcgtgcggctgctgccctcagctccgcagacgctccctgacggcccattggccagtcctgccagagtgccgatgttcccagtgccactgcccccggggcccctggagccgggtcctggctgtgtgaccccagggcctgcacttggcttcctggagccctccgggcctggcctcccacctggtgtgccacctctgcaggaaaggagacacttgctccaggaagccaggagcccagacccagggatagtgccgcaggaggcgcctgttggaaactcactttccgagctaagcgaagaaaattttgatggaaaatttgctaatctgaccccctcgaggacggtgccagactcggaggcccccccagggtgggatcgtgccgactcgggtcccacgcagccacctctgtctctctcacccgctcccgaaacaaagagacccggacaggcagccaagaaagaaacgaaggaacctaagaagggtgaatcctggttctttcgttggctacctggaaagaaaaagacagaagcttatttgccagatgacaagaacaaatcgattgtttgggatgaaaagaaaaaccagtgggtgaatttaaatgagccagaagaggagaagaaagccccgcccccacctccaacctcgatgcccaagactgtgcaagctgccccgcctgccctcccagggcctcctggagcccccgtgaacatgtactctagaagagcagcaggaaccagagctcgctacgttgacgtcctgaacccaagcgggacccagcggagcgagccggctctcgctcctgcggactttgtcgctccactcgcgccactcccaattccttctaacttgttcgtgccaaccccagtgagaccccagggacgttcgggacggaatgatggcctcctcgctctctcatccccagatgcagaagaaccacagcttccagacgggactggcaggggaagggcctgcagcagctaggggcctggccaatccagagcctgccccagagcccaaattttaagctctgcagcgtcactccctggctctgaactcccctcctccaggcctgagggttcccagggaggagaggctcctggcgacctccctgctgcaggagccctcccagcggggccatgcccttctacaaccctgctcagctggcacaggcctgcgccacctc

SEQ ID NO: 183369 - DNA, 1355 bp, Homo Sapiens
gaaacacaggaatttacaatttccctccgaaggcagaggaaaagcagattcacacacagttcacagaggaagtaccatgagagcccggccagacggcagccaaggacgctctgggggcaggggcggggccagcagcagaagtcaccacagtcccactggtgcttatcgtggggagcgggcaggtgtgggtggagggcagggctagcctgatctgtccaggaacctcaatcttccaggaggtgctcgaatttggggttcacaaaggagaagccagcgaatgcagactggtccatggagtcgatgaggttcttgtcgctgtaggagaggcgcgccttctcgttcaggaactcctggtcaaagttactgtagtctctgggtgacttcactttgggcctgaagggtggctccaacctccgcttttccagcagagtccagtttatggtcttgaagaaggggtggattttgatgtttcccgtcactcccagcctcttggttggttccctttcaaagagcttctccaggatgtccttggactccttggtgatccagcggggataatgtggcgtgtccacacggatggactcgaagagttcatcctcatcatcaccatggaagggggactggccaatgagcatctcgtacagaaggaccccgaaagaccaccagtccacagagaatgtgtacttcaggccctgtaggatctcaggggcgatatagtcaggggtgccgcagaaggtgctggcccggctctccccgaatatgttctctttgcacatcccaaagtcggcaatcttgatgtggccatcccggtccaacagcacattgtccagtttgaggtccctgtaaatgatgcccttgctgtgtagaaactgcagtccacacattatctcagcggcataaaacgtggcacggtagagttcaaagcggcctttgtcctggatgtggtacatcaggtcccccccgttgaggaactccatcacaaagaacaggtggtccttggtctggaaggtgcagatgaggtgggtgagaaagggattctctgcggcaagtgtcagcacccgcttctcaaccatggtgcactccacgtcgtcgtcgatcaggaccacatccttcttgagggccttgatggcaaagtactctcctctgcccttcagctctccaagcagcaccttcccgaagctgcctttgcccaggaccttgtggaagatgaagttgttgatgttgcacttgctgctgccctcccagatcttgccgtaggtcccactgttgtcttgcatgtcctccccagcaactccggtcttcttctcgaaaccctgatatatcccaacaggctctgaggaggctgagtctgccaa

SEQ ID NO: 183370 - DNA, 1734 bp, Homo Sapiens
ctttgtacaaaaaagttggggaaaaagtgctgcgatttgtacttcaattgtacatcttctatgaatttatgaaggacctacctgctttatgtgattaccttgagtactgatgataaatactagacacagctgttgtccacatcagaaataacatgcctttcccaaagacattgttaatatttgtttagcataatccataaagaacgttgaagacttttaaactaatgtattcatcactaacagtgattgttcagtgaacaaaatagaccccagctccgtggtcgtctatgaggatggtattccttgtaagtgttctgtatgagcacgtctcatagggatggggaagttttttggaaagtcacttgagttttaaagaaactggacaattccatgaataatttgaggttttattcatattgctaatgtctacaattgttctaaagagtattttaaagtagtttttttcccccagctatctttccctatgtatgcccccttttaggagatttctcaccattttgctttaacacaataattattggcctacttaatactccagtgccttgagatagttggacatattttaggaagattttattgtatttggaaaattacgacacattccatgcatggatcttttgtagttacgtgttttgattagtcctgtcactgtttttatttaaaatgcagtgtcagcaaaccgaaatgctcatttcttttttttagtaacagagtactcgtatacttatcactgtatgcactcattgggtctaagggagatgtctgaagtccttcacttaaattattttatgatactactgttttctctatttttgaggttaaaattattttaaaaaaatattttgaagagaagtttattagtataagcattcatttaatgcaaaaaaactcagcccttggacatataaccatgtaattctatatgaacgtttagagtactacatggttgaccaatatctagttctttactaaaagtaaactcacctctttatatatatttcaaaactgaatttgaagcctattagagaccaactgaccttttagttgtaatgaactgtatggtcttgcatggtgacacacctgtgtaggaggccaagacttggcagaggatgtagtctaggtgtcctggtatatataaatggtcactcacttcgtttatatattccacactcagaaaagaagtcagagttttttctgagtaatacaaaaaccatcacttacataatttgtataagaaactttaaacagttttaatcaaaactatgagtaacatcaaaaatgctttaagattctatattttggaatacctgtgaagtagtatgactacatcatgttaaatatttattttcttctatgattttggagcagcaatttttattttaaataaaattccacttttaagaaattcagggaagatttggtcacattgaagatacagtatttttgtagtatttataaactgttctaattgatagactatagaaaacatttttgtcatatgaaggtaaatcagtccattattttggatcatttaaactgaacattacaccttctgggctttgatttatgaagtggcacagaatctaactttgcactgaatatcttttcattcacatctcctctgccttagtcacaatggcaacagtacagaaaattctatcaaacctcagatatagtagaaataattaagctgttgaatgagtcttaaaaatt

SEQ ID NO: 183371 - DNA, 907 bp, Homo Sapiens
ttggggaagaacaaaatctggcctgaaataaaagtgccaagacccgacgcattagacaatgagagctggggctttgtgcaccctcggttgctcagcgtgcccgagctctgccaccatgtagctgaagtctgggttagtgggaccattttcataaggaatgttttgcttttcaaaaagcaaaacccaggcaagttctgcttgctgagctgtgggatactgacctttttggctgtcttgggccgctacgtccctgggcttctgctgtcctacttgatgcttgtcactgtcatgatgtggccccttgctgtgtaccaccgactgtgggatcgagcatatgtgcggctgaagccagctctgcagcggctagacttcagtgtccgtggctacatgatgtccaagcagagagagagacaattacgccgcagagctctccacccagaacgagccatggacaaccacagtgacagcgaagaggagcttgctgccttctgtcctcagctggacgattctactgttgccagggaattggccatcacagactctgagcactcagacgctgaagtctcctgtacagacaatggcacattcaatctttcaaggggccaaacacctctaacggaaggctctgaagacctagatggtcacagtgatccagaggaatcctttgccagagaccttccagacttcccttccattaatatggatcctgctggcctggatgatgaggacgacactagcattggcatgcccagcttgatgtaccgttctccgccaggggctgaggagccccaggccccacctgccagccgggacgaggctgcgctgccggagctcctgcttggtgctcttcctgtaggatccaacctcaccagcaaccttgccagcctggtctcccagggtatgattc

SEQ ID NO: 183372 - DNA, 1017 bp, Homo Sapiens
ttggggcggaaaggatggcgctgtgacagccgggccggagccctcgcgtccccaccccgcgccctggccgctgggcccggcgagatggagtccacagcctaccctctcaatttgagcctgaaagaagaggaagaggaagaagagattcagagccgggaactagaggacggcccggcagacatgcagaaagtacgaatctgctctgagggcggatgggtaccggccctatttgatgaggtggccatatatttttccgatgaggaatgggaagttttgacggagcaacaaaaggccctctaccgggaagtcatgaggatgaattatgaaactgtcctgtccctggaattcccattccctaagccagacatgatcacccgtttggaaggggaggaggagtctcagaattctgacgagtggcagctccaaggaggcacctctgcagaaaatgaagaatctgacgtaaagcctccagactggccaaacccaatgaatgctacctcccagtttcctcagcctcagcactttgacagctttggcctccgtctgcctcgggatatcacagagctgcccgagtggagtgaggggtaccccttctacatggccatgggcttcccagggtatgacctctcggctgatgacatagctgggaagtttcagttcagccggggcatgcgccgcagttacgacgcagggttcaagctgatggtagtggaatatgctgagagtaccaacaactgccaggctgccaagcagtttggagtattggaaaaaaacgttcgagactggcgcaaagtgaagccacagcttcaaaacgcccacgccatgcggcgggcattccgaggccccaagaatgggaggtttgctctggtggaccagcgtgtggccgaatatgtcagatacatgcaggccaaaggggaccccatcacccgggaggcgatgcagctgaaagctctcgaaatcgcccaggaatgaacattccagagaaagggttcaaggcaagcttgggttggtgtcgaa

SEQ ID NO: 183373 - DNA, 3700 bp, Homo Sapiens
  misc_feature (1408)..(1438): n is a, c, g, or t
  misc_feature (1541)..(1554): n is a, c, g, or t
actttgtacaaaaaagttggctttgaaagtgatgaagtagaactctcgtatgctaagaatggacaagatcttggcgttgccttcaaaatcagtaaggaagttcttgctggacggccactgttcccgcatgttctctgccacaactgtgcagttgaatttaattttggtcagaaggaaaagccatattttccaatacctgaagagtatactttcatccagaacgtccccttagaggatcgagttagaggaccaaaggggcctgaagagaagaaagattgtgaagttgtgatgatgattggcttgccaggagctggaaaaactacctgggttactaaacatgcagcagaaaatccagggaaatataacattcttggcacaaatactattatggataagatgatggtggcaggttttaagaagcaaatggcagatactggaaaactgaacacactgttgcagagagccccccagtgtcttgggaaatttattgagattgctgcccgaaagaagcgaaattttattctggatcagacaaatgtgtctgctgctgcccagaggagaaaaatgtgcctgtttgcaggcttccagcgaaaagctgttgtagtttgcccaaaagatgaagactataagcaaagaacacagaagaaagcagaagtagaggggaaagacctaccagaacatgcggtcctcaaaatgaaaggaaactttaccctcccagaggtagctgagtgctttgatgaaataacctatgttgaacttcagaaggaagaagcccaaaaactcttggagcaatataaggaagaaagcaaaaaggctcttccaccagaaaagaaacagaacactggctcaaagaaaagcaataaaaataagagtggcaagaaccagtttaacagaggtggtggccatagaggacgtggaggattcaatatgcgtggtggaaatttcagaggaggagcccctgggaatcgtggcggatataataggaggggcaacatgccacagagaggtggtggcggtggaggaagtggtggaatcggctatccataccctcgtgcccctgtttttcctggccgtggtagttactcaaacagagggaactacaacagaggtggaatgcccaacagagggaactacaaccagaacttcagaggacgaggaaacaatcgtggctacaaaaatcaatctcagggctacaaccagtggcagcagggtcaattctggggtcagaagccatggagtcagcattatcaccaaggatattattgaatacccaaataaaacgaactgatacatatttctccaaaaccttcacaagaagtcgactgttttctttagtaggctaactttttaaacattccacaagaggaagtgcctgcgggttccttttttagaagctttgtgggttgannnnnnnnnnnnnnnnnnnnnnnnnnnnnnnaattgcagtttaaaagtgaatcgtaagagaacctcagcattgtgcacgataagagaatgtgtcagtatttcagggttctacattttatctgtaaaatgtgacnnnnnnnnnnnnnnatcacaacagaagtaaaatgttgctttgtacctggtgtcttttattaagaatttactccccccatttctcacagagaataacagtcgggagtcattgtcacaatataatagaaatgttagcaaccagattcatgtaaggactaagtggtcctcatgaattgcattaagactctgtactgctcatattacactccatcctctctgtagtttgctgggtagtggagggggtaagctaaatcatagtttctgacaataactgggaaggttttttcttaaaataacaatggaattggtataattgggattgaaaactaaaacttggaactaagatagagaagatggagtgtatgtagaagggctgttaaaaatgtaaaacttggttgcattatttgtggaggctcaaacttgtgaaggttaataccataatttttccatttgttctgcattttgattctgaaaagaaagctggctttgcccatttcttattaaaaaaacttgttgtaaatccagttgtctaatgggatctatatgaagttagccatgtctgtatgcccttctcccacaaaatactgtataactagtgtgcttgtagtagttaactccaccatctttgtaagctaatgaaattgtgagtcacccatttatatcttaatttttaatcatgtcagttcttgaatgggtatctccttagcctgctgatttctttttctttctaaagaaagtgggtggagaaattaatttagacgtttgtttgcaataaaaagaattcattttactcttgttttgggattctcgccatcaaggttcaaaatccctttatataactcccaagaggagaaatttattaagtgtgtgctttctggacagcttattctttactctgcatagaacatttaggttttaaaaacttaaatgtatactgacaattgatacataattatgaagtaaagttgaattcttcccttcccctcccccccagacaacttttaacatatttaatgaggggaaaaggtactggctgggagaagttaacactgagtttatcatctttacagaatgctaatgctgtcctcaactgattattttatatacatatatatgatacatgaaactctgggatcagatgcttttagaagccatcatgcaagccagtcattgatgtcactgctacacaacactgctaacttgactgtagctatgtaataacattagatcccctaattgtaattatattgggttggcacagaacactttaatcttcccctcaccaatgtgaagtgaggaatcaggagtcaaactgtagaactaaaatttgacttcagtctagcgtttccttggtgtttttaggttgctttggtaagtttaggtttgctatatttctgattgcttagaattttgttttagccctttaaaatcagatcataaatatgaattcatacttctaaggaattttcttgctataagctggagtttaggtgatgtataggttcagttgagacatttttggaacaggcaaatccttagttaacataagatatttaacagttgaagatagtgtcatggatttttatcttttttagcaagtaatgctaagaaccactggcctgagctactactcttcagtatacattattaggattgcatagacttactagaggaacagtttcaggttttgatgctaatcagtgttgtgtcctaaagttgtcctttgtgcctttaaaaagttttggatatatcttctagtttaaaattgcttattaaggaattcattttataattgcagtgggaaagtaatggtcaagtaacactaggtagactatcatgcctgtttagcccagagaatttggggggagagagaatagataaaaatggcacccagaaaaatgttaaaatctttagtcaagactagaattaatacaattgtctacacttgtatggcagaaataaccttataaagtgtttaaggaattcagagaagggaatgtaccaaataagcaacagggagaaaattaggtaagaagtaagatacgaacgagaaacctgatttattgctcatccttcccttgcctccctaatggcaagcaaaactctgaacatctgaaaaggatgtagttctggacaaatcctgactacccagaggaaactc

SEQ ID NO: 183374 - DNA, 1625 bp, Homo Sapiens
  misc_feature (953)..(1007): n is a, c, g, or t
  misc_feature (1110)..(1123): n is a, c, g, or t
tttgtacaaaaaagttggcactgttgcagagagccccccagtgtcttgggaaatttattgagattgctgcccgaaagaagcgaaattttattctggatcagacaaatgtgtctgctgctgcccagaggagaaaaatgtgcctgtttgcaggcttccagcgaaaagctgttgtagtttgcccaaaagatgaagactataagcaaagaacacagaagaaagcagaagtagaggggaaagacctaccagaacatgcggtcctcaaaatgaaaggaaactttaccctcccagaggtagctgagtgctttgatgaaataacctatgttgaacttcagaaggaagaagcccaaaaactcttggagcaatataaggaagaaagcaaaaaggctcttccaccagaaaagaaacagaacactggctcaaagaaaagcaataaaaataagagtggcaagaaccagtttaacagaggtggtggccatagaggacgtggaggattcaatatgcgtggtggaaatttcagaggaggagcccctgggaatcgtggcggatataataggaggggcaacatgccacagagaggtggtggcggtggaggaagtggtggaatcggctatccataccctcgtgcccctgtttttcctggccgtggtagttactcaaacagagggaactacaacagaggtggaatgcccaacagagggaactacaaccagaacttcagaggacgaggaaacaatcgtggctacaaaaatcaatctcagggctacaaccagtggcagcagggtcaattctggggtcagaagccatggagtcagcattatcaccaaggatattattgaatacccaaataaaacgaactgatacatatttctccaaaaccttcacaagaagtcgactgttttctttagtaggctaactttttaaacattccacaagaggaagtgcctgcgggttcnnnnnnnnnnnnnnnnnnnnnnnnnnnnnnnnnnnnnnnnnnnnnnnnnnnnnnnaattgcagtttaaaagtgaatcgtaagagaacctcagcattgtgcacgataagagaatgtgtcagtatttcagggttctacattttatctgtaaaatgtgacnnnnnnnnnnnnnnatcacaacagaagtaaaatgttgctttgtacctggtgtcttttattaagaatttactccccccatttctcacagagaataacagtcgggagtcattgtcacaatataatagaaatgttagcaaccagattcatgtaaggactaagtggtcctcatgaattgcattaagactctgtactgctcatattacactccatcctctctgtagtttgctgggtagtggagggggtaagctaaatcatagtttctgacaataactgggaaggttttttcttaaaataacaatggaattggtataattgggattgaaaactaaaacttggaactaagatagagaagatggagtgtatgtagaagggctgttaaaaatgtaaaacttggttgcattatttgtggaggctcaaacttgtgaaggtaataccataatttttccatttgttctgcattttgattctgaaaagaagctggctttgcccatttcttattaaaaaaacttgttgtaa

SEQ ID NO: 183375 - DNA, 927 bp, Homo Sapiens
  misc_feature (215)..(239): n is a, c, g, or t
aaaacagcgacaatacatttatcatgaagatgcagaggagatccacatgacacaccaagcacaattccttgcatttagtagatgctcagaaaatattagccattattattatttatactacacccaacccaaacacagttagtcctgtagttgctctcaggcacttgatattcgctcccaggaaaacccgtgcctcttctgccttgtgtagaatnnnnnnnnnnnnnnnnnnnnnnnnncagcacactcccgctaaccaagaggtgagtggtggaggacccacacacacctgctcgctgaggcacggcgaatggccactaccggcctggacctcctccttcccccagcactccactcagggaaaatcaattccatcaaaaacaattgattttaccacctacaaatgggcaacatctacactccagtctcttcccactcacagactgtgcctcctataagcctggtatctcagaactctgagagtgggcttccccatggataccagggctcccaggccgggccactttacctaagtaggtgttgtccttctcatacagagctataatctcctgccaatccttcatccgctgtgaagagtatcggccaaaaatattcttcgtggaggcctctgtgcctttgagaaggtccaggattcttaggcagtgaaagtagtgaatgtaggacccagacagcagctgggcgatctcttcgctctctggcatgtcctggatggcagcattgatcttctcgcggatcgtcagcaccagactctgccatttcaggctgcagtgccttctgtccaccagccaatcgagcagcttgctggtctggatgtcgatgggcacgtgctgatggtcctccatctttcctccacttccgcttcaggctggagactgtggcccgccccgccctaccaccaatccccaa

SEQ ID NO: 183376 - DNA, 1085 bp, Homo Sapiens
  misc_feature (218)..(242): n is a, c, g, or t
aaaacagcgacaataacatttatcatgaaagatgcaagagagaatccacatgacacaccaagcacaatttcttgcatttagtagatgctcaggaaatattagccattattattatttatactacacccaacccaaacacagttagtcctgtagttgctctcaggcacttgatattcgctcccaggaaagcccgtgcctcttctgccttgtgtagaatnnnnnnnnnnnnnnnnnnnnnnnnncagcacactcccgctaaccaagaggtgagtggtggaggacccacacacacctgctcgctgaggcacggcgaatggccactaccggcctggacctcctccttcccccagcactccactcagggaaaatcaattccatcaaaaacaattgattttaccacctacaaatgggcaacatctacactccagtctcttcccactcacagactgtgcctcctataagcctggtatctcagaactctgagagtgggcttccccatggataccagggctcccaggccgggccactttacctaagtaggtgttgtccttctcatacagagctataatctcctgccaatccttcatccgctgtgaagagtatcggccaaaaatattcttcgtggaggcctctgtgcctttgagaaggtccaggattcttaggcagtgaaagtagtgaatgtaggacccagacagcagctgggcgatctcttcgctctctggcatgtcctggatggcagcattgatcttctcgcggatcgtcagcaccagactctgccatttcaggctgcagtgccttctgtccaccagccaatcgagcagcttgctggtctggatgtcgatgggcacgtgctgatggtcctggcgggaaacacggtgaggaggggggcgtgagcgcggagagaggacgtaccactcgcgcgctcatttcaacgtcccaaccaccaccctgcagggccagaacggggccagagcgatgggctgggttgagccgctcccggagggagaccggagacacaggttaggggtccgcggccagtccccagcacacccagctcctgtccccacacctccatctttccccaa

SEQ ID NO: 183377 - DNA, 1792 bp, Homo Sapiens
  misc_feature (686)..(710): n is a, c, g, or t
ttgggtggaggaaagatggaggaccatcagcacgtgcccatcgacatccagaccagcaagctgctcgattggctggtggacagaaggcactgcagcctgaaatggcagagtctggtgctgacgatccgcgagaagatcaatgctgccatccaggacatgccagagagcgaagagatcgcccagctgctgtctgggtcctgtgagtgcttaggggctgtcactggagtcccctctttgctgaggtaacattcactactttcactgcctaagaatcctggaccttctcaaaggcacagaggcctccacgaagaatatttttggccgatactcttcacagcggatgaaggattggcaggagattatagctctgtatgagaaggacaacacctacttaggtaaagtggcccggcctgggagccctggtatccatggggaagcccactctcagagttctgagataccaggcttataggaggcacagtctgtgagtgagaagagactggagtgtagatgttgcccatttgtaggtggtaaaatcaattgtttttgatggaattgattttccctgagtggagtgctgggggaaggaggaggtccaggccggtagtggccattcgccgtgcctcagcgagcaggtgtgtgtgggtcctccaccactcacctcttggttagcgggagtgtgctgnnnnnnnnnnnnnnnnnnnnnnnnnattctacacaaggcagaagaggcacgggttttcctgggagcgaatatcaagtgcctgagagcaactacaggactaactgtgtttgggttgggtgtagtataaataataataatggctaatatttcctgagcatctactaaatgcaaggaattgtgcttggtgtgtcatgtggattctctcttgcatcttcatgataaatgttattgtcgctgttttaccgatgagggttggattagaggggttaaacaacttgtcttaggctccacagctgggaacaagtggggctgggaagctgacttcgtgctcttcaccaccacaaaggatgtgtgtgcatcctggggcatgcctgcctcatgtgggggtgtcctgggctgaatttcctgggcacttctcagtggaactctctagcctcctggttcggaatgtcaactatgagatcccctcactgaagaagcagattgccaagtgccagcagctgcagcaagaatacagccgcaaggaggaggagtgccaggcaggggctgccgagatgcgggagcagttctaccactcctgcaagcagtatggcatcacgggcgaaaatgtccgaggagaactgctggccctggtgaaggacctgccgagtcagctggctgagattggggcagcggctcagcagtccctgggggaagccattgacgtgtaccaggcgtctgtgggccccacagagcaggtgttgccaatgctgcggttcgtgcagaagcggggaaactcaacggtgtacgagtggaggacagggacagagccctctgtggtggaacgaccccacctcgaggagcttcctgagcaggtggcagaagatgcgattgactggggcgactttggggtagaggcagtgtctgaggggactgactctggcatctctgccgaggctgctggaatcgactggggcatcttccccggaatcagattcaaaggatcctggaggtgatgggatagactggggagacgatgctgttgcttttgcagatcacagtgctgaaagcaggaacccaggctccagaaagttgttgccaggggcccagatgccctgacactgcttg

SEQ ID NO: 183378 - DNA, 1944 bp, Homo Sapiens
  misc_feature (108)..(132): n is a, c, g, or t
ttggggaaggaggaggtccaggccggtagtggccattcgccgtgcctcagcgagcaggtgtgtgtgggtcctccaccactcacctcttggttagcgggagtgtgctgnnnnnnnnnnnnnnnnnnnnnnnnnattctacacaaggcagaagaggcacgggttttcctgggagcgaatatcaagtgcctgagagcaactacaggactaactgtgtttgggttgggtgtagtataaataataataatggctaatatttcctgagcatctactaaatgcaaggaattgtgcttggtgtgtcatgtggattctctcttgcatcttcatgataaatgttattgtcgctgttttaccgatgagggttggattagaggggttaaacaacttgtcttaggctccacagctgggaacaagtggggctgggaagctgacttcgtgctcttcaccaccacaaaggatgtgtgtgcatcctggggcatgcctgcctcatgtgggggtgtcctgggctgaatttcctgggcacttctcagtggaactctctagcctcctggttcggaatgtcaactatgagatcccctcactgaagaagcagattgccaagtgccagcagctgcagcaagaatacagccgcaaggaggaggagtgccaggcaggggctgccgagatgcgggagcagttctaccactcctgcaagcagtatggcatcacgggcgaaaatgtccgaggagaactgctggccctggtgaaggacctgccgagtcagctggctgagattggggcagcggctcagcagtccctgggggaagccattgacgtgtaccaggcgtctgtggggtttgtgtgtgagaggtagagaggcctcagcttctcctggtgggggtgctttgcctgtgttccccagctcatgacccttctccagttgtcttgttcccatataacatttgaactctttacacacctgaacctgtgggggccttgcccatttgaccatgtggcccaggccaaagcccagtgttggccttacgcatggtcggcaggagagtcagttgtgtgctctgttgaagccccacagagcaggtgttgccaatgctgcggttcgtgcagaagcggggaaactcaacggtgtacgagtggaggacagggacagagccctctgtggtggaacgaccccacctcgaggagcttcctgagcaggtggcagaagatgcgattgactggggcgactttggggtagaggcagtgtctgaggggactgactctggcatctctgccgaggctgctggaatcgactggggcatcttcccggaatcagattcaaaggatcctggaggtgatgggatagactggggagacgatgctgttgctttgcagatcacagtgctggaagcaggaacccaggctccagaaggtgttgccaggggcccagatgccctgacactgcttgaatacactgagacccggaatcagttccttgatgagctcatggagcttgagatcttcttagcccagagagcagtggagttgagtgaggaggcagatgtcctgtctgtgagccagttccagctggctccagccatcctgcagggccagaccaaagagaagatggttaccatggtgtcagtgctggaggatctgattggcaagcttaccagtcttcagctgcaacacctgtttatgatcctggcctcaccaaggtatgtggaccgagtgactgaattcctccagcaaaagctgaagcagtcccagctgctggctttgaagaaagagctgatggtgcagaagcagcaggaggcacttgaggagcaagcggctctggagcctaagctggacctgctactggagaagaccaagagctgcagaagctgattgaagctgacatctccaagactacagcgggcgccctgtgaacctgatgggaacctctctgtgacaccctccgtgttcttg

SEQ ID NO: 183379 - DNA, 2712 bp, Homo Sapiens
  misc_feature (2523)..(2531): n is a, c, g, or t
ctttgtacaaaaaagttggctcagcgcggtccggccccggaggctctcggcgagcgcggcgcggtaacaagtgggcgaggatgccgtacgagatcaagaaggtgttcgccagcctcccgcaggtggagaggggcgtctccaagatcatcggcggcgaccctaagggcaacaattttctgtacaccaatggaaagtgcgtcatcctaaggaacatcgacaacccagcccttgctgacatctacacagagcacgcccatcaggtggtggtggccaagtatgcgcccagcggattctacattgcctccggagatgtgtctgggaagctgaggatctgggataccacgcagaaggagcacctgttgaagtatgagtaccagcctttcgctgggaagatcaaagacattgcttggactgaagacagtaagaggatcgccgtggtcggggaaggaagggagaagtttggagcagtcttcctctgggatagtggctcttctgtgggcgagattacaggacacaacaaagtcatcaacagcgtggacatcaagcagagccggccataccggctggccacgggaagcgatgataactgcgcggcattctttgagggacccccattcaagttcaagttcacagttggcgaccacagccgctttgtcaactgtgtgcgattctctcctgatgggaacagatttgccacagccagtgctgacggccagatatacatctatgacgggaagactggggagaaggtgtgcgcgctgggcggaagcaaggcccacgacggtgggatttacgcaattagttggagtcccgacagcacccatttgctttctgcttctggggacaaaacttccaagatttgggacgtcagcgtgaactccgtggtcagcacatttcccatgggctccacggttctggaccagcagctgggctgcctatggcagaaggaccacctgctcagtgtctccctgtccgggtacatcaactatctggacagaaacaaccccagcaagcccctgcacgtcatcaagggtcacagtaaatcgatccagtgtctgacggtgcataaaaacggcggcaagtcctacatttactctgggagccacgacggacacattaattactgggattcagagacgggggagaacgactccttcgctgggaaaggccacacgaaccaggtgtccaggatgaccgtggatgagtcggggcagctcatcagctgcagcatggacgacaccgtgcggtacaccagcctcatgctgcgggactacagcggacaaggagttgtgaaactggacgttcagccaaagtgcgtagccgtcggccccgggggatacgccgtggtcgtgtgcattggacagattgtcctgctgaaggatcagaggaagtgcttcagcatcgacaaccccggctacgagcccgaagttgtggcagtgcaccccggcggggacacggtggcaattgggggtgtggacggcaacgtccgcctgtattccatcctgggcaccacgctgaaggatgagggcaagctcctagaggccaagggccccgtgaccgacgtggcctactcccacgacggcgccttcctcgcggtgtgcgacgccagcaaggtggtcacagtgttcagcgttgctgacggctactcggagaacaatgttttttatggacaccatgcaaaaatcgtctgcctggcctggtccccagacaatgaacactttgcctccggtggcatggacatgatggtgtatgtttggaccctgagtgacccggaaaccagagtcaagatccaagatgcacaccggctgcaccatgtcagcagcctggcctggctggacgagcacacgctggtcacgacctcccatgatgcctctgtcaaggagtggacaatcacctactgaggagccccacccccgcctctggatggaccgaatcagggactagagtttaactgcagcggaacatgtcatttctctatttctgtgacgcgcccccatgcccccaccccaccacaagaggcaggagggcccagtcatgaccctcgtctctgcagggtgtctgtacacgttcttctgaaagctttagacagtaacagtttgcacatgaaaaataaagcgagcacctaaacaatgtgtggagcataactaaaacccacagcccaaccaaaccttgagaatgcgaaacattccagaggcagtagcctccaaagcacacagagcccctggccccgccgcggctctcactatctgtcaggggaggttgtacaggtgaatgagccggggggctcatgttcctgcctgcagaacatttctgtactagtgagaagagggaatatgcattgcagttcagcaaagccggaattctgtgttgaacagatgtctgtctccctagtgtgtgactcacaccttgtggctgccttcagagcgccacctccagatcagatggggacacacaacccctggatatgtttcattgtcagattttgtgcttgattttaagaatggaattgtgggtatctttccnnnnnnnnnaatgtatcttaactgttgcctgtcagtgtttacaaactagtgcgttgacggcaccgtgtccaagtttttagaacccttgttagccagaccgaggtgtcctggtcaccgtttcaccatcatgctttgatgttcccctgtctttccctcttctgctctcaagagcaaaggttaatttaaggga

SEQ ID NO: 183380 - DNA, 1512 bp, Homo Sapiens
  misc_feature (355)..(432): n is a, c, g, or t
  misc_feature (1221)..(1234): n is a, c, g, or t
ggagacattcttgacgcaggttctagaggcctcccaattcaggccacatgtacctccagatactatgtggctggctgcctctgcatttttggcaatctcagttccaaatatttctatcatgttgtcatgccagcttttggcttgggaaatatggtcagtatgtctgtggggaaactgattctgtgtgccggccgcagaggaaggactctgggctggaggaaaggggtagggctcagcgccagtgctaggactggttgaactgtagggtgcagccctggctagtgaccacaccccatgtccagctgttgctcacagctgtccccaccaccaccctgtgcagcaggggttaacagannnnnnnnnnnnnnnnnnnnnnnnnnnnnnnnnnnnnnnnnnnnnnnnnnnnnnnnnnnnnnnnnnnnnnnnnnnnnntgggactccatgttggcccccccctgcactacctctgtggacaggtcactgccctccttgcccttggtctctctctcagagggaaaagacggagcagctgactgacaggaccccgaggtcctgggtctgaaagaacagaccaccttcgcagagcaagttgttaaatgccaggacgtgagacagcgtgcaagggtgttagtcacgggacgggggacagaggagccccaaaccctgggggacatgtgagcaggagggttgttcggtacctagagtgaggctgcgactgaagggggctcttagcttcggggctctttgccacagacggggttctggacagaatcgaggacacaggcttctccaccgagttgctccgctcccagggcttccggccagcctctgaggagttaggtggctggctggctgctcgggtccccggagagggggaggtactaggatcttccatttggctttcatcttccttcttctcggctggcttgtctgactgggaggctgcttttctcctcttggccagcagtttgttcatttcctccatgaggcctcctccgccacccccgctgcttgcccggttggcatcggactttgaggtcccactgggactggagcctccagatgcgtcttctggccgttggactcttctcagcttggccccagctatggcagcggccagtcctgacatggagctctcgtcgtggctggacccctgggctcctccggctggcagtgggggtgggggaggtggggtagccccagtgggtggaggtgggactnnnnnnnnnnnnnncggtggaggcccactacatgagacgggggcgctggctgcagatgaaggatgtcctggtgggaggatgggccctgtggccgaggttcttctttctagagattcctgacgctgctgctggtgctgctccatcacttgtcttctctggatgtccatctcatcaggagaggggccattctgcacctgacgctggctggaggggcctccttcttgggaattcatgatgttcagggcaaacagcattgcattggagaacgtggtccaacttttttgtacaaagt

SEQ ID NO: 183381 - DNA, 1138 bp, Homo Sapiens
ttggggaagacgcaagaggaagaagagaaaacggccgggcggcggtggctgtaggttgtgcggctgcagcggctcttccctgggcggacgatggacagccagggcaggaaggtggtggtgtgcgacaacggcaccgggtttgtgaagtgtggatatgcaggctctaactttccagaacacatcttcccagctttggttggagacctattatcagatcaaccaccaaagtgggaaacattgaaatcaaggatcttatggttggtgatgaggcaagtgaattacgatcaatgttagaagttaactaccctatggaaaatggcatagtacgaaattgggatgacatgaaacacctgtgggactacacatttggaccagagaaacttaatatagataccagaaattgtaaaatcttactcacagaacctcctatgaacccaaccaaaaacagagagaagattgtagaggtaatgtttgaaacttaccagttttccggtgtatatgtagccatccaggcagttctgactttgtacgctcaaggtttattgactggtgtagtggtagactctggagatggtgtgactcacatttgcccagtatatgaaggcttttctctccctcatcttaccaggagactggatattgctgggagggatataactagatatcttatcaagctacttctgttgcgaggatacgccttcaaccactctgctgattttgaaacggttcgcatgattaaagaaaaactgtgttacgtgggatataatattgagcaagagcagaaactggccttagaaaccacagtattagttgaatcttatacactcccagatggacgtatcatcaaagttgggggagagagatttgaagcaccagaagctttatttcagcctcacttgatcaatgttgaaggagttggtgttgctgaattgctttttaacacaattcagcagctgacattgataccagatctgaattctacaaacacattgtgctttctggagggtctactatgtatcctggcctgccatcacggttggaacgagaacttaaacagctttacttagaacgagttttgaagggtgatgtggaaaactttctaaatttaagatccgcattgagacccaccccgcagaaa

SEQ ID NO: 183382 - DNA, 1791 bp, Homo Sapiens
  misc_feature (373)..(385): n is a, c, g, or t
  misc_feature (1461)..(1487): n is a, c, g, or t
ttggtgttcgataaactccaaagcttgttcccatcatacccgtaatgctttcttttttcctttattgccaatctttgaactcattcaactccaggacatggaagaggcctctctctgccctttgactggaaaggtcaagttttattctggtgtcttggggaaggtttgttaaatttttgttaatgtgggtaaatctgagtttaattcaactgcttccctacatagactagagggctaaggattctgtctgctgctttgtttcttctaagtaggcatttagatcattcctgtaggcttcctattttcactttactgctctaatgctgctagtcatagtctttagcacactaggtggtatgcctttattagcatnnnnnnnnnnnnnctttaacaggatcttttacatattactgggatggggggtggttcgggatgggtgggcagctgctgaaccctttagggcatttcctctgtaatgtggcgctttcaactgtactgctgcagctttaagtaccttaaagcttctcctgtgaacttcttagggaaatgttaggttcagaactaaagtgttttgggtgggttttgttgcgggggggagggtaacaatgggtggtcttctgatttttatttttgaggttttgtcaactggagtacgtagaggaactttatttacagtactttgatttggcaggttttcttctacttgtgctctgcctggagctgtttccatatgatataaaaagcaagtgtagtattccattactatgtggcttacggatttatttgttttttaaaatcaaccatgttagctgggattagactccctacagtccttcaatggaaaagtaacatttaaaaatcctttgggtaattcaaattacagatttaaaagagcttaagatctggtgttttgttaatgcttctgtttattccagaagcattaaggtaacccattgccaagtatcattcttgcaaattattcttttatataactgaccagtgcttaataaaacaagcaggtacttacaaataattactggcagtaggttataattggtggtttaaaaataacattggaatacaggacttgttgccaattgggtaattttcattagttgttttgtttgttttgatttgaaacctggaaatacagtaaaatttgactgtttaaaatgttggccaaaaaaatcaagatttaatttttttatttgtactgaaaaactaatcataactgttaattctcagccatctttgaagcttgaaagaagagtctttggtattttgtaaacgttagcagactttcctgccagtgtcagaaaatcctatttatgaatcctgtcggtattccttggtatctgaaaaaaataccaaatagtaccatacatgagttatttctaagtttgaaaaataaaaagaaattgcatcacactaattacaaaatacaagttctggaaaaaatannnnnnnnnnnnnnnnnnnnnnnnnnnaactaataatggctttgaaagaagaggcttaatttgggggtggtaactaaaatcaaaagaaatgattgacttgagggtctctgtttggtaagaatacatcattagcttaaataagcagcagaacgttagttttaattatgtagcttctgttaatattaagtgttttttgtctgttttacctcaatttgaacagataagtttgcctgcatgctggacatgcctcagaaccatgaatagcccgtactagatcttgggaacatggatcttagagtcactttggaataagttcttacataaatacccc

SEQ ID NO: 183383 - DNA, 1629 bp, Homo Sapiens
  misc_feature (338)..(350): n is a, c, g, or t
  misc_feature (1426)..(1452): n is a, c, g, or t
tttgtacaaaaaagttggtttttcctttattgccaatctttgaactcattcaactccaggacatggaagaggcctctctctgccctttgactggaaaggtcaagttttattctggtgtcttggggaagctttgttaaatttttgttaatgtgggtaaatctgagtttaattcaactgcttccctacatagactagagggctaaggattctgtctgctgctttgtttcttctaagtaggcatttagatcattcctgtaggcttcctattttcactttactgctctaatgctgctagtcgtagtctttagcacactaggtggtatgcctttattagcatnnnnnnnnnnnnnctttaacaggagcttttacatattactgggatggggggtggttcgggatgggtgggcagctgctgaaccctttagggcatttcctctgtaatgtggcgctttcaactgtactgctgcagctttaagtaccttaaagcttctcctgtgaacttcttagggaaatgttaggttcagaactaaagtgttttgggtgggttttgttgcgggggggagggtaacaatgggtggtcttctgatttttatttttgaggttttgtcaactggagtacgtagaggaactttatttacagtactttgatttggcaggttttcttctacttgtgctctgcctggagctgtttccatatgatataaaaagcaagtgtagtattccattactatgtggcttagggatttatttgttttttaaaatcaaccatgttagctgggattagactccctacagtccttcaatggaaaagtaacatttaaaaatcctttgggtaattcaaattacagatttaaaagagcttaagatctggtgttttgttaatgcttctgtttattccagaagcattaaggtaacccattgccaagtatcattcttgcaaattattcttttatataactgaccagtgcttaataaaacaagcaggtacttacaaataattactggcagtaggttataattggtggtttaaaaataacattggaatacaggacttgttgccaattgggtaattttcattagttgttttgtttgttttgatttgaaacctggaaatacagtaaaatttgactgtttaaaatgttggccaaaaaaatcaagatttaatttttttatttgtactgaaaaactaatcataactgttaattctcagccatctttgaagcttgaaagaagagtctttggtattttgtaaacgttagcagactttcctgccagtgtcagaaaatcctatttatgaatcctgtcggtattccttggtatctgaaaaaaataccaaatagtaccatacatgagttatttctaagtttgaaaaataaaaagaaattgcatcacactaattacaaaatacaagttctggaaaaaatannnnnnnnnnnnnnnnnnnnnnnnnnnaactaataatggctttgaaagaagaggcttaatttgggggtggtaactaaaatcaaaagaaatgattgacttgagggtctctgtttggtaagaatacatcattagcttaaataagcagcagaagttagttttaattatgtagcttctgttaatattaagtgttttttgtctgtttac

SEQ ID NO: 183384 - DNA, 1606 bp, Homo Sapiens
  misc_feature (307)..(319): n is a, c, g, or t
  misc_feature (1395)..(1421): n is a, c, g, or t
ttggatctttgaactcattcaactccaggacatggaagaggcctctctctgccctttgactggaaaggtcaagttttattctggtgtcttggggaagctttgttaaatttttgttaatgtgggtaaatctgagtttaattcaactgcttccctacatagactagagggctaaggattctgtctgctgctttgtttcttctaagtaggcatttagatcattcctgtaggcttcctattttcactttactgctctaatgctgctagtcgtagtctttagcacactaggtggtatgcctttattagcatnnnnnnnnnnnnnctttaacaggagcttttacatattactgggatggggggtggttcgggatgggtgggcagctgctgaaccctttagggcatttcctctgtaatgtggcgctttcaactgtactgctgcagctttaagtaccttaaagcttctcctgtgaacttcttagggaaatgttaggttcagaactaaagtgttttgggtgggttttgttgcgggggggagggtaacaatgggtggtcttctgatttttatttttgaggttttgtcaactggagtacgtagaggaactttatttacagtactttgatttggcaggttttcttctacttgtgctctgcctggagctgtttccatatgatataaaaagcaagtgtagtattccattactatgtggcttagggatttatttgttttttaaaatcaaccatgttagctgggattagactccctacagtccttcaatggaaaagtaacatttaaaaatcctttgggtaattcaaattacagatttaaaagagcttaagatctggtgttttgttaatgcttctgtttattccagaagcattaaggtaacccattgccaagtatcattcttgcaaattattcttttatataactgaccagtgcttaataaaacaagcaggtacttacaaataattactggcagtaggttataattggtggtttaaaaataacattggaatacaggacttgttgccaattgggtaattttcattagttgttttgtttgttttgatttgaaacctggaaatacagtaaaatttgactgtttaaaatgttggccaaaaaaatcaagatttaatttttttatttgtactgaaaaactaatcataactgttaattctcagccatctttgaagcttgaaagaagagtctttggtattttgtaaacgttagcagactttcctgccagtgtcagaaaatcctatttatgaatcctgtcggtattccttggtatctgaaaaaaataccaaatagtaccatacatgagttatttctaagtttgaaaaataaaaagaaattgcatcacactaattacaaaatacaagttctggaaaaaatannnnnnnnnnnnnnnnnnnnnnnnnnnaactaataatggctttgaaagaagaggcttattttgggggtggtaactaaaatcaaagaaatgattgacttgagggtctctgtttggtaagaatacatcattagcttaaataagcagcagaagttagttttaattatgtagcttctgttaatattaagtgttttttgtctgttttacctcaattt

SEQ ID NO: 183385 - DNA, 1853 bp, Homo Sapiens
  misc_feature (1345)..(1357): n is a, c, g, or t
ctttgtacaaaaaagttggatggaaaatggcacactacaaaaattgggatgacatgaaacacctgtgggactacacatttggaccagagaaacttaatatagataccagaaattgtaaaatcttactcacagaacctcctatgaacccaaccaaaaacagagagaagattgtagaggtaatgtttgaaacttaccagttttccggtgtatatgtagccatccaggcagttctgactttgtacgctcaaggtttattgactggtgtagtggtagactctggagatggtgtgactcacatttgcccagtatatgaaggcttttctctccctcatcttaccaggagactggatattgctgggagggatataactagatatcttatcaagctacttctgttgcgaggatacgccttcaaccactctgctgattttgaaacggttcgcatgattaaagaaaaactgtgttacgtgggatataatattgagcaagagcagaaactggccttagaaaccacagtattagttgaatcttatacactcccagatggacgtatcatcaaagttgggggagagagatttgaagcaccagaagctttatttcagcctcacttgatcaatgttgaaggagttggtgttgctgaattgctttttaacacaattcaggcagctgacattgataccagatctgaattctacaaacacattgtgctttctggagggtctactatgtatcctggcctgccatcacggttggaacgagaacttaaacagctttacttagaacgagttttgaagggtgatgtggaaaaactttctaaatttaagatccgcattgaagacccaccccgcagaaagcacatggtattcctgggtggtgcagttctagcggatatcatgaaagacaaagacaacttttggatgacccgacaagagtaccaagaaaagggtgtccgtgtgctagagaaacttggtgtgactgttcgataaactccaaagcttgttcccatcatacccgtaatgctttcttttttcctttattgccaatctttgaactcattcaactccaggacatggaagaggcctctctctgccctttgactggaaaggtcaagttttattctggtgtcttggggaagctttgttaaatttttgttaatgtgggtaaatctgagtttaattcaactgcttccctacatagactagagggctaaggattctgtctgctgctttgtttcttctaagtaggcatttagatcattcctgtaggcttcctattttcactttactgctctaatgctgctagtcgtagtctttagcacactaggtggtatgcctttattagcatnnnnnnnnnnnnnctttaacaggagcttttacatattactgggatggggggtggttcgggatgggtgggcagctgctgaaccctttagggcatttcctctgtaatgtggcgctttcaactgtactgctgcagctttaagtaccttaaagcttctcctgtgaacttcttagggaaatgttaggttcagaactaaagtgttttgggtgggttttgttgcgggggggagggtaacaatgggtggtcttctgatttttatttttgaggttttgtcaactggagtacgtagaggaactttatttacagtactttgatttggcagttttcttctacttgtgctctgcctggagctgttcccatatgatataaaaagcaagtgtagtattccatttactatgtggcttaagggatttatttgttttttaaaatcaaccatgtttagctgggattagactccctacagtccttcaatggaaaagtaacatttaaaattcctttgggtaattcaatta

SEQ ID NO: 183386 - DNA, 1848 bp, Homo Sapiens
  misc_feature (1583)..(1594): n is a, c, g, or t
ctttgtacaaaaaagttggtctgatttttatttttgaggttttgtcaactggagtacgtagaggaactttatttacagtactttgatttggcaggttttcttctacttgtgctctgcctggagctgtttccatatgatataaaaagcaagtgtagtattccattactatgtggcttagggatttatttgttttttaaaatcaaccatgttagctgggattagactccctacagtccttcaatggaaaagtaacatttaaaaatcctttgggtaattcaaattacagatttaaaagagcttaagatctggtgttttgttaatgcttctgtttattccagaagcattaaggtaacccattgccaagtatcattcttgcaaattattcttttatataactgaccagtgcttaataaaacaagcaggtacttacaaataattactggcagtaggttataattggtggtttaaaaataacattggaatacaggacttgttgccaattgggtaattttcattagttgttttgtttgttttgatttgaaacctggaaatacagtaaaatttgactgtttaaaatgttggccaaaaaaatcaagatttaatttttttatttgtactgaaaaactaatcataactgttaattctcagccatctttgaagcttgaaagaagagtctttggtattttgtaaacgttagcagactttcctgccagtgtcagaaaatcctatttatgaatcctgtcggtattccttggtatctgaaaaaaataccaaatagtaccatacatgagttatttctaagtttgaaaagtaaaaagaaattgcatcacactaattacaaaatacaagttctggaaaaaatatttttcttcattttaaaacttttttaactaataatggctttgaaagaagaggcttaatttgggggtggtaactaaaatcaaaagaaatgattgacttgagggtctctgtttggtaagaatacatcattagcttaaataagcagcagaaggttagttttaattatgtagcttctgttaatattaagtgttttttgtctgttttacctcaatttgaacagataagtttgcctgcatgctggacatgcctcagaaccatgaatagcccgtactagatcttgggaacatggatcttagagtcactttggaataagttcttatataaatacccccagccttttgagaacggggcttgttaaaggacgcgtatgtagggcccgtacctactggcagttgggttcagggaaatgggattgacttggccttcaggctcctttggtcataattttaaaatatgggagtagaaaacaacaaagaatggaatggactcttaaaacaatgaaagagcatttatcgtttgtcccttgaatgtagaatttgtttttgatttcataattctgctggtaaatgtgacagttaaaatggtgcattatgtatatatattataatttagaaataccattttataattttactattccagggtgacataatgcatttaaatttgggatttgggtggagtattatgtttaactggagttgtcaagtatgagtccctcaggnnnnnnnnnnnnttctgttttaaaaagcaatctgattcttagctcttgaaactattgctacttaaatttccaataattaaaaatttaaaatttttaaattagaattgccaatacttctacatttgagaagggtttttttagaaatacatttagtaaagtccccaagacattagtcttacatttaaactttttttctttaaaacatggttttggtggttaacttttacacagttctgagtactgttaatatctggaaagtatcttga

SEQ ID NO: 183387 - DNA, 2602 bp, Homo Sapiens
tacaaaaaagttgtgggagaagagcggagcgtgtgagcagtactgcggcctcctctcctctcctaacctcgctctcgcggcctacctttacccgcccgcctgctcggcgaccagaacaccttccaccatgaccacctcagcaagttcccacttaaataaaggcatcaagcaggtgtacatgtccctgcctcagggtgagaaagtccaggccatgtatatctggatcgatggtactggagaaggactgcgctgcaagacccggaccctggacagtgagcccaagtgtgtggaagagttgcctgagtggaatttcgatggctccagtactttacagtctgagggttccaacagtgacatgtatctcgtgcctgctgccatgtttcgggaccccttccgtaaggaccctaacaagctggtgttatgtgaagttttcaagtacaatcgaaggcctgcagagaccaatttgaggcacacctgtaaacggataatggacatggtgagcaaccagcacccctggtttggcatggagcaggagtataccctcatggggacagatgggcacccctttggttggccttccaacggcttcccagggccccagggtccatattactgtggtgtgggagcagacagagcctatggcagggacatcgtggaggcccattaccgggcctgcttgtatgctggagtcaagattgcggggactaatgccgaggtcatgcctgcccagtgggaatttcagattggaccttgtgaaggaatcagcatgggagatcatctctgggtggcccgtttcatcttgcatcgtgtgtgtgaagactttggagtgatagcaacctttgatcctaagcccattcctgggaactggaatggtgcaggctgccataccaacttcagcaccaaggccatgcgggaggagaatggtctgaagtacatcgaggaggccattgagaaactaagcaagcggcaccagtaccacatccgtgcctatgatcccaagggaggcctggacaatgcccgacgtctaactggattccatgaaacctccaacatcaacgacttttctgctggtgtagccaatcgtagcgccagcatacgcattccccggactgttggccaggagaagaagggttactttgaagatcgtcgcccctctgccaactgcgaccccttttcggtgacagaagccctcatccgcacgtgtcttctcaatgaaaccggcgatgagcccttccagtacaaaaattaagtggactagacctccagctgttgagcccctcctagttcttcatcccactccaactcttccccctctcccagttgtcccgattgtaactcaaagggtggaatatcaaggtcgtttttttcattccatgtgcccagttaatcttgctttctttgtttggctgggatagaggggtcaagttattaatttcttcacacctaccctcctttttttccctatcactgaagctttttagtgcattagtggggaggagggtggggagacataaccactgcttccatttaatggggtgcacctgtccaataggcgtagctatccggacagagcacgtttgcagaagggggactcttcttccaggtagctgaaaggggaagacctgacgtactctggttaggttaggacttgccctcgtggtggaaacttttcttaaaaagttataaccaacttttctattaaaagtgggaattaggagagaaggtaggggttgggaatcagagagaatggctttggtctcttgcttgtgggactagcctggcttgggactaaatgccctgctctgaacacgaagcttagtataaactgatggatatccctaccttgaaagaagaaaaggttcttactgcttggtccttgatttatcacacaaagcagaatagtatttttatatttaaatgtaaagacaaaaaactatatgtatggttttgtggattatgtgtgttttgctaaaggaaaaaaccatccaggtcacggggcaccaaatttgagacaaatagtcggattagaaataaagcatctcattttgagtagagagcaagggaagtggttcttagatggtgatctgggattaggccctcaagacccttttgggtttctgccctgcccaccctctggagaaggtgggcactggattagttaacagacaacacgttactagcagtcacttgatctccgtggctttggtttaaaagacacacttgtccacataggtttagagataagagttggctggtcaacttgagcatgttactgacagagggggtattggggttattttctggtaggaatagcatgtcactaaagcaggccttttgatattaaattttttaaaaagcaaaattatagaagtttagattttaatcaaatttgtagggtttctaggtaatttttacagaattgcttgtttgcttcaactgtctcctacctctgctcttggaggagatggggacagggctggagtcaaaacacttgtaattttgtatcttgatgtctttgttaagactgctgaaaattattttttttccttttataataaggaataaaccccacctttattccttcatttcatctacaattttc

SEQ ID NO: 183388 - DNA, 656 bp, Homo Sapiens
  misc_feature (439)..(451): n is a, c, g, or t
ttgggtcttgagggcctaatcccagatcaccatctggagaaggtgggcactggattagttaacagacaacacgttactagcagtcacttgatctccgtggctttggtttaaaagacacacttgtccacataggtttagagataagagttggctggtcaacttgagcatgttactgacagagggggtattggggttattttctggtaggaatagcatgtcactaaagcaggccttttgatattaaattttttaaaaagcaaaattatagaagtttagattttaatcaaatttgtagggtttctaggtaatttttacagaattgcttgtttgcttcaactgtctcctacctctgctcttggaggagatggggacagggctggagtcaaaacacttgtaattttgtatcttgatgtctttgttaagactgctgaagaattannnnnnnnnnnnnataataaggaataaaccccacctttattccttcatttcatctaccattttctggttcttgtgttggctgtggcaggccagctgtggttttcttttgccatgacaacttctaattgccatgtacagtatgttcaaagtcaaataactcctcattgtaaacaaactgtgtaactgcccaaagcagcacttataaatcagcctaacat

SEQ ID NO: 183389 - DNA, 1833 bp, Homo Sapiens
ttggctcagcgccgccgtcgccaccgccaccgccaccgccactaccaccgtctgagtctgcagtcccgagatcccagccatcatgtccatagagaagatctgggcccgggagatcctggactcccgcgggaaccccacagtggaggtggatctctatactgccaaaggtcttttccgggctgcagtgcccagtggagcctctacgggcatctatgaggccctggagctgagggatggagacaaacagcgttacttaggcaaaggtgtcctgaaggcagtggaccacatcaactccaccatcgcgccagccctcatcagctcaggtctctctgtggtggagcaagagaaactggacaacctgatgctggagttggatgggactgagaacaaatccaagtttggggccaatgccatcctgggtgtgtctctggccgtgtgtaaggcaggggcagctgagcgggaactgcccctgtatcgccacattgctcagctggccgggaactcagacctcatcctgcctgtgccggccttcaacgtgatcaatggtggctctcatgctggcaacaagctggccatgcaggagttcatgatcctcccagtgggagctgagagctttcgggatgccatgcgactaggtgcagaggtctaccatacactcaagggagtcatcaaggacaaatacggcaaggatgccaccaatgtgggggatgaaggtggctttgcccccaatatcctggagaacagtgaagccttggagctggtgaaggaagccatcgacaaggctggctacacggaaaagatcgttattggcatggatgttgctgcctcagagttttatcgtgatggcaaatatgacttggacttcaagtctcccactgatccttcccgatacatcactggggaccagctgggggcactctaccaggactttgtcagggactatcctgtggtctccattgaggacccatttgaccaggatgattgggctgcctggtccaagttcacagccaatgtagggatccagattgtgggtgatgacctgacagtgaccaacccaaaacgtattgagcgggcagtggaagaaaaggcctgcaactgtctgctgctcaaggtcaaccagatcggctcggtcactgaagccatccaagcgtgcaagctggcccaggagaatggctggggggtcatggtgagtcatcgctcaggagagactgaggacacattcattgctgacctggtggtggggctgtgcacaggccagatcaagactggtgccccgtgccgttctgaacgtctggctaaatacaaccagctcatgagaattgaggaagagctgggggatgaagctcgctttgccggacataacttccgtaatcccagtgtgctgtgattcctctgcttgcctggagacgtggaacctctgtctcatcctcctggaaccttgctgtcctgatctgtgatagttcaccccctgagatcccctgagccccagggtgcccagaacttccctgattgacctgctccgctgctccttggcttacctgacctcttgctgtctctgctcgccctcctttctgtgccctactcattggggttccgcactttccacttcttcctttctctttctctcttccctcagaaactagaaatgtgaatgaggattattataaaagggggtctgtggaagaatgatcagcatctgtgatgggagcgtcagggttggtgtgctgaggtgttagagagggaccatgtgtcacttgtgctttgctcttgtcccacgtgtcttccactttgcatatgagccgtgaactgtgcatagtgctgggatggagggga

SEQ ID NO: 183390 - DNA, 1663 bp, Homo Sapiens
  misc_feature (1367)..(1375): n is a, c, g, or t
caaatggtcaccattagttcacgcatccaagtctgagttccatacgtgctctcctcgccttccagcagcttcctgtaggtggcaatctcaatgtcaagggccatcttaacattgagcaggtcttggtattcacgaaggtgacgagccatttcctccttcatattctgaatctcatcctgcaggcggccaatagtgtcttggtagttagcagcttcaacggcaaagttctcttccatttcacgcatctggcgttccagggactcattctgcagggggtgagaaagatgtctggtgttatttctcagaaaaacccagctgttcccagaaccatttacagaccttctgcaataatttccattagcggcaaatggcgaccactctaattttaggtggagaatgcgagtaccaagtccttcatattagaagcaatgatataggcaagctaaaaccttcaagagttccatgaagtcccttttgagtctgtcttgataactcattttctttgcattatgatatacatttttactcactcaacattttgttcaggtatcatcatgagcctagtcagcagaatgggtcattattttccctcttttactgcagggttggtactcacggttcctttaagggcatccacttcacaggtgagggactgcacctgtctccggtactcagtggactcctgctttgcctggcgcagggcgtcattgttccggttggcagcctcagagaggtcagcaaacttggatttgtaccattcttctgcctcctgcaggttcttggcagccacactttcatattgctgacgtacgtcacgcagggcagccgtgaggtcaggcttggaaacatccacatcgatttggacatgctgttcctgaatctgagcctgcagctcctggatttcctcttcgtggagtttcttcaaaaaggcaatctcttcttgcaaagattccactttgcgttcaaggtcaagacgtgccagagacgcattgtcatcatcctgtctgaaagattgcagggtgttttaggcttcctctctctgaagcatgtcctctagcaatttctcccggagggggcatgatgtcctcggccaggatgtcgcgctccacctggaggcgggctttgcaattggttagatggtccacctgccggcgcagctcccgcatctcctcctcgtagatgtcccccaggcgggaattgcctttgcccctgatctgatcgagctagaaagacaaccaacggccagcgagaagtccaccgagtcatgcaggagccgcaccccgggcacgcagctccgcaggcgcacggcagaggagcgcgtggcatacgagccgcccggggacgaggagaagaggaagccgatggtnnnnnnnnncagcgagctgcccaggctgtaggggccggtggacgtagtcaggtagctccggctggagctcggccggcttatcggtgcccgggccgccgaacatcctgcggtaggaggacgaggacacggactgcatggacagggatgaagagggtggtgatgggacgggcggcggcggtggcgagtactggctcccggagaagaggcgaacgagggcgcggtgggagtgaaagtagggagcgcggttgagtgtagggcgattaaaggctgggagcgacccaacttttttgtacaaag

SEQ ID NO: 183391 - DNA, 1905 bp, Homo Sapiens
  misc_feature (1843)..(1851): n is a, c, g, or t
ttgatgagcaatgctacttttaaagacaactttgtacaaaaaagttggctcgctccgaggtccccgcgccagagacgcagccgcgctcccaccacccacacccaccgcgccctcgttcgcctcttctccgggagccagtccgcgccaccgccgccgcccaggccatcgccaccctccgcagccatgtccaccaggtccgtgtcctcgtcctcctaccgcaggatgttcggcggcccgggcaccgcgagccggccgagctccagccggagctacgtgactacgtccacccgcacctacagcctgggcagcgcgctgcgccccagcaccagccgcagcctctacgcctcgtccccgggcggcgtgtatgccacgcgctcctctgccgtgcgcctgcggagcagcgtgcccggggtgcggctcctgcaggactcggtggacttctcgctggccgacgccatcaacaccgagttcaagaacacccgcaccaacgagaaggtggagctgcaggagctgaatgaccgcttcgccaactacatcgacaaggtgcgcttcctggagcagcagaataagatcctgctggccgagctcgagcagctcaagggccaaggcaagtcgcgcctgggggacctctacgaggaggagatgcgggagctgcgccggcaggtggaccagctaaccaacgacaaagcccgcgtcgaggtggagcgcgacaacctggccgaggacatcatgcgcctccgggagaaattgcaggaggagatgcttcagagagaggaagccgaaaacaccctgcaatctttcagacaggatgttgacaatgcgtctctggcacgtcttgaccttgaacgcaaagtggaatctttgcaagaagagattgcctttttgaagaaactccacgaagaggaaatccaggagctgcaggctcagattcaggaacagcatgtccaaatcgatgtggatgtttccaagcctgacctcacggctgccctgcgtgacgtacgtcagcaatatgaaagtgtggctgccaagaacctgcaggaggcagaagaatggtacaaatccaagtttgctgacctctctgaggctgccaaccggaacaatgacgccctgcgccaggcaaagcaggagtccactgagtaccggagacaggtgcagtccctcacctgtgaagtggatgcccttaaaggaaccaatgagtccctggaacgccagatgcgtgaaatggaagagaactttgccgttgaagctgctaactaccaagacactattggccgcctgcaggatgagattcagaatatgaaggaggaaatggctcgtcaccttcgtgaataccaagacctgctcaatgttaagatggcccttgacattgagattgccacctacaggaagctgctggaaggcgaggagagcaggatttctctgcctcttccaaacttttcctccctgaacctgagggaaactaatctggattcactccctctggttgatacccactcaaaaaggacacttctgattaagacggttgaaactagagatggacaggttatcaacgaaacttctcagcatcacgatgaccttgaataaaaattgcacacactcagtgcagcaatatattaccagcaagaataaaaaagaaatccatatcttaaagaaacagctttcaagtgcctttctgcagtttttcaggagcgcaagatagatttggaataggaataagctctagttcttaacaaccgacactcctacaagatttagaaaaaagtttacaacataatctagtttacagaaaaatcttgtgctagaatactttttaaaaggtattttgaataccattaaaactgcnnnnnnnnnccagcaagtatccaaccaacttggttctgcttcaataaatctttggaaaaactc

SEQ ID NO: 183392 - DNA, 1541 bp, Homo Sapiens
ctttgtacaaaaaagttgggaagatgtcatactggcccacgttcccacacagtgccaatcagctggagctgcgtaacagccagcctgtctaggtggcatgtgaattccagtttgctgcaatccccaccacccctttctttgttctaacccatggctgctatatttctttgtgttactcgcctgtaccccttgctgacacgattttattctataccttgccaggtaaatatgatgaaactcacagctgaggagcttagcaagtagctaaggccagagcttgtgtttgggtggtgtggctgggggcatggatttcaaggcaggaagacctcttttgcttgttgtccccatccctagtcggagcccctgcagagtgtggtggaccacatggccacccaccttggggtgtccccaagcaggatccttttgctttttggagagacagagctatcacctactgccactcccaggaccctaaagctcggagtggctgacatcattgactgtgtggtactaacaagttctccagaggccacagagacgtcccaacagctccagctccgggtgcagggaaaggagaaacaccagacactggaagtctcactgtctcgagattcccctctaaagaccctcatgtcccactatgaggaggccatgggactgtcgggacggaagctctccttcttctttgatgggacaaagctttcaggcagggagctgccagctgacctgggcatggaatctggggacctcattgaggtctggggctgacaccccactccctgtttgacggcccagcctggacttggggagaatgactttcccttttttgccccataagggctagcataagctgaggtagaacttatctttaagctgcagcaaaatcaaggagtgacttttgtcccctctcctgttgaccctggtttagagccgttaaccacttggtgagttatgtgggtgttgttgccctgggtggcctgtggctccgtccacaagtcatgctgagttttgcagcctctgtgacttggagatgtcccttcacccctcccctttcaccaccatcctcttttcctcatggaaatgtctgctttatgaaactatgcacatattgaaagtgagttgaaacaaatgagggttgggtaggagcttccaggcctgggatttacaccacgcctagcccagcagaggccttagtcccatttggggcttgggagtgacatttgcttgaggcttatacactggtgtggttgcctggcttgcaggaaatgaccaagctcacacatgctggctgaagcgtaagcagacaactgaggtactcttttgaaggatgaaatggtggattctcagccctgggggtcttcctcacctgaggacccttcagagccaccctttctagtttgcatttcctggtgcacacatttaaagcataacagcacattcatccctttggtttgggatctcagaatacagtcccatgcaaagattctctggtttatggcttttttcccttttctttacaccatcctctcccataagcaccc

SEQ ID NO: 183393 - DNA, 1265 bp, Homo Sapiens
  misc_feature (235)..(261): n is a, c, g, or t
  misc_feature (952)..(964): n is a, c, g, or t
gatgagcaatgctttttgacattgaaaaagtttgtacaaaaaaagttggatataccattctgggccctgaggataagagagatgagggcattagatcactgacagctgaagatagaagaacatctttggtttgattgtttaaataatatttcaatgcctattctctgcaaggtactatgtttcgtaaattaaataggtctggcccagaagacccactcaattgcctttgagattnnnnnnnnnnnnnnnnnnnnnnnnnnntgcaagtttctttcaaaataaagagacatttttcctagtttcaggaatcccccaaatcacttcctcattggcttagtttaaagccaggagactgataaaagggctcagggtttgttctttaattcattaactaaacattctgcttttattacagttaaatggttcaagatgtaacaactagttttaaaggtatttgctcattggtctggcttagagacaggaagacatatgagcaataaaaaaaagattcttttgcatttaccaatttagtaaaaatttattaaaactgaataaagtgctgttcttaagtgcttgaaagacgtaaaccaaagtgcactttatctcatttatcttatggtggaaacacaggaacaaattctctaagagactgtgtttctttagttgagaagaaacttcattgagtagctgtgatatgttcgatactaaggaaaaactaaacagatcacctttgacatgcgttgtagagtgggaataagagagggctttttattttttcgttcatacgagtattgatgaagatgatactaaatgctaaatgaaatatatctgctccaaaaggcatttattctgacttggagatgcaacaaaaacacaaaaatggaatgaagtgatactcttcatcaaacagaagtgactgttatctcaaccattttgttaaatcctaaacagnnnnnnnnnnnnntcatgacgaaaagacacttgcttattaattggcttggaaagtagaatataggagaaaggttactgtttattttttttcatgtattcattcattctacaaatatattcgggtgccaataggtacttggtataaatttttggccccagagacatgggaaaaaaatgcatgccttcccagagaatgcctaatactttccttttggcttgttttcttgttaggggcatggcttagtccctaaataacattgtgtggtttaattcctactccgtatctcttctaccactctgggccactacgataa

SEQ ID NO: 183394 - DNA, 1738 bp, Homo Sapiens
  misc_feature (295)..(307): n is a, c, g, or t
  misc_feature (997)..(1023): n is a, c, g, or t
tagtggccagagtggtagaagagatacggagtaggaattaaaccacacaatgttatttagggactaagccatgcccctaacaagaaaacaagccaaaaggaaagtattaggcattctctgggaaggcatgcatttttttcccatgtctctggggccaaaaatttataccaagtacctattggcacccgaatatatttgtagaatgaatgaatacatgaaaaaaaataaacagtaacctttctcctatattctactttccaagccaattaataagcaagtgtcttttcgtcatgannnnnnnnnnnnnctgtttaggatttaacaaaatggttgagataacagtcacttctgtttgatgaagagtatcacttcattccatttttgtgtttttgttgcatctccaagtcagaataaatgccttttggagcagatatatttcatttagcatttagtatcatcttcatcaatactcgtatgaacgaaaaaataaaaagccctctcttattcccactctacaacgcatgtcaaaggtgatctgtttagtttttccttagtatcgaacatatcacagctactcaatgaagtttcttctcaactaaagaaacacagtctcttagagaatttgttcctgtgtttccaccataagataaatgagataaagtgcactttggtttacgtctttcaagcacttaagaacagcactttattcagttttaataaatttttactaaattggtaaatgcaaaagaatcttttttttattgctcatatgtcttcctgtctctaagccagaccaatgagcaaatacctttaaaactagttgttacatcttgaaccatttaactgtaataaaagcagaatgtttagttaatgaattaaagaacaaacctgagcccttttatcagtctcctggctttaaactaagccaatgaggaagtgatttgggggattcctgaaactaggaaaaatgtctctttattttgaaagaaacttgcannnnnnnnnnnnnnnnnnnnnnnnnnnaatctcaaaggcaattgagtgggtcttctgggccagacctatttaatttacgaaacatagtaccttgcagagaataggcattgaaatattatttaaacaatcaaaccaaagatgttcttctatcttcagctgtcagtgatctaatgccctcatctctcttatcctcaggacccagaatggtatattccacataaaagatgctttgtttatcaaatgaatcaaaaagcacgcctgaggcatttatttttactcctttacttctgtaggccaggtcaaggtgggtctaattcacttttatcatcagcacttaagaaactggatggaagaccacaacaccttgttttttgcaaaaattttccatctcctcaatcaggccaggaagcatgtatcttctggacaggactttatctctctactcagcttagtacactgccttatattagtccatttgtcccatgttttcatcactgaataaacttgttaaatgacttttggtctggatctcacacctatattacttcatttccttctgtgagcactctataatgataacatcatttttatatcctagggcatgtagttccgagccccacagaaagtaatcaccattcagtaagccaatagttcattcctatctgtatagaactgtaggcttcgtaaatctaaacatagtaccttgcagagaataggcattgaaatattatttaaacaccaa

SEQ ID NO: 183395 - DNA, 2732 bp, Homo Sapiens
  misc_feature (146)..(154): n is a, c, g, or t
ttggcaaaatccagtcagtatctaatctggcttttgttaacttccctcaggagcagacattcatataggtgatactgtatttcagtcctttcttttgaccccagaagccctagactgagaagataaaatggtcaggttgttggggnnnnnnnnngtgccaggctctctagagaaaaatgtgaagagatgctccaggccaatgagaagaattagacaagaaatacacagatgtgccagacttctgagaagcacctgccagcaacagcttccttctttgagcttaggtgagcaggattctggggtttgggatttctagtgatggttatggaaagggtgactgtgcctgggacaaagcgaggtcccaaggggacagcctgaactccctgctcatagtagtggccaaataatttggtggactgtgccaacgctactcctgggtttaatacccatctctaggcttaaagatgagagaacctgggactgttgagcatgtttaatactttccttgatttttttcttcctgtttatgtgggaagttgatttaaatgactgataatgtgtatgaaagcactgtaaaacataagagaaaaaccaattagtgtattggcaatcatgcagttaacatttgaaagtgcagtgtaaattgtgaagcattatgtaaatcaggggtccacagtttttctgtaaggggtcaaatcataaatactttagactgtgggccatatggtttctgttacatatttgttttttaaacaacgtttttataaggtcaaaatcattcttagtttttgagccaattggatttggcctgctgttcatagcttaccaccccctgatgtattatttgttattcagagaaaatttctgaatactactagtttccttttctgtgcctgtccctgtgctaggcactaaaaatgcaatgattattgatatctaggtgacctgaaaaaaaatagtgaatgtgctttgtaaactgtaaagcacttgtattctactgtgataagcgttgtggatacaaagaaaggagcaagcataaaaaagtgctctttcaaaaggatatagtactatgcagacacaaggaattgtttgataaatgaataaattatatgtatatttgaggccaatttgtgtttgctgctctggtaattttgagtaaaaatgcagtattccaggtatcagaaacgaaaacacatggaaactgcttttaaactttaaaatatactgaaaacataagggactaagcttgttgtggtcacctataatgtgccagataccatgctgggtgctagagctaccaaagggggaaaagtattctcatagaacaaaaaatttcagaaaggtgcatattaaagtgctttgtaaactaaagcatgatacaaatgtcaatgggctacatatttatgaatgaatgaatggatgaatgaatattaagtgcctcttacataccagctattttgggtactgtaaaatacaagattaattctcctatgtaataagaggaaagtttatcctctatactattcagatgtaaggaatgatatattgcttaattttaaacaatcaagactttactggtgaggttaagttaaattattactgatacatttttccaggtaaccaggaaagagctagtatgaggaaatgaagtaatagatgtgagatccagaccgaaagtcacttaattcagcttgcgaatgtgctttctaaattataaagcacttgtaaatgaaaaatttgatgctttctgtatgaataaaactttctgtaagctaggtattgtctctacaaaattctcattgtatagttaaaccacagtgagaagggttctataagtagttatacaaaccaagggtttaaatacctgttaaatagatcaattttgattgcctactatgtgaactcactgttaaaggcactgaaaatttatcatatttcatttagccacagccaaaaataaggcaatacctatgttagcattttgtgaactctaaggcaccatataaatgtaactgttgattttctcacttggtgctgggtactaggtttataaaattgtatgatagttattatattgtgcaaataaagtaggaaaatttgaataacaatgattatcttttgaatacgcatacgcaagggattggttgtctgaagaatgccactatagtagttatctattgtgtgccaatctcattgctaggcattggggatgcaaagataaaccatctttattgtgtcttgggtagcagaagaaaatatgtgtaaaatcaatttataatttgtaaactgccacccatatataagctatatctgctgaatgatcattgattactcttatccttagagataacaactgggggcacaaacatttattatcattattgaacctacaacagagatctatgtgtagatttacaaagcctacagttctatacagataggaatgaactattggcttactgaatggtgattactttctgtggggctcggaactacatgccctaggatataaaaatgatgttatcattatagagtgctcacagaaggaaatgaagtaatataggtgtgagatccagaccaaaagtcatttaacaagtttattcagtgatgaaaacatgggacaaatgggactaatataaggcagtgtactaagctgagtagagagataaagtcctgtccagaagatacatgcttcctggcctgattgaggaatggaaaatttttgcaaaaaa

SEQ ID NO: 183396 - DNA, 1408 bp, Homo Sapiens
  misc_feature (1057)..(1117): n is a, c, g, or t
ttgggtccaatacggctgacaaacaacgaccatccccttgcattagaatatgatacctttttcaaggaagggcttctctcttggctcctgtcccgatggccctctatcagcatgtgtcccggaccatggctccctgcagcaccctttaacgatttatcagacttacagatgaacgcataactgcccaatggacctgtccctccccctccagcacccccgccgcccccgacgtttgcaattttgttactcctaagcctaccttgaataaaatcaagaaggctggaaaaatggctctcctttctgatatcaagtaagggaaaaaactaaggttaatggtcattttttttcaagtagcaccaatactggacaaaactatcggatgcggtgctggacgtggtggtggtggctttggtggaggcacatgagaaaaaaaagcatgccttcccagagaatgcctaatactttccttttggcttgttttcttgttaggagcatggcttagtccctaaataacattgtgtggtttaattcctactccgtatctcttctaccactctggccactacgataagcaggtagctgggttttgtagtgagcttgctccttaagttacaggaactctccttataatagacacttcattttcctagtccatccctcatgaaaaatgactgaccactgctgggcagcaggagggatgatgaccaactaattcccaaaccccagtctcattggtaccagccttggggaaccacctacacttgagccacaattggttttgaagtgcatttacaaggtttgtctattttcagttctttactttttacatgctgacacatacatacactgcctaaatagatctctttcagaaacaatcctcagataacgcatagcaaaatggagatggagacatgatttctcatgcaacagcttctctaattataccttagaaatgttctcctttttatcatcaaatctgctcaagaagggctttttatagtagaataatatcagtggatgaaaacagcttaacattttaccatgcttaagttttaannnnnnnnnnnnnnnnnnnnnnnnnnnnnnnnnnnnnnnnnnnnnnnnnnnnnnnnnnnnnctctaaatgtaggcctggctgggctttgaccttttccgtttttaaatcactcacagagggtgggacaggaggaagagtgaaggaaaaggtcaaacctgttttaagggcaacctgcctttgttctgaattggtcttaagaacattaccagctccaggtttaaattgtttcagtttcatgcagttcccatagctgatcatttgttgagatgaggacaaaatcctttgtcctcactagtttgctttacatttttgaaaagtattattttttgtccaagtgcttatcaactaaac

SEQ ID NO: 183397 - DNA, 1515 bp, Homo Sapiens
  misc_feature (222)..(247): n is a, c, g, or t
tcaagtctcaaaccatctgtcttatactttgagcgttctatcccatatgagccttccaccgtctgccgtacttgagttctgggttttactgcagtctagagccttgttttggtcttggatcatctcacatggcagcctagcataaagaaaccgctccacaatgcttgctctgatagccgacgttctgcacctatcaggcagaggttaggaagcccctctgcnnnnnnnnnnnnnnnnnnnnnnnnnnttgcccacatatgcaaagaaatatttaaggagagattacatgaaatcaaagagagggagatagattcatgaagaggctgaaatactcaaaggtgagtagaaagggaagaagcagagaacaaatacaagccaacagagattaatactgaaatagaaaatcacaaacagcaagagatgctgaggcacgcaggggaggagagagagaatagcccaagagaggcagaaaggaaatgcagaaatgagaaatgtgagataaaaagtagaaacagcagaaaggaggccagactcagaaaaaaggtgaaatttaaaacgaacgagaaggggaaggggtaacaaataatcacagttcacaaagagaaaagagaggtaggcagagaaaggagaggtagacagaacaagaaaaggacaaaaagcacacagcatgtgacccaaaaaggagacatgaaataaagcgtgaaagaagagccacatctaggagagcaaagagaaatagcaacaaaatgaaaaatgagagatatgtctaagacaagacacagaccactcttgtgaacaaaaagagaaaatgaggcaaaggcacacacgaaagaaattagcaagagaaacatggaaatgggtaagacacactttagatagagaacaaagagcaaagacaagaaagaaagagacaaagaaatacacattcattcagctatcctcaagtgctagagtgccaggcatgttgatcttcaggtgggaaggctgacttccttcagtgtgttcaaatttcttggacctgctgaagactcagctctctgcactgcttgtaggaagtataatgatttggcagataggaacaatgaagagcttgacgtgtggtggttgtttttgagactttatcttcctatctgggaccaggaaagtatcttgacagaacctcctgacctagggttgttgcccagtggtagtgagcttttcccctggaggatcctcatgccccatctccacctagggatcgtcaaagggaatggatcactaacactgtaaaacaacaagcctattcttctgaggaagatctttttctccagatagctggcaacccatccaagtagattagctggagcttggccagattctcaaagggaaagatatgattaatttggagcctcttatagctgtttgcagtcctcaggtctcacatgctcagaatgtccaagaggagcctaaggagacatgactactaaggacacatgcagcgtggtatcttcaatgggatcagtattctaaagccaa

SEQ ID NO: 183398 - DNA, 2708 bp, Homo Sapiens
ttggcagggttgctgaccccctaagtccccttttcttggcttgttgacatgcataattgcatttatgttggttcttgtgccctagacaaggatgccccacctcttttcaatagtgggtgcccactccttatgatctttacatttgaacagttaatgtgaataattgcagttgtccacaaccctatcacttctaggaccattatacctcttttgcattactgtggggtatactgtttccctccaaggccccttctggtggactatcaacatataattgaaattttcttttgtctttgtcagtagattaaggtcataccccatcacctttcctttgtagtacaacagggtgtcctgatcaaccaaagtcctgttgttttggactgttaatatgtgcaattacatttgctcctgatctgtgcactagataaggatcctacctactttcttagtgtttttagcaggtagtgcccactactcaagactgtcacttggaatgttcatgtgcacaaactcaattctctaagcatgttcctgtaccacctttgctttagagcagggggatgatattcactaagtgccccttcttttggacttaatatgcattaatgcaattgtccacctcttcttttagactaagagttgatctccacatattccccttgcatcaggggcatgttaattatgaatgaacccttttcttttaatattaatgtcataattgtatttgtggacctgtgtaggagaaaaagaccctatgttcctcccattaccctttggattgctgctgagaagtgttaactactcataatctcagctcttggacaattaatagcattaataacaattatcaagggcactgatcattagataagactcctgcttcctcgttgcttacatcgggggtactgacccactaaggccccttgtactgttaatgtgaatatttgcaattatatatgtctccttctggtagagtgggatattatgccctagtatcccctttgcattactgcaggggctgctgactactcaaaacttctcctgggactgttaataggcacaatggcagttatcaatggttttctccctccctgaccttgttaagcaagcgccccaccccacccttagtttcccatggcataataaagtataagcattggagtattccatgcacttgtctatcaaacagtggtccatactcccaacccttttgcattgcgccagtgtgtaaaatcacaggtagccatggtgtcatgctttatatacgaagtcttccctctctctgccccttgtgtgcccttggcccctttttacagactattgctcacaatctcaggtgtccatatttgcagctattaggtaagattgtgctgtctccctcttcccttccctctgccctgccccttttgcctctttgctgggtaatgttgaccagacaaggccctttctcttggacttaaacaattctcagttgcactttccttggtcccacccattatacatgaacccccctacttcctttcgcattgcttctgagtatgctgactacccaaagccccttctgtgttattaataaacacagtactgattgtcccatttttcagcccatcagtccaagatctccctaccactttggtgtgttggtgcagtgttgactatgaaaagcaggcctgaactaggtggataagccttcactcattttctttcatttattaatgatcctagtttcaattattgtcagattctggggacaagaaccattcttgcccacctgtgttactgctttactgtgcaaaatactgaaggcaagtcagacccagggagctggattgccatcctttattttgtgtttccagtgtacactataaaattgtctccccaggaaggaaggttggcactttctctgcattcttctttccagagcagattgcctggttaagaatctcttgttgtcccctttgtatattgttattgtaaagtgccaaatgccaggatacagccagaaaaattgcttattattattaaaaaaatttttttaagaaagacatctggattgtagggtggactcgataacctggtcattatttttttgaagccaaaatatccatttatactatgtacctggtgaccagtgtctctcattttaactgagggtggtgggtctgtggatagaacactgactcttgctattttaatatcaaagatattctagagtggaactcttaagaccagtatctttgtgtgggctttaccagcattcacttttagaaaaactacctaaattttataatcctttaatttcttcatctggagcacctgcccctacttatttcaagaagattgcagtaaaacgattaaatgagggaacatatgcagaggtgcttttaaaaagcatatgccaccttttttattaattattatataaaatgaagcatttaattatagtaataatttgaagtagtttgaagtaccacactgaggtgaggacttaaaaatgataagacgagttccctattttataagaaaaataagccaaaattaaatattcttttggatataaatttcaacagtgagatagctgcctagtggaaatgaataatatcccagccactagtgtacagggtgttttgtggcacaggattatgtaatatggaactgctcaagcaaatactagtcatcacaacagcagttctttgtataactgaaaa

SEQ ID NO: 183399 - DNA, 1384 bp, Homo Sapiens
  misc_feature (260)..(272): n is a, c, g, or t
  misc_feature (1062)..(1117): n is a, c, g, or t
ttgggttcgatactaaggaaaaactaaacagatcacctttgacatgcgttgtagagtgggaataagagagggctttttattttttcgttcatacgagtattgatgaagatgatactaaatgctaaatgaaatatatctgctccaaaaggcatttattctgacttggagatgcaacaaaaacacaaaaatggaatgaagtgatactcttcatcaaacagaagtgactgttatctcaaccattttgttaaatcctaaacagnnnnnnnnnnnnntcatgacgaaaagacacttgcttattaattggcttggaaagtagaatataggagaaaggttactgtttattttttttcatgtattcattcattctacaaatatattcgggtgccaataggtacttggtataaggtttttggccccagagacatgggaaaaaaatgcatgccttcccagagaatgcctaatactttccttttggcttgttttcttgttaggggcatggcttagtccctaaataacattgtgtggtttaattcctactccgtatctcttctaccactctggccactacgataagcaggtagctgggttttgtagtgagcttgctccttaagttacaggaactctccttataatagacacttcattttcctagtccatccctcatgaaaaatgactgaccactgctgggcagcaggagggatgatgaccaactaattcccaaaccccagtctcattggtaccagccttggggaaccacctacacttgagccacaattggttttgaagtgcatttacaaggtttgtctattttcagttctttactttttacatgctgacacatacatacactgcctaaatagatctctttcagaaacaatcctcagataacgcatagcaaaatggagatggagacatgatttctcatgcaacagcttctctaattataccttagaaatgttctcctttttatcatcaaatctgctcaagaagggctttttatagtagaataatatcagtggatgaaaacagcttaacattttaccatgcttaagttttaagaannnnnnnnnnnnnnnnnnnnnnnnnnnnnnnnnnnnnnnnnnnnnnnnnnnnnnnnttctctaaatgtaggcctggctgggctttgaccttttccgtttttaaatcactcacagagggtgggacaggaggaagagtgaaggaaaaggtcaaacctgttttaagggcaacctgcctttgttctgaattggtcttaagaacattaccagctccaggtttaaattgttcagtttcatgcagttccaatagctgatcattgttgagatgaggacaaaatcctttgtcctcactagtttgctttacatttttgaaaagtattattttt

SEQ ID NO: 183400 - DNA, 1698 bp, Homo Sapiens
  misc_feature (151)..(163): n is a, c, g, or t
ttggactaaatgctaaatgaaatatatctgctccaaaaggcatttattctgacttggagatgcaacaaaaacacaaaaatggaatgaagtgatactcttcatcaaacagaagtgactgttatctcaaccattttgttaaatcctaaacagnnnnnnnnnnnnntcatgacgaaaagacacttgcttattaattggcttggaaagtagaatataggagaaaggttactgtttattttttttcatgtattcattcattctacaaatatattcgggtgccaataggtacttggtataaggtttttggccccagagacatgggaaaaaaatgcatgccttcccagagaatgcctaatactttccttttggcttgttttcttgttaggggcatggcttagtccctaaataacattgtgtggtttaattcctactccgtatctcttctaccactctggccactacgataagcaggtagctgggttttgtagtgagcttgctccttaagttacaggaactctccttataatagacacttcattttcctagtccatccctcatgaaaaatgactgaccactgctgggcagcaggagggatgatgaccaactaattcccaaaccccagtctcattggtaccagccttggggaaccacctacacttgagccacaattggttttgaagtgcatttacaaggtttgtctattttcagttctttactttttacatgctgacacatacatacactgcctaaatagatctctttcagaaacaatcctcagataacgcatagcaaaatggagatggagacatgatttctcatgcaacagcttctctaattataccttagaaatgttctcctttttatcatcaaatctgctcaagaagggctttttatagtagaataatatcagtggatgaaaacagcttaacattttaccatgcttaagttttaagaataaaataaaaattggaaataattggccaaaattgaaaggaaaaatttttttaaaatttctctaaatgtaggcctggctgggctttgaccttttccgtttttaaatcactcacagagggtgggacaggaggaagagtgaaggaaaaggtcaaacctgttttaagggcaacctgcctttgttctgaattggtcttaagaacattaccagctccaggtttaaattgttcagtttcatgcagttccaatagctgatcattgttgagatgaggacaaaatcctttgtcctcactagtttgctttacatttttgaaaagtattatttttgtccaagtgcttatcaactaaaccttgtgttaggtaagaatggaatttattaagtgaatcagtgtgacccttcttgtcataagattatcttaaagctgaagccaaaatatgcttcaaaagaagaggactttatcgttcattgtagttcatacattcaaagcatctgaactgtagtttctatagcaagccaattacatccataagtggagaaagaaatagataaatgtcaaagtatgattggtggagggagcaaggttgaagataatctggggttgaaattttctagttttcattctgtacatttttagttagacatcagatttgaaatattaatgtttaccttttcaatgtgtggtatcagctgggactcagtaacacccccttcttcagctggggatgggggatgggattattggaaaatgg

SEQ ID NO: 183401 - DNA, 1242 bp, Homo Sapiens
  misc_feature (90)..(150): n is a, c, g, or t
ttggcaaatctgctcaagaagggctttttatagtagaataatatcagtggatgaaaacagcttaacattttaccatgcttaagttttaannnnnnnnnnnnnnnnnnnnnnnnnnnnnnnnnnnnnnnnnnnnnnnnnnnnnnnnnnnnnctctaaatgtaggcctggctgggctttgaccttttccgtttttaaatcactcacagagggtgggacaggaggaagagtgaaggaaaaggtcaaacctgttttaagggcaacctgcctttgttctgaattggtcttaagaacattaccagctccaggtttaaattgttcagtttcatgcagttccaatagctgatcattgttgagatgaggacaaaatcctttgtcctcactagtttgctttacatttttgaaaagtattatttttgtccaagtgcttatcaactaaaccttgtgttaggtaagaatggaatttattaagtgaatcagtgtgacccttcttgtcataagattatcttaaagctgaagccaaaatatgcttcaaaagaagaggactttattgttcattgtagttcatacattcaaagcatctgaactgtagtttctatagcaagccaattacatccataagtggagaaggaaatagataaatgtcaaagtatgattggtggagggagcaaggttgaagataatctggggttgaaattttctagttttcattctgtacatttttagttagacatcagatttgaaatattaatgtttacctttcaatgtgtggtatcagctggactcagtaacacccctttcttcagctggggatggggaatggattattggaaaatggaaagaagaaagtaactaaaagccttcctttcacagtttctggcatcactaccactactgattaaacaagaataagagaacattttatcatcatctgctttattcacataaatgaagttgtgatgaataaatctgcttttatgcagacacaaggaattaagtggcttcgtcattgtccttctacctcaaagataatttattccaaaagctaagataaatggaagactcttgaacttgtgaactgatgtgaaatgcagaatctcttttgagtctttgctgtttggaagattgaaaaatattgttcagcatgggtgaccaccagaaagtaatcttaagccatctagatgtcacaattgaaacaaactggggagttggttgctattgtaaaataaaatatactgttttgaa

SEQ ID NO: 183402 - DNA, 1499 bp, Homo Sapiens
  misc_feature (531)..(557): n is a, c, g, or t
  misc_feature (1248)..(1260): n is a, c, g, or t
ctttgtacaaaaaagttgggtgtgagatccccaccaaaagtcatttaacaagtttattcagtgatgaaaacatgggacaaatggactaatataaggcagtgtactaagctgagtagagagataaagtcctgtccagaagatacatgcttcctggcctgattgaggagatggaaaatttttgcaaaaaaacaaggtgttgtggtcttccatccagtttcttaagtgctgatgataaaagtgaattagacccaccttgacctggcctacagaagtaaaggagtaaaaataaatgcctcaggcgtgctttttgattcatttgataaacattttatttttttatgtggaatataccattctgggtcctgaggataagagagatgagggcattagatcactgacagctgaagatagaagaacatctttggtttgattgtttaaataatatttcaatgcctattctctgcaaggtactatgtttcgtaaattaaataggtctggcccagaagacccactcaattgcctttgagattnnnnnnnnnnnnnnnnnnnnnnnnnnntgcaagtttctttcaaaataaagagacatttttcctagtttcaggaatcccccaaatcacttcctcattggcttagtttaaagccaggagactgataaaagggctcagggtttgttctttaattcattaactaaacattctgcttttattacagttaaatggttcaagatgtaacaactagttttaaaggtatttgctcattggtctggcttagagacaggaagacatatgagcaataaaaaaaagattcttttgcatttaccaatttagtaaaaatttattaaaactgaataaagtgctgttcttaagtgcttgaaagacgtaaaccaaagtgcactttatctcatttatcttatggtggaaacacaggaacaaattctctaagagactgtgtttctttagttgagaagaaacttcattgagtagctgtgatatgttcgatactaaggaaaaactaaacagatcacctttgacatgcgttgtagagtgggaataagagagggctttttattttttcgttcatacgaatattgatgaagatgatactaaatgctaaatgaaatatatctgctccaaaaggcatttattctgacttggagatgcaacaaaaacacaaaaatggaatgaagtgatactcttcatcaaacagaagtgactgttatctcaaccattttgttaaatcctaatcagnnnnnnnnnnnnntcatgacgaaaagacacttgcttattaattggcttggaaagtagaatatcgagaaaggttactgtttattttttttcatgtattcattcattctacaaatatattcgggtgccagtagtacttggtataagtttttggccccagagacatgggaaaaaaatgcatgccttcccagagaatgcctaatactttccttttggcttgtttcttgttaggggcatggcttagtccctaaataa

SEQ ID NO: 183403 - DNA, 1240 bp, Homo Sapiens
actttgtacaaaaaagttggggtttaaatacctgttaaatagatcaattttgattgcctactatgtgaactcactgttaaaggcactgaaaatttatcatatttcatttagccacagccaaaaataaggcaatacctatgttagcattttgtgaactctaaggcaccatataaatgtaactgttgattttctcacttggtgctgggtactaggtttataaaattgtatgatagttattatattgtgcaaataaagtaggaaaatttgaataacaatgattatcttttgaatacgcatacgcaagggattggttgtctgaagaatgccactatagtagttatctattgtgtgccaatctcattgctaggcattggggatgcaaagataaaccatctttattgtgtcttgggtagcagaagaaaatatgtgtaaaatcaatttataatttgtaaactgccacccatatataagctatatctgctgaatgatcattgattactcttatccttagagataacaactgggggcacaaacatttattatcattattgaacctacaacagagatctatgtgtagatttacaaagcctacagttctatacagataggaatgaactattggcttactgaatggtgattactttctgtggggctcggaactacatgccctaggatataaaaatgatgttatcattatagagtgctcacagaaggaaatgaagtaatataggtgtgagatccagaccaaaagtcatttaacaagtttattcagtgatgaaaacatgggacaaatggactaatataaggcagtgtactaagctgagtagagagataaagtcctgtccagaagatacatgcttcctggcctgattgaggagatggaaaatttttgcaaaaaacaaggtgttgtggtcttccatccagtttcttaagtgctgatgataaaagtgaattagacccaccttgacctggcctacagaagtaaaggagtaaaaataaatgcctcaggcgtgctttttgattcatttgataaacaaagcatcttttatgtggaatataccattctgggtcctgaggataagagagatgagggcattagatcactgacagctgaagatagaagaacatctttggtttgattgtttaaataatatttcaatgcctattctctgcaaggtactatgtttcgtaaattaaataggtctggcccagaagacccactcaattgccttttgagatt

SEQ ID NO: 183404 - DNA, 2030 bp, Homo Sapiens
  misc_feature (224)..(249): n is a, c, g, or t
taaaagccaactttgtacaaaaaagttggctcccctgcgtgcctcagcatctcttgctgtttgtgattttctatttcagtattaatctctgttggcttgtatttgttctctgcttcttccctttctactcacctttgagtatttcagcctcttcatgaatctatctccctctctttgatttcatgtaatctctccttaaatatttctttgcatatgtgggcaannnnnnnnnnnnnnnnnnnnnnnnnngcagaggggcttcctaacccctgcctgataggtgcagaacgtcggctatcagagcaagcattgtggagcggttccttatgccaggctgccatgtgagatgatccaagaccaaaacaaggccctagactgcagtaaaacccagaactcaagtagggcagaaggtggaaggctcatatggatagaaggcccaaagtataagacagatggtttgagacttgagacccgaggactaagatggaaagcccatgttccaagatagatagaagcctcaggcctgaaaccaacaaaagcctcaagagccaagaaaacagagggtggcctgaattggaccgaaggcctgagttggatggaagtctcaaggcttgagttagaagtcttaagacctgggacaggacacatggaaggcctaagaactgagacttgtgacacaaggccaacgacctaagattagcccagggttgtagctggaagacctacaacccaaggatggaaggcccctgtcacaaagcctacctagatggatagaggacccaagcgaaaaaggtatctcaagactaacggccggaatctggaggcccatgacccagaacccaggaaggatagaagcttgaagacctggggaaatcccaagatgagaaccctaaaccctacctcttttctattgtttacacttcttactcttagatatttccagttctcctgtttatctttaagcctgattcttttgagatgtactttttgatgttgccggttacctttagattgacagtattatgcctgggccagtcttgagccagctttaaatcacagcttttacctatttgttaggctatagtgttttgtaaacttctgtttctattcacatcttctccacttgagagagacaccaaaatccagtcagtatctaatctggcttttgttaacttccctcaggagcagacattcatataggtgatactgtatttcagtcctttcttttgaccccagaagccctagactgagaagataaaatggtcaggttgttggggaaaaaaaagtgccaggctctctagagaaaaatgtgaagagatgctccaggccaatgagaagaattagacaagaaatacacagatgtgccagacttctgagaagcacctgccagcaacagcttccttctttgagcttaggtgagcaggattctggggtttgggatttctagtgatggttatggaaagggtgactgtgcctgggacaaagcgaggtcccaaggggacagcctgaactccctgctcatagtagtggccaaataatttggtggactgtgccaacgctactcctgggtttaatacccatctctaggcttaaagatgagagaacctgggactgttgagcatgtttaatactttccttgatttttttcttcctgtttatgtgggaagttgatttaaatgactgataatgtgtatgaaagcactgtaaaacataagagaaaaaccaattagtgtattggcaatcatgcagttaacatttgaaagtgcagtgtaaattgtgaagcattatgtaaatcacgggtccacagtttttctgtaagggtcaaatcataaatactttagactgtgggccatatggtttctgttacatatttgttttttaaacaacgtttttataaggtcaaatcattcttagtttttgagccaattggatttgggcctgctgttcatagcttaccaccccctgatgtattatttgttattcagagaaatttctgaatactactagtttccttttctgtgcctgtccct

SEQ ID NO: 183405 - DNA, 942 bp, Homo Sapiens
  misc_feature (89)..(97): n is a, c, g, or t
  misc_feature (543)..(555): n is a, c, g, or t
ttgggttaaatggttcaagatgtaacaactagttttaaaggtatttgctcattggtctggcttagagacaggaagacatatgagcaatnnnnnnnnngattcttttgcatttaccaatttagtaaaaatttattaaaactgaataaagtgctgttcttaagtgcttgaaagacgtaaaccaaagtgcactttatctcatttatcttatggtggaaacacaggaacaaattctctaagagactgtgtttctttagttgagaagaaacttcattgagtagctgtgatatgttcgatactaaggaaaaactaaacagatcacctttgacatgcgttgtagagtgggaataagagagggctttttattttttcgttcatacgagtattgatgaagatgatactaaatgctaaatgaaatatatctgctccaaaaggcatttattctgacttggagatgcaacaaaaacacaaaaatggaatgaagtgatactcttcatcaaacagaagtgactgttatctcaaccattttgttaaatcctaaacagnnnnnnnnnnnnntcatgacgaaaagacacttgcttattaattggcttggaaagtagaatataggagaaaggttactgtttattttttttcatgtattcattcattctacaaatatattcgggtgccaataggtacttggtataaggtttttggccccagagacatgggaaaaaaatgcatgccttcccagagaatgcctaatactttccttttggcttgttttcttgttaggggcatggcttagtccctaaataacattgtgtggtttaattcctactccgtatctcttctaccactctggccactacgataagcagtagctgggttttgtagtgagcttgctccttaagttacaggaactctccttataatagacacttcattttcctagtccatccc

SEQ ID NO: 183406 - DNA, 1702 bp, Homo Sapiens
  misc_feature (217)..(225): n is a, c, g, or t
ttggcacggcgaaatgagactgttcgtgagtgatggcgtcccgggttgcttgccggtgctggccgccgccgggagagcccggggcagagcagaggtgctcatcagcactgtaggcccggaagattgtgtggtcccgttcctgacccggcctaaggtccctgtcttgcagctggatagcggcaactacctcttctccactagtgcaatctgccgatannnnnnnnngttatctggctgggagcaagatgacctcactaaccagtggctggaatgggaagcgacagagctgcagccagctttgtctgctgccctgtactatttagtggtccaaggcaagaagggggaagatgttcttggttcagtgcggagagccctgactcacattgaccacagcttgagtcgtcagaactgtcctttcctggctggggagacagaatctctagccgacattgttttgtggggagccctatacccattactgcaagatcccgcctacctccctgaggagctgagtgccctgcacagctggttccagacactgagtacccaggaaccatgtcagcgagctgcagagactgtactgaaacagcaaggtgtcctggctctccggccttacctccaaaagcagccccagcccagccccgctgagggaagggctgtcaccaatgagcctgaggaggaggagctggctaccctatctgaggaggagattgctatggctgttactgcttgggagaagggcctagaaagtttgcccccgctgcggccccagcagaatccagtgttgcctgggctggagaaaggaatgtgctcatcaccagtgccctcccttacgtcaacaatgtcccccaccttgggaacatcattggttgtgtgctcagtgccgatgtctttgccaggtactctcgcctccgccagtggaacaccctctatctgtgtgggacagatgagtatggtacagcaacagagaccaaggctctggaggagggactaaccccccaggagatctgcgacaagtaccacatcatccatgctgacatctaccgctggtttaacatttcgtttgatatttttggtcgcaccaccactccacagcagaccaaaatcacccaggacattttccagcagttgctgaaacgaggttttgtgctgcaagatactgtggagcaactgcgatgtgagcactgtgctcgcttcctggctgaccgcttcgtggagggcgtgtgtcccttctgtggctatgaggaggctcggggtgaccagtgtgacaagtgtggcaagctcatcaatgctgtcgagcttaagaagcctcagtgtaaagtctgccgatcatgccctgtggtgcagtcgagccagcacctgtttctggacctgcctaagctggagaagcgactggaggagtggttggggaggacattgcctggcagtgactggacacccaatgcccagtttatcacccgttcttggcttcgggatggcctcaagccacgctgcataacccgagacctcaaatggggaacccctgtacccttagaggttttgaagacaagtattctatgtctggtttgatgccactattggctatctgtccatcacagccaactacacagaccagtgggagagatggtggaagaactcagagcaagtggacctgtatcagttcatggccaaagacaatgttcctttccatagcttagtcttt

SEQ ID NO: 183407 - DNA, 2259 bp, Homo Sapiens
ctttgtacaaaaaagttggcactgagcgtatcatgttaaagatgagcgggtggcagcgacagagccaaaatcagagctggaacctgaggagagagtgttcaagaaggaagtgtatcttcatacatcaccacacctgaaagcagatgtgcttttccagactgatccaactgcagagatggcagctgagtcattgcctttctccttcgggacactgtccagctgggagctggaagcctggtatgaggacctgcaagaggtcctgtcttcagatgaaaatgggggtacctatgtttcacctcctggaaatgaagaggaagaatcaaaaatcttcaccactcttgaccctgcttctctggcttggctgactgaggaggagccagaaccagcagaggtcacaagcacctcccagagccctcactctccagattccagtcagagctccctggctcaggaggaagaggaggaagaccaagggagaaccaggaaacggaaacagagtggtcattccccagcccgggctggaaagcagcgcatgaaggagaaagaacaggagaatgaaaggaaagtggcacagctagctgaagagaatgaacggctcaagcaggaaatcgagcgcctgaccagggaagtagaggcgactcgccgagctctgattgaccgaatggtgaatctgcaccaagcatgaacaattgggagcatcagtcccccacttgggccacactacccacctttcccagaagtggctactgactaccctctcactagtgccaatgatgtgaccctcaatcccacatacgcaggggaaggcttggagtagacaaaaggaaaggtctcagcttgtatatagagattgtacatttatttattactgtccctatctattaaagtgactttttatgagccaaggtcttttactttttcttcttgcctttaggggcttcagggggtttcccctcagctacagccaactgtttctttagatccaagagtttcgccacctccgcagcaacctcgttcttgtctgccttttgtgctttcagttctcggacaatgtttccttgttttgtcacttcatccatcagcgcttgtatctgctgtggcttggctgttgtaacagtctctacaactgctggcttcggggacgtttttgcctggccccctccaaagcgctgccttaaactttcaatctggtcattttccaatttttggaacaagggactgactgtgccaatctggtgtcctgctggtaaggtacacaggaagtttgtcagcaggatactgcaggctggaggtgggagctgcagctgggcctggattgtggcactaaccgtgggcatgtaaggctgaagcatgacagagagcaaggcagctatattcactgccaagccagtcactgttcctgcccgttgcctgtcagcctcactgcctttaatccgcttccagggctcattcacctgaatatattggttgccatgtcgagatatggtgaggatactgcgcaaggcatcccggatccgaaccttctcaagtagctggtgatagtgctggagctccagggtgacatgggccagcaggcgctgatcatcaggggtgagcaccatctcaggcacatagcccccaaagaacttagacacaaacatcccagctctgttgatgaagttgcccaggttgttaagcagctcagaattattcttcagcagcaggtccgtccaggagaaagcactgtcctggccctcaggccgaatgtacagcagatagaagcgccagatgtcagcagggatccccgtgtcctgggccatgtccccaaacactcccacaccgcggctcttagagaatttcccatcctcatagttcaggtactctgtagcaatgaggtggctgaccaaggtatagttatcctcagctcctagggctgagcaaggaaagactaagctatggaaaggaacattgtctttggccatgaactgatacaggtccacttgctctgggttcttccaccatctctcccactggtctgtgtagttggctgtgatggacagatagccaatagtggcatcaaaccagacatagaataccttgtcttcaaaaccttctaagggtacaggggttccccatttgaggtctcgggttatgcagcgtggcttgaggccatcccgaagccaagaacgggtgataaactgggcattgggtgtccagtcactgccaggcaatgtcctccccaaccactccccaacttttttgtacaaagttggcttttat

SEQ ID NO: 183408 - DNA, 968 bp, Homo Sapiens
acaaaaaagttgggtggaggcgcccgcgtgagtaaatgccgcagattctggaaagttctgatcagtgcgatacataaggctgaggaagtgggacctccccttttgggtcggtagttcagcgccggcgccggtgtgcgagccgcggcagagtgaggcaggcaacccgaggtgcggagcgacctgcggaggctgagccccgctttctcccagggtttcttatcagccagccgccgctgtccccgggggagtaggaggctcctgacaggccgcggctgtctgtgtgtccttctgagtgtcagaggaacggccagaccccgcgggccggagcagaacgcggccagggcagaaagcggcggcaggagaagcaggcagggggccggaggacgcagaccgagacccgaggcggaggcggaccgcgagccggccatgtcggtggtggggttggacgtgggctcgcagagctgctacatcgcggtagcccgggccgggggcatcgagaccatcgccaatgagttcagcgaccggtgcaccccgtcagtcatatcatttggatcaaaaaatagaacaatcggagttgcagccaaaaatcagcaaatcactcatgcaaacaatacggtgtctaacttcaaaagatttcatggccgagcattcaatgaccccttcattcaaaaggagaaggaaaacttgagttacgatttggttccattgaaaaatggtggagttggaataaaggtaatgtacatgggtgaagaacatctatttagtgtggagcagataacagccatgttgttgactaagctgaaggaaactgctgaaaacagcctcaagaaaccagtaacagattgtgttatttcagtcccctccttctttacagatgctgagaggcgatctgtgttagatgctgcacagattgttggcctaaactgtttaagacttatgaatgacatgacagctgttgctttgaatta

SEQ ID NO: 183409 - DNA, 895 bp, Homo Sapiens
ggaaaccgagtggggactttactgatagtgacagtgatgacttcggaaaggctgacggccggtacttcagggtgtgtttcaaaaagctgcccctggagggaggtggtagggaggcggtggggagctgcactcaccccggcctgtcccctccagctcagccagcagtcacactgcccaaatttctttcttttcctctgccgcctgctcagcccgctgctcaaggcctttgcacaggctgccgccttcctccgccagggccagctgcccgatactggtgaggcccttgttcccttgcagtcctcgaggcaggctgtgtctgtgctgggtgccaggtctaggtcttctctcttctgcagagttgggctacacagagcagctgttccagttcctgcaggccaccgcccaggaagaagggatcttcggtgagtcccaaccagtcagcccaggctcctgcaggcagtggtgtttgctggtggctgctgccccctgcaggacagtgacaacccaactctaggaaggcaggctgcagagtacagtcttctgtccagtcagagctctatccctccctgggcttctttaaacaagaggagagaagcctgtgcccagtggctctctgttctccctacctagagccttcacttctctcttctttccagagtgtgcggacccaaagctcgccatcagtgctgtctggaccttcagagaccttgagaaagacaggaggtttcctgaatacaccgacacctgggtggaggtgggggggtcccagtcaggatgacatcccctgggtaaaaggtaacaaactgggacacccaggctatcaggtcctctgtcttgaataccatctggttggtgttgttgaatggtggaccacttcccaacttttttgtacaaa

SEQ ID NO: 183410 - DNA, 536 bp, Homo Sapiens
actttgtacaaaaaagttggcttgagaaacccaaacctgtaaaaccagtgacgttttccacaggcatcaaaatgggtcaacatatttcactggcacctattcacaagcttgaagaagctctgtatgaataccagccactgcagatagagacatatggaccacatgttcctgagcttgagatgctaggaagacttgggtatttaaaccatgtcagagctgcctcaccacaggaccttgctggaggctatacttcttctcttgcttgtcacagagcactacaggatgcattcagtgggcttttctggcagcccagttaaccatttataagatttggaccttggagctgaaccagggagctagcaaaagtaaagcagacttataaaattatagctatgtgcagctgcacaacacagtccttccactagcagctgtgttaaagtatttataaggagaaaatttcataactaagttgagtaatataagggatatatatttgtgaaaaataatttttacttatatttttcagaggatttgac

SEQ ID NO: 183411 - DNA, 1773 bp, Homo Sapiens
ttgggtcagctgcgtgagctcactgtcagacaagatggaagaagaagggctggagtgtccaaactcttcctctgaaaaacgctattttcctgaatccctggattccagcgatggggatgaggaagaggttttggcctgtgaggatttggaacttaacccctttgatggattgccatattcatcacgttattataaacttctgaaagaaagagaagatcttcctatatggaaagaaaaatactcctttatggagaacctgcttcaaaatcaaatcgtgattgtttcaggagatgctaaatgtggtaagagcgctcaggttcctcagtggtgtgctgaatattgtctttccatccactaccagcacgggggcgtgatatgcacacaggtccacaagcagactgtggtccagctcgccctgcgggtggcggatgaaatggatgttaacattggtcatgaggttggctacgtgatccctttcgagaactgctgtaccaacgaaacaatcctgaggtattgtactgatgatatgctgcaaagagaaatgatgtccaatccttttttgggtagctatggggtcatcatcttagatgatattcatgaaagaagcattgcaactgatgtgttacttggacttcttaaagatgttttactagcaagaccagaactgaagctcataattaactcctcacctcacctgatcagcaaactcaattcttattatggaaacgtgcctgtcatagaagtgaaaaataaacaccctgtggaggttgtgtaccttagtgaggctcaaaaggattcttttgagtctattttacgccttatctttgaaattcaccactcgggtgagaaaggtgacattgtagtctttctggcctgtgaacaagatattgagaaagtctgtgaaactgtctatcaaggatctaacctaaacccagatcttggagaactggtggttgttcctttgtatccaaaagagaaatgttcattgttcaagccactcgatgaaacagaaaaaagatgccaagtttatcaaagaagagtggtgttaactactagctctggagagtttttgatctggagcaactcagtcagatttgttatcgatgtgggtgtggaaagaagaaaggtgtacaacccgagaataagagcaaactcgctcgtcatgcagcccatcagccagagccaggcagagatacgcaagcagattcttggctcatcttcttcaggaaaatttttctgcctgtacactgaagaatttgcctccaaagacatgacgccactgaagccagcagaaatgcaggaagccaacctaacaagcatggtgctttttatgaagaggatagacattgcgggcctaggccactgtgacttcatgaacagaccaggtagccttatgctcccatgtcagccaggcattaggctgagattcaccttctcctgcccattctctgtcctgagttcacatgatgcgcagcaatgcacacaagcatggagggggcgttggtttggactgaagcattttcctgctagagcaccagaaagtttgatgcaggcattggaagacttagattatctggcagcactggataatgatggaaatctttctgaatttggaatcatcatgtcagagtttcctcttgatccacaactctcgaagtctatcttaggcgtcctgtgaatttgactgtgtagatgaggtgctaacaatcgcagccatggtaacagctccaaattgcttttcacatgtgccacatggagctgaagaaggctgcc

SEQ ID NO: 183412 - DNA, 2146 bp, Homo Sapiens
ttggaacatggcgtccaggtctaagcggcgtgccgtggaaagtggggttccgcagccgccggatcccccagtccagcgcgacgaggaagaggaaaaagaagtcgaaaatgaggatgaagacgatgatgacagtgacaaggaaaaggatgaagaggacgaggtcattgacgaggaagtgaatattgaatttgaagcttattccctatcagataatgattatgacggaattaagaaattactgcagcagctttttctaaaggctcctgtgaacactgcagaactaacagatctcttaattcaacagaaccatattgggagtgtgattaagcaaacggatgtttcagaagacagcaatgatgatatggatgaagatgaggtttttggtttcataagccttttaaatttaactgaaagaaagggtacccagtgtgttgaacaaattcaagagttggttctacgcttctgtgagaagaactgtgaaaagagcatggttgaacagctggacaagtttttaaatgacaccaccaagcctgtgggccttctcctaagtgaaagattcattaatgtccctccacagatcgctctgcccatgtaccagcagcttcagaaagaactggcgggggcacacagaaccaataagccatgtgggaagtgctacttttaccttctgattagtaagacatttgtggaagcaggaaaaaacaattccaaaaagaaacctagcaacaaaaagaaagctgcgttaatgtttgcaaatgcagaggaagaatttttctatgaggagcagggaaaacctgaggtgcttggaggtccagacacaagaagaggattggaaccagttccgatacagcacaatggttggtctgttcccccagtattagaataaattaaaacatacaagccaggatgaatgaagccaataggaaataaaaaacaggcacacaacattatttggggaaaaacacctctagtgacacattttcttcatctgcactgattatttcagcaaaagaaatctagtatgttttcatacatctgatgtataaatttgctgaactttgagttagttttcttaagataatttttcatattaagaaaattttccttttctaacctattaaaatacctcactatcatttcaaaaggttaaatgagttgatcactatctctgctctgtgctcctcaaaatataatttcaaatggatccgatctaaatctatacctagtgcagatttgcaaaaaaagaaaaggaatagtcattaaggatacctgttaccatggctgcgattgttagcacttcatctacacagtcaaattcacaggacgctaagatagacttcgagagttgtggatcaagaggaaactctgacatgatgattccaaattcagaaagatttccatcattatccagtgctgccagataatctaagtcttccaatgcctgcatcaaactttctggtgctaggaaaggaaaaaaataataatttaagagtctcatatggctaagatggagaaacaggtactggacttttccctcctgcatgaaacaagcaaacaatggacaaaatatgtgaaacaacggtttgcaagccaccaaataccagggagtgaaggatagtgattcttgagagggcaaactcaggaggggagccctgtgattgtccagctcatgctccgaggagggtcccagctgcagtgtgcatgcggggggaacccaggtggagcctgccagcctccctgcagtaggaaaacaatgccagggatccagggagactaaggtggccggaactcgcggtcacagtactggagagagacacacagatctaagtcgggggccagagggagctccctcaactaggcagcacagccctactgatcagcgcatgtgtgtaaggaaccacctcaagccagagaaagagccatgtgagaaaattaaaagaacagtggtgctgacacaggacctagggtaggcctgttcccaccaccctagctggaaaacctcatgatttatggggcactgggtagaaaacacaagtgagaaaccctagatggtcactgccacctgacacagctatacagcaggacctgaaaggatcacactgcatcctaggacaaagctcaaaagtacctctgggaactacaaaat

SEQ ID NO: 183413 - DNA, 1824 bp, Homo Sapiens
actttgtacaaaaaagttggctctgggcctccctctgctgcctgctggtgttggccaatgcccggagcaggccctctttccatcccctgtcggatgagctggtcaactatgtcaacaaacggaataccacgtggcaggccgggcacaacttctacaacgtggacatgagctacttgaagaggctatgtggtaccttcctgggtgggcccaagccaccccagagagttatgtttaccgaggacctgaagctgcctgcaagcttcgatgcacgggaacaatggccacagtgtcccaccatcaaagagatcagagaccagggctcctgtggctcctgctgggccttcggggctgtggaagccatctctgaccggatctgcatccacaccaatgcgcacgtcagcgtggaggtgtcggcggaggacctgctcacctgctgtggcagcatgtgtggggacggctgtaatggtggctatcctgctgaagcttggaacttctggacaagaaaaggcctggtttctggtggcctctatgaatcccatgtagggtgcagaccgtactccatccctccctgtgagcaccacgtcaacggctcccggcccccatgcacgggggagggagatacccccaagtgtagcaagatctgtgagcctggctacagcccgacctacaaacaggacaagcactacggatacaattcctacagcgtctccaatagcgagaaggacatcatggccgagatctacaaaaacggccccgtggagggagctttctctgtgtattcggacttcctgctctacaagtcaggagtgtaccaacacgtcaccggagagatgatgggtggccatgccatccgcatcctgggctggggagtggagaatggcacaccctactggctggttgccaactcctggaacactgactggggtgacaatggcttctttaaaatactcagaggacaggatcactgtggaatcgaatcagaagtggtggctggaattccacgcaccgatcagtactgggaaaagatctaatctgccgtgggcctgtcgtgccagtcctgggggcgagatgggggtagaaatgcattttattctttaagttcacgtaagatacaagtttcagacagggtctgaaggactggattggccaaacatcagacctgtcttccaaggagaccaagtcctggctacatcccagcctgtggttacagtgcagacaggccatgtgagccaccgctgccagcacagagcgtccttccccctgtagactagtgccgtagggagtacctgctgccccagctgactgtggccccctccgtgatccatccatctccagggagcaagacagagacccaggaatggaaagcggagttcctaacaggatgaaagttcccccatcagttcccccagtacctccaagcaagtagctttccacatttgtcacagaaatcagaggagagatggtgttgggagccctttggagaacgccagtctcccaggccccctgcatctatcgagtttgcaatgtcacaacctctctgatcttgtgctcagcatgattctttaatagaagttttattttttcgtgcactctgctaatcatgtgggtgagccagtggaacagcgggagacctgtgctagttttacagattgcctccttatgacgcggctcaaaaggaaccaagtggtcaggagttgtttctgaccactgatctctactaccacaaggagaatagtttaggagaaaccagcttttactgtttttgaaaaatacagcttcaccctgtcaagttaacaaggaatgccctgtgcccaataaaaggtt

SEQ ID NO: 183414 - DNA, 1075 bp, Homo Sapiens
ttggagctgctgcacccagctctgtaggtgacttttaaatgattatacaatggaaataacattcattgacatttctgtggtttgaatccagagagatacttcttatagaaaaacaaatgtttatgctaaaaataacaccaaaatgtgggaactcttaaggacttttcccttcaagtgtgaaggaaggtgtgatgaatgctgtggagaggcatctggaacagaaattcaaaataaagccttgacattaaataccccttccactgctcactttgtggatggtagcatgagctgtctaccaagaagaaacctgctgctctcttaattttaatatttcctaatttgttgatggccttttgtgttgtgaaccacaacaaagagaggcctcttttgtggctggttattccagttccctgggattttaaattctttggtctattaagtatccttgtattggatacgtaataccttagtgctgtcataatgttgtacaagatcatgatcagcttctccctttcttcattttctgtgatttaaccatgttctttcctgtctctttccatttaagatattttatttgaatactgataaacattttatcctgataaggaagaatgttcttgttacttgatatacctctgtcttcattctcttacagcttatctttccttaggttgatggtgcctcatttaataagtagatctctacttaagctaaaggattatgatcatatggtgttggagactattagctattagatttttctcaaaatatgagttttgtacaatggaatgaaaaagtgacttcatatacgtaagactggtgcctaagaatgacttgaatgttatcagtactaccacagaactataatatacattgccttttctcagcagcattgaattcaacttatttatttcctctatttgtagctttttgttctagagtcagaacaagtggactttgctttgaatattttagatgggacaaaattgttcatcttcggaatttatttaaagaaagatctactggtacaggtgtaaaatacttacagatatgattttttgtttgttcatgcaac

SEQ ID NO: 183415 - DNA, 1765 bp, Homo Sapiens
  misc_feature (1312)..(1320): n is a, c, g, or t
ttggcaccgggctgctctggtctcgtcggtcccctcctccgccccgtcgtcctgactctctctccctcctttcctcagaggatgtccggcttccagatcaacctcaacccgctcaaggagccactcggcttcatcaaggtcctcgagtggattgcttctatctttgcttttgccacctgtggaggttttaagggccaaacagaaattcaagtgaattgtcctcctgcagttactgagaataaaactgttacagctacttttggttatccattcaggttgaatgaggcatcatttcagccacctccaggtgtaaacatatgtgatgtaaattggaaagattacgtcctcataggcgattactcttcttctgcacaattctatgttacctttgcagtctttgtgttcctgtactgcattgctgcccttctgctttatgttggctacacgagtctgtatctggatagtcgtaaacttcctatgatagactttgttgttacacttgttgccacttttttgtggttggtgagcacttcagcctgggctaaagctctgacagatattaaaatagctactggtcacaatattattgatgaacttccgccttgtaagaagaaagcagtactgtgttactttggctctgtgaccagtatgggatccctaaatgtatctgtgatatttggctttctaaatatgatactctggggaggaaatgcttggtttgtgtacaaggagaccagcctacacagtccatcaaatacatctgcccctcatagccaaggaggtattccacctcctaccggaatataattaaagggagaaatacactgtatgaagtatatgttgatactatgacatgttgccaacaccttgagaagcattatttgtttctaataaaagtaatggctttgtcaatatattggtgggtttaaaactttgctgcttttttacataaagcctgtgcctttcctagaaagttaagatgtaaatgtattctcacatgtaaatttgaaagttcaggggtctattatgaaatgatacacatttttaaatgaaccataatttttttcactaagctgtttgccttccaaagtgtttacaccttaagccttaacatgtatcttcattcagaaaacagttatattgtcataccatagtaggaagaaaaacctttatttggaatatacactactgtaagtttgtacagatcatatacctaccacctgtctttgcttaaagagccttgattacataaatatgtaggaaaaaacatattgagttcaaaatttatatctaacattgtttatgttatgannnnnnnnnaattgcaaagactaggtgtatatttttttctgtttttctaaatgacccgtggtacttaataggtgtactaaaattgtgttgggagcagggatttggaaatttctgagagatgtgtagttaatttagtaattctgtttcatgagatatgatctgttatgctagtggtttaataggcttgctatgtaagtagaacgtggctcaactagatatctttatatgtatgggcattactcttagtgatatttgtttccctgtcctttgttgctcatgctgtttaagtgcaagctgagacccagcctctttgtaagtacagtaaaataatccaccgttttttacagacccttgtcaagggttaaaaaaattaagattgctttccatgtttgaaattaccattgaaagtcaatgaagttgctatttgagtttagcattgatattgtgaaaataa

SEQ ID NO: 183416 - DNA, 1278 bp, Homo Sapiens
gccaactttgtacaaaaaagttggggatcttccattaagaaaatgaatctttaaaagcacatgttcaggaagtagcacaacataacttgaaagaggcctcttctgcatcacagtttgaagaacttgagattgtgttgaaagaaaaggaaaatgaattgaagaggttagaagccatgctaaaagagagggagagtgatctttctagcaaaacacagctgttacaggatgtacaagatgaaaacaaattgtttaagtcccaaattgagcagcttaaacaacaaaactaccaacaggcatcttcttttccccctcatgaagaattattaaaagtaatttcagaaagagagaaagaaataagtggtctctggaatgagttagattctttgaaggatgcagttgaacaccagaggaagaaaaacaatgaccttcgggagaaaaactgggaagcaatggaagcattggcatcaactgaaaaaatgctgcaggacaaagtgaacaagacttccaaggaaaggcagcaacaggtggaagctgttgagttggaggctaaagaagttctcaaaaaattatttccaaaggtgtctgtcccttctaatttgagttatggtgaatggttgcatggatttgaaaaaaaggcaaaagaatgtatggctggaacttcagggtcagaggaggttaaggttctagagcacaagttgaaagaagctgatgaaatgcacacattgttacagctagagtgtgaaaaatacaaatccgtccttgcagaaacagaaggaattttacagaagctacagagaagtgttgagcaagaagaaaataaatggaaagttaaggtcgatgaatcacacaagactattaaacagatgcagtcatcatttacatcttcagaacaagagctagagcgattaagaagcgaaaataaggatattgaaaatctgagaagagaacgagaacatttggaaatggaactagaaaaggcagagatggaacgatctacctatgttacagaagtcagagagctgaaagatctgttgactgaattgcagaaaaaacttgatgattcatattctgaagcagtaagacagaatgaagagctaaatttgttgaaggcacagttaaatgaaacactcacaaaacttagaactgaacaaaatgaaagacagaaatagctggtgatttgcataaagctcaacagtcactggagcttatccagtcaaaaatagtaaaagctgctggagacactactgttattgaaatagtgatgtttccccagaaacg

SEQ ID NO: 183417 - DNA, 3131 bp, Homo Sapiens
  misc_feature (137)..(167): n is a, c, g, or t
tccagaatggaaacctccatgaatccgactctgagagtgtacctcgagactttaaattatcagatgctttggcagtagaagatgatcaagttgcacctgttccattgaatgtcgttgaaacttcaagtagtgttagnnnnnnnnnnnnnnnnnnnnnnnnnnnnnnncctgtgcttgaagagcaggtcatcaaagaaagtgacgcatcaaagattcctggcaaaaaagtagaacctgtcccagttactaaacagcccacccctccctctgaagcagctgcctcgaagaagaaaccagggcagaagaagtctaaaaatggaagcgatgaccaggataaaaaggtggaaactctcatggtaccatcaaaaaggcaagaagcattgcccctccaccaagagactaaacaagaaagtggatcagggaagaagaaagcttcatcaaagaaacaaaagacagaaaatgtcttcgtagatgaaccccttattcatgcaactacttatattcctttgatggataatgctgactcaagtcctgtggtagataagagagaggttattgatttgcttaaacctgaccaagtagaagggatccagaaatctgggactaaaaaactgaagaccgaaactgacaaagaaaatgctgaagtgaagtttaaagattttcttctgtccttgaagactatgatgttttctgaagatgaggctctttgtgttgtagacttgctaaaggagaagtctggtgtaatacaagatgctttaaagaagtcaagtaagggagaattgactacgcttatacatcagcttcaagaaaaggacaagttactcgctgctgtgaaggaagatgctgctgctacaaaggatcggtgtaagcagttaacccaggaaatgatgacagagaaagaaagaagcaatgtggttataacaaggatgaaagatcgaattggaacattagaaaaggaacataatgtatttcaaaacaaaatacatgtcagttatcaagagactcaacagatgcagatgaagtttcagcaagttcgtgagcagatggaggcagagatagctcacttgaagcaggaaaatggtatactgagagatgcagtcagcaacactacaaatcaactggaaagcaagcagtctgcagaactaaataaactacgccaggattatgctaggttggtgaatgagctgactgagaaaacaggaaagctacagcaagaggaagtccaaaagaagaatgctgagcaagcagctactcagttgaaggttcaactacaagaagctgagagaaggtgggaagaagttcagagctacatcaggaagagaacagcggaacatgaggcagcacagcaagatttacagagtaaatttgtggccaaagaaaatgaagtacagagtctgcatagtaagcttacagataccttggtatcaaaacaacagttggagcaaagactaatgcagttaatggaatcagagcagaaaagggtgaacaaagaagagtctctacaaatgcaggttcaggatattttggagcagaatgaggctttgaaagctcaaattcagcagttccattcccagatagcagcccagacctccgcttcagttctagcagaagaattacataaagtgattgcagaaaaggataagcagataaaacagactgaagattctttagcaagtgaacgtgatcgtttaacaagtaaagaagaggaacttaaggatatacagaatatgaatttcttattaaaagctgaagtgcagaaattacaggccctggcaaatgagcaggctgctgctgcacatgaattggagaagatgcaacaaagtgtttatgttaaagatgataaaataagattgctggaagagcaactacaacatgaaatttcaaacaaaatggaagaatttaagattctaaatgaccaaaacaaagcattaaaatcagaagttcagaagctacagactcttgtttctgaacagcctaataaggatgttgtggaacaaatggaaaaatgcattcaagaaaaagatgagaagttaaagactgtggaagaattacttgaaactggacttattcaggtggcaactaaagaagaggagctgaatgcaataagaacagaaaattcatctctgacaaaagaagttcaagacttaaaagctaagcaaaatgatcaggtttcttttgcctctctagttgaagaacttaagaaagtgatccatgagaaagatggaaagatcaagtctgtagaagagcttctggaggcagaacttctcaaagttgctaacaaggagaaaactgttcaggatttgaaacaggaaataaaggctctaaaagaagaaataggaaatgtccagcttgaaaaggctcaacagttatctatcacttccaaagttcaggagcttcagaacttattaaaaggaaaagaggaacagatgaataccatgaaggctgttttggaagagaaagagaaagacctagccaatacagggaagtggttacaggatcttcaagaagaaaatgaatctttaaaagcacatgttcaggaagtagcacaacataacttgaaagaggcctcttctgcatcacagtttgaagaacttgagattgtgttgaaagaaaaggaaaatgaattgaagaggttagaagccatgctaaaagagagggagagtgatctttctagcaaaacacagctgttacaggatgtacaagatgaaaacaaattgtttaagtcccaaattgagcagcttaaacaacaaaactaccaacaggcatcttcttttccccctcatgaagaattattaaaagtaatttcagaaagagagaaagaaataagtggtctctggaatgagttagattctttgaaggatgcagttgaacaccagaggaagaaaaacaatgaaaggcagcaacaggtggaagctgttgagttggaggctaaagaagttctcaaaaaattatttccaaaggtgtctgtcccttctaatttgagttatggtgaatggttgcatggatttgaaaaaaaggcaaaagaatgtatggctggaacttcagggtcagaggaggttaaggttctagagcacaagttgaaagaagctgatgaaatgcacacattgttacagctagagtgtgaaaaatac

SEQ ID NO: 183418 - DNA, 1087 bp, Homo Sapiens
  misc_feature (883)..(892): n is a, c, g, or t
tttgtacaaaaaagttggcatggatttgaaaaaaaggcaaaagaatgtatggctggaacttcagggtcagaggaggttaaggttctagagcacaagttgaaagaagctgatgaaatgcacacattgttacagctagagtgtgaaaaatacaaatccgtccttgcagaaacagaaggaattttacagaagctacagagaagtgttgagcaagaagaaaataaatggaaagttaaggtcgatgaatcacacaagactattaaacagatgcagtcatcatttacatcttcagaacaagagctagagcgattaagaagcgaaaataaggatattgaaaatctgagaagagaacgagaacatttggaaatggaactagaaaaggcagagatggaacgatctacctatgttacagaagtcagagagttgaaggcacagttaaatgaaacactcacaaaacttagaactgaacaaaatgaaagacagaaggtagctggtgatttgcataaggctcaacagtcactggagcttatccagtcaaaaatagtaaaagctgctggagacactactgttattgaaaatagtgatgtttccccagaaacggagtcttctgagaaggagacaatgtctgtaagtctaaatcagactgtaacacagttacagcagttgcttcaggcggtaaaccaacagctcacaaaggagaaagagcactaccaggtgttagagtgaagtaattgggaaactgttcatttgaggataaaaaaggcattgtattatattttgccaaattaaagccttatttatgttttcaccctttctactttgtcagaaacactgaacagagttttgtcttttctaatccttgttagactactgatttaaagaaggnnnnnnnnnngccaactctgtagacaccttcagagtttagttttataataaaaactgtttgaataattagacctttacattcctgaagataaacatgtaatcttttatcttattttgctcaataaaattgttcagaaggatcaaagtgggtaaagacaatgtaaaatttaacattttaatactgatgttgtacactgttttactt

SEQ ID NO: 183419 - DNA, 1665 bp, Homo Sapiens
  misc_feature (307)..(314): n is a, c, g, or t
  misc_feature (335)..(371): n is a, c, g, or t
  misc_feature (1284)..(1307): n is a, c, g, or t
  misc_feature (1409)..(1421): n is a, c, g, or t
cacatgttacatcttgtatatctatggaatattcaatctcactgtgcacacctttgactacggctgcagaagtgttcctttagacaaagttgtgacccattttactctggataagggcagaaacagttcacattccattatttgtaaagttacctgctgttggctttcattatttttgctacactcattttatttgtatttaaatgttttaggcaacctaaaaacaaatgtaaaagtaaagatgcaggaaaaatgaattgcttgatattcattacttcatgtatatcaagcacagcagtaaaacaannnnnnnnaaacccatgtatttaacttcnnnnnnnnnnnnnnnnnnnnnnnnnnnnnnnnnnnnngatacttgcctaacatgcatgtgctgtaaaaatagttaacagggaaataacttgagatgatggctagctttgtttaatgtcttatgaaattttcatgaacaatccaagcataattgttaagaacacgtgtattaaattcatgtaagtggaataaaagttttatgaatggacttttcaactactttctctacagcttttcatgtaaattagtcttggttctgaaacttctctaaaggaaattgtacattttttgaaatttattccttattccctcttggcagctaatgggctcttaccaagtttaaacacaaaatttatcataacaaaaatactactaatataactactgtttccatgtcccatgatcccctctcttcctccccaccctgaaaaaaatgagttcctattttttctgggagagggggggattgattagaaaaaaatgtagtgtgttccatttaaaattttggcatatggcattttctaacttaggaagccacaatgttcttggcccatcatgacattgggtagcattaactgtaagttttgtgcttccaaatcactttttggtttttaagaatttcttgatactcttatagcctgccttcaattttgatcctttattctttctatttgtcaggtgcacaagattaccttcctgttttagccttctgtcttgtcaccaaccattcttacttggtggccatgtacttggaaaaaggccgcatgatctttctggctccactcagtgtctaaggcaccctgcttcctttgcttgcatcccacagactatttccctcatcctatttactgcagcaaatctctccttagttgaatgagactgtgtttatctccctttaaaaccctacctatcctgaatggtctgtcattgtttgcctttaaaatccttccnnnnnnnnnnnnnnnnnnnnnnnnaataatgatgggggtaagttatacccaaaggtcactttacaaaatatttcctcagtactttgcagaaaaccccaaacaaaaatgcccttttaaaaaaggggnnnnnnnnnnnnnagaatgtaaggtcctcaagagcagggacaaagttttttgtatgtttttttgtgcctagtacactgtaaatgctcaataaatattgatgatgggaggcagtgagtcttgatgataagggtgagaaactgaaatcccaaacactgttttgttgcttgttttattatgacctcagattaaattgggaaatattggcccttttgaataattgtcccaaatattacattcaaataaaagtgcaatggag

SEQ ID NO: 183420 - DNA, 1645 bp, Homo Sapiens
gagcaatgcttttcctttaaaagccaactttgtacaaaaaagttggctaaaagaagaccataggaaatgtccagcttgaaaaggctcaacagttatctatcacttccaaagttcaggagcttcagaacttattaaaaggaaaagaggaacagatgaataccatgaaggctgttttggaagagaaagagaaagacctagccaatacagggaagtggttacaggatcttcaagaagaaaatgaatctttaaaagcacatgttcaggaagtagcacaacataacttgaaagaggcctcttctgcatcacagtttgaagaacttgagattgtgttgaaagaaaaggaaaatgaattgaagaggttagaagccatgctaaaagagagggagagtgatctttctagcaaaacacagctgttacaggatgtacaagatgaaaacaaattgtttaagtcccaaattgagcagcttaaacaacaaaactaccaacaggcatcttcttttccccctcatgaagaattattaaaagtaatttcagaaagagagaaagaaataagtggtctctggaatgagttagattctttgaaggatgcagttgaacaccagaggaagaaaaacaatgaaaggcagcaacaggtggaagctgttgagttggaggctaaagaagttctcaaaaaattatttccaaaggtgtctgtcccttctaatttgagttatggtgaatggttgcatggatttgaaaaaaaggcaaaagaatgtatggctggaacttcagggtcagaggaggttaaggttctagagcacaagttgaaagaagctgatgaaatgcacacattgttacagctagagtgggaaaaatacaaatccgtccttgcagaaacagaaggaattttacagaagctacagagaagtgttgagcaagaagaaaataaatggaaagttaaggtcgatgaatcacacaagactattaaacagatgcagtcatcatttacatcttcagaacaagagctagagcgattaagaagcgaaaataaggatattgaaaatctgagaagagaacgagaacatttggaaatggaactagaaaaggcagagatggaacgatctacctatgttacagaagtcagagagttgaaggcacagttaaatgaaacactcacaaaacttagaactgaacaaaatgaaagacagaaggtagctggtgatttgcataaggctcaacagtcactggagcttatccagtcaaaaatagtaaaagctgctggagacactactgttattgaaaatagtgatgtttccccagaaacggagtcttctgagaaggagacaatgtctgtaagtctaaatcagactgtaacacagttacagcagttgcttcaggcggtaaaccaacagctcacaaaggagaaagagcactaccaggtgttagagtgatcatcctctggcctaccttgacacatgctctccttcaaaatgctaattcagagtgaagtaattgggaaactgttcatttgaggataaaaaaggcattgtattatattttgccaaattaaagccttatttatgttttcaccctttctactttgtcagaaacactgaacagagttttgtcttttctaatccttgttagactactgatttaaagaagg

SEQ ID NO: 183421 - DNA, 1859 bp, Homo Sapiens
  misc_feature (1562)..(1607): n is a, c, g, or t
actttgtacaaaaaagttggcggacacagaacatccagtcatggataaaaatgagctggttcagaaggccaaactggccgagcaggctgagcgatatgatgacatggcagcctgcatgaagtctgtaactgagcaaggagctgaattatccaatgaggagaggaatcttctctcagttgcttataaaaatgttgtaggagcccgtaggtcatcttggagggtcgtctcaagtattgaacaaaagacggaaggtgctgagaaaaaacagcagatggctcgagaatacagagagaaaattgagacggagctaagagatatctgcaatgatgtactgtctcttttggaaaagttcttgatccccaatgcttcacaagcagagagcaaagtcttctatttgaaaatgaaaggagattactaccgttacttggctgaggttgccgctggtgatgacaagaaagggattgtcgatcagtcacaacaagcataccaagaagcttttgaaatcagcaaaaaggaaatgcaaccaacacatcctatcagactgggtctggcccttaacttctctgtgttctattatgagattctgaactccccagagaaagcctgctctcttgcaaagacagcttttgatgaagccattgctgaacttgatacattaagtgaagagtcatacaaagacagcacgctaataatgcaattactgagagacaacttgacattgtggacatcggatacccaaggagacgaagctgaagcaggagaaggaggggaaaattaaccggccttccaacttttgtctgcctcattctaaaatttacacagtagaccatttgtcatccatgctgtcccacaaatagttttttgtttacgatttatgacaggtttatgttacttctatttgaatttctatatttcccatgtggtttttatgtttaatattaggggagtagagccagttaacatttagggagttatctgttttcatcttgaggtggccaatatggggatgtggaatttttatacaagttataagtgtttggcatagtacttttggtacattgtggcttcaaaagggccagtgtaaaactgcttccatgtctaagcaaagaaaactgcctacatactggtttgtcctggcggggaataaaagggatcattggttccagtcacaggtgtagtaattgtgggtactttaaggtttggagcacttacaaggctgtggtagaatcataccccatggataccacatattaaaccatgtatatctgtggaatactcaatgtgtacacctttgactacagctgcagaagtgttcctttagacaaagttgtgacccattttactctggataagggcagaaacggttcacattccattatttgtaaagttacctgctgttagctttcattatttttgctacactcattttatttgtatttaaatgttttaggcaacctaagaacaaatgtaaaagtaaagatgcaggaaaaatgaattgcttggtattcattacttcatgtatatcaagcacagcagtaaaacaaaaacccatgtatttaacnnnnnnnnnnnnnnnnnnnnnnnnnnnnnnnnnnnnnnnnnnnnnngatacttgcctaacatgcatgtgctgtaaaaatagttaacagggaaataacttgagatgatggctagctttgtttaatgtcttatgaaattttcatgaacaatccaagcataattgttaagaacacgtgtattaaattcatgtaagtggaaataaaagttttatgaatggacttttcaactactgtctctacagcttttcatgtaaattagtcttggttctgaaacttctctaaaggaattgtacatttttt

SEQ ID NO: 183422 - DNA, 1621 bp, Homo Sapiens
ataaaagccaactttgtacaaaaaagttggtgaaaagataaaggccaggggcttgcctgataatatatcttccgtgttgaacaaactagtggtggtgaaactcaatggtggtttgggaaccagcatgggctgcaaaggccctaaaagtctgattggtgtgaggaatgagaatacctttctggatgtgactgttcagcaaattgaacatttgaataaaacctacaatacagatgttcctcttgttttaatgaactcttttaacacggatgaagataccaaaaaaatactacagaagtacaatcattgtcgtgtgaaaatctacactttcaatcaaagcaggtacccgaggattaataaagaatctttacttcctgtagcaaaggacgtgtcttactcaggggaaaatacagaagcttggtaccctccaggtcatggtgatatttacgccagtttctacaactctggattgcttgatacctttataggagaaggcaaagagtatatttttgtgtctaacatagataatctgggtgccacagtggatctgtatattcttaatcatctaatgaacccacccaatggaaaacgctgtgaatttgtcatggaagtcacaaataaaacacgtgcagatgtaaagggcgggacactcactcaatatgaaggcaaactgagactggtggaaattgctcaagtgccaaaagcacatgtagacgagttcaagtctgtatcaaagttcaaaatatttaatacaaacaacctatggatttctcttgcagcagttaaaagactgcaggagcaaaatgccattgacatggaaatcattgtgaatgcaaagactttggatggaggcctgaatgtcattcaattagaaactgcagtaggggctgccatcaaaagttttgagaattctctaggtattaatgtgccaaggagccgttttctgcctgtcaaaaccacatcagatctcttgctggtgatgtcaaacctctatagtcttaatgcaggatctctgacaatgagtgaaaagcgggaatttcctacagtgcccttggttaaattaggcagttcttttacgaaggttcaagattatctaagaagatttgaaagtataccagatatgcttgaattggatcacctcacagtttcaggagatgtgacatttggaaaaaatgtttcattaaagggaacggttatcatcattgcaaatcatggtgacagaattgatatcccacctggagcagtattagagaacaagattgtgtctggaaaccttcgcatcttggaccactgaaatgaaaaatactgtggacacttaaataatgggctagtttcttacaatgaaatgttctctaggattctaaaataggcaggtactttactatgttactgtaccctgcagtgttgatttttaaaatagagttttctgcagtatgcttttagtctaagaaaagcacagatggagcaatactttccttctttgaagagaatcccaaagttagttcatcttaaagtgcaatattgtttaatcttaaaactgggcaactttggaagaacttttaacagaagcctcaatgatgatcactttgaattgcttgggatttcaaaaataaagcagggaagc

SEQ ID NO: 183423 - DNA, 2534 bp, Homo Sapiens
  misc_feature (1805)..(1857): n is a, c, g, or t
tgtacaaaaaagttggacttaattgacactagacatatagaacaagataagggaatggtaatcgcagagacaaaacgtcagatgcatgaaaccctggaaatgaaagaagaagaaattgctcaactccgtagtcgcatcaaacagatgactacccagggagaggaattacgggaacagaaagaaaagtccgaaagagctgcttttgaggaacttgaaaaagctttgagtacagcccaaaaaacagaggaagcacggagaaaactgaaggcagaaatggatgaacaaataaaaactatcgaaaaaacaagtgaggaggaacgcatcagtcttcaacaggaattaagtcgggtgaaacaggaggttgttgatgtaatgaaaaaatcctcagaagaacaaattgctaagctacagaagcttcatgaaaaggagctggccagaaaagagcaggaactgaccaagaagcttcagacccgagaaagggaatttcaggaacaaatgaaagtagctcttgaaaagagtcaatcagaatatttgaagatcagccaagaaaaagaacagcaagaatctttggccctagaagagttagagttgcagaaaaaagcaatcctcacagaaagtgaaaataaacttcgggaccttcagcaagaagcagagacttacagaactagaattcttgaattggaaagttctttggaaaaaagcttacaagaaaacaaaaatcagtcaaaagatttggctgttcatctggaagctgaaaaaaataagcacaataaggagattacagtcatggttgaaaaacacaagacagaattggaaagccttaagcatcagcaggatgccctttggactgaaaaactccaagtcttaaagcaacaatatcagactgaaatggaaaaacttagggaaaagtgtgaacaagaaaaagaaacattgttgaaagacaaagagattatcttccaggcccacatagaagaaatgaatgaaaagactttagaaaagcttgatgtgaagcaaacagaactagaatcattatcttctgaactgtcagaagtattaaaagcccgtcacaaactagaagaggaactttctgttctgaaagatcaaacagataaaatgaagcaggaattagaggccaagatggatgaacagaaaaatcatcaccagcagcaagttgacagtatcattaaagaacacgaggtatctatccagaggactgagaaggcattaaaagatcaaattaatcaacttgagcttctcttgaaggaaagggacaagcatttgaaagagcatcaggctcatgtagaaaatttagaggcagatattaaaaggtctgaaggggaactccagcaggcatctgctaagctggacgtttttcagtcttaccagagtgccacacatgagcagacaaaagcatatgaggaacagttggcccaattgcagcagaagttgttggatttggaaacagaaagaattcttcttaccaaacaggttgctgaagttgaagcacaaaagaaagatgtttgtactgagttagatgctcacaaaatccaggtgcaggacttaatgcagcaacttgaaaaacaaaatagtgaaatggagcaaaaagtaaaatctttaacccaagtctatgagtccaaacttgaagatggtaacaaagaacaggaacagacaaagcaaatcttggtggaaaaggaaaatatgattttacaaatgagagaaggacagaagaaagaaattgagatactcacacagaaattgtcagccaaggaggacagtattcatattttgaatgaggaatatgaaannnnnnnnnnnnnnnnnnnnnnnnnnnnnnnnnnnnnnnnnnnnnnnnnnnnngagatgcaagaaacgttaaagaaaaaattactggatcaggaagccaaacttaagaaagagcttgaaaatactgctctagagcttagtcagaaagaaaaacagtttaatgccaaaatgctggaaatggcacaggctaactcagctggaatcagtgatgcagtgtcaagactggaaacaaaccaaaaagaacaaatagaaagtcttactgaggttcatcgacgagaactcaatgatgtcatatcaatctgggaaaagaaacttaatcagcaagctgaagaacttcaggaaatacatgaaatccaattacaggaaaaagaacaagaggtagcagaactgaaacaaaagatcctcctatttgggtgtgaaaaagaagagatgaacaaggaaataacatggctgaaggaagaaggtgttaagcaggatacaacattaaatgaattacaggaacagttaaagcagaagtctgcccatgtgaattctcttgcacaagatgaaactaaactgaaagctcatcttgaaaagctagaggttgacttgaataagtctctgaaggaaaatacttttcttcaagagcagctagttgaactgaagatgctggcagagagataagcggaaggtttctgagttgactagcaagttgaaaaccacagatgagaattccagagtttgaaatcttc

SEQ ID NO: 183424 - DNA, 2144 bp, Homo Sapiens
ttggcttttggatcccctacacgaggatcactagcttaatgagaagcagagtaacgctattaagtctgggcaagctccttataagttgctgtgtgcttaaaagaatgtgatttatgtctggggccaaagcagttttccttcttttccctcattgaattcaagacagctagacccttgtgtagatcccaggatattacctctactccccccaacctgtgtgtgtagggagagtaacaacacgggaagaggggagggaagttggaaggagattggtcacatgttcagttgtctgagatactggtaaatgtgcgctgtttgtcaatgaaggttgcatgcctgcatttacaaggtggtctcatactgattgtgctctgtccagttagattcgtggcttctcccttggaagctacaattaaggactagttagaagcagaggctagatgtgttctctccagcccttactaactgggaaaataattgagaaatccctcttttcctcagtgaaagcccagtcattggttagaaaaatctaattgtcaaactagcattatgttccatcatatctgtgggatagtaattcatgtaagacacatttttacctctcttacaagtcaattcacttacaagccagtttcaaatcaagcttcccttgcgaggaatggagatcattatggggcttattatgactacatttcttttatgagtgaccattttaaataattaatattttatttaatattaaattattaaagacttagctagacttttaacattagatgaaccttgtgaatcatatattgcatagattagcacatgtatgcaatctaggtcatcaatttgttgaatttatacagccctagatttgagattgtggccctgagtatctggatagttgagttgtgtgtttatgtgcttatatgatagaggtgctttgttcctgcagcttagaaacagaagcagccattcactgagaagcttaagagaggaagtatcaacctcattttccaaaccagcattactttcaccgctcgtggatctgaaagattacatttagaacatttagtactattacactctcagaaactgtggtaaaaagtcacattttcaaaacttcatgcatattgtattcttgttggaaataagtcctatagtttcttaattgtcttcatgccgtccatatttaacaaacattgcaagtcctttttatatttgggtaattatttgtaatttagtgaaggagactaggggatgttttcttccaaagggaatttaaaatcaattttatggtattttgaaagtaaaatactccttaacgtgtcaatatttttaaaatgttatctcgaagttttctattgctcaggtatataatctaataaaattttttgtttgctctaaggttatttttgctattctctattttgaattatgttaaaatttgtgtgcattttatgaaatgccttttttcttattttgaaagtgtaaaattgggcatctcagagtaaaatgtgggattattagctacaaagactaggcacatcgtgaaagctcagtaactaattttcttgactgagtcctatcccagagtgtcacagattcaacagaattttcctgaagggtgatacacaccaaaatctagcttgtgtggatctgagactattgactcaaagattcaaatctacttcggaagtgactccacggtttgagtgaaaactgaggaaggactcatgcctgtatatcactagatatcttatttctccataattttaagtgttcataatttcttcttctttgatgggtgtgcaactggggcatgtttgtaccagccagcatgtgttctgcccaacagtgtgtccgtgtgtgaggttaactgattcagaactcattctcttgataaactatttcttgaaagcatttattttaagtctttatttcctgctgaaatgaagtttcatgctgtcatgcccatcttatttattctagaagaaaattttcatagaagaaaatgatttatggccaaagttacagaacattcatcttttagacttagccttagaatatcattggaaattacttggcttgaatttgggttcgtttttatctttatggattatgtaccacggctattaatatacttaaacccctta

SEQ ID NO: 183425 - DNA, 1047 bp, Homo Sapiens
ccaactttgtacaaaaaagttggctctattccacggccgcggcggcctggacttgcgcgtgcgcggagaacccctgcaggtggagcgcacgctcatctattacctggacgagattcccccgaagttctccatgaagcgcctcaccgccggcctcatcgccgtcatcgtggtggtcgtggtggccctcgtcgccggcatggccgtcctggtgatcaccaaccggagaaagtcggggaagtacaagaaggtggagatcaaggaactgggggagttgagaaaggaaccgagcttgtaggtacccggcggggcaggggatggggtggggtaccggatttcggtatcgtcccagacccaagtgagtcacgcttcctgattcctcggcgcaaaggagacgtttatcctttcaaattcctgccttccccctcccttttgcgcacacaccaggtttaatagatcctggcctcagggtctcctttctttctcacttctgtcttgaaggaagcatttctaaaatgtatcccctttcggtccaacaacaggaaacctgactggggcagtgaaggaagggatggcatagcgttatgtgtaaaaaacaagtatctgtatgacaacccgggatcgtttgcaagtaactgaatccattgcgacattgtgaaggcttaaatgagtttagatgggaaatagcgttgttatcgccttgggtttaaattatttgatgagttccacttgtatcatggcctacccgaggagaagaggagtttgttaactgggcctatgtagtagcctcatttaccatcgtttgtattactgaccacatatgcttgtcactgggaaagaagcctgtttcagctgcctgaacgcagtttggatgtctttgaggacagacattgcccggaaactcagtctatttattcttcagcttgcccttactgccactgatattggtaatgttcttttttgtaaaatgtttgtacatatgttgtctttgataatgttgctgtaattttttaaaataaaacacgaatttaataaaatatgggaaagggc

SEQ ID NO: 183426 - DNA, 1115 bp, Homo Sapiens
caggcatcatgtccagaatatcatgcatcacagctgcccgcagctcaaggtcaaaatgtgactccactcgctgctttgttactgtctttgccaccccttttgagtgtcgaccttcaaactgccgggccaggaggttgccaagccatcgctctaataaaggggtaatgccacgcatgaaaaagagccagactcgccaaccggcagcccagaagccacagccaggacccttccctacagggcccgtgttgaaacgataatagatgagatgcttcaggtccttgcacatgcgaatctgtcgcatcagcttgtatttgtatcgatacatgcccgtcaactgcccaacatgggcaaatatatactgcaatccatctgccagctggaaggcatccacattgcccagccgatactgcacgtgactatccaccaccagcttagtcaaacgcagaacttcccgacacaggtggaaagcattcccaaaacgagatttctttctttccttggtggtgagcgttttcacaggcttgaggttgaagttgtagtccaggtgcaggtagttgaggtttttgcggtgaatgagaaggttgagcatgttgtagccctggcggcaaacctggagcccaacctccacccagtccagctttgtggactgaaagaatttggtggctttgaaggagcggaacaaatacctcttcttttgagccttagggggccgatgcttcagggcattcagcacatagtacttaagcagcttctggtaggagaccctcactttcacaggctgcccggcaggacaatgctcccgataccagttcttgacaaggggtatgtccagggcccgacgggtgcgaccagagcgtaggttgaagggccgcggggcccagagcagggcaatgccattggctgtattgtctgtatagaggggtgtgtccttcaggaagggctccacaaactccgggagctcaaattcctcatcatcatccggcaatggttcctggctcttgactgagtgcctatgggagattgggttgatcaaagggtcaaagtagaaagctggcaagtcaggatcctcagttttgatgaatacaacattgggagtatggtaccaggtgagccaa

SEQ ID NO: 183427 - DNA, 1500 bp, Homo Sapiens
  misc_feature (1311)..(1319): n is a, c, g, or t
acaaaaaagttggctttcagtttcagagtcaagtggtgagatcaaagacttttcaccaaaaaatgtcatttatgatgactcatcccagtatttgatcatggaaagaattctaagtcaaggccctgtgtattccagttttaaaggaggctggaaatgcaaggatcatactgagatgctgcaagaaaatcagggatgtattaggaaagtaacagtctctcatcaagaagccctggctcaacatatgaatatcagtactgtggagaggccctatggatgccatgaatgtggaaaaacttttggtcgacgcttttccctggtgttacaccagaggactcatactggagagaaaccatatgcatgtaaggaatgtggcaaaacctttagccagatttcaaaccttgtgaaacaccaaatgatacatactggaaagaaaccccatgagtgtaaggactgtaataaaacattcagttacctttcatttcttattgaacaccagagaacgcacactggggagaaaccttatgaatgtactgagtgtggaaaggcctttagccgtgcctccaacctcactcgacatcaaagaattcacataggaaagaaacaatatatatgtaggaaatgtggtaaagcatttagcagtggctcagaactcattcgccaccagattacacatactggagagaaaccttatgaatgcattgaatgtgggaaggcatttcgccgtttctcacaccttactcgacatcagagcatccatacaaccaaaaccccgtatgaatgtaatgaatgtaggaaagctttccgttgtcactcattccttattaaacatcagagaattcatgctggagaaaagctctatgaatgtgatgaatgtggtaaagttttcacttggcatgcatcccttattcaacatacgaagagtcacactggagagaaaccctatgcgtgtgctgaatgtgataaagccttcagccggagcttttccctcattctacatcagagaactcatactggagagaaaccctatgtatgtaaggtatgcaacaaatccttcagctggagctcaaaccttgctaaacatcagaggacacacactcttgacaacccctatgaatatgaaaattcatttaattaccactcattccttactgaacaccagtgaatttacactgcaaagaaaaactatgaatgtatggaattttttaaaaagaagtataatgccttacttcagagaactcttggaaagaagccttatgtgaaagtgatgactgtgaagtaatatggcccacactttattcaccaccctggagnnnnnnnnncccaggaatatgtggaaaagccattaataaccactcttttatttttttgcaataacaaggtgaaatcaatattgttgagaagattcttccatctggtaatgttgagaagacttcatttggtagagtcccttactttacgtgtgtaaattcctaccaggaaagaatacatatccaatagatt

SEQ ID NO: 183428 - DNA, 629 bp, Homo Sapiens
  misc_feature (239)..(298): n is a, c, g, or t
agcctgtgcccggcacacatggacttgagcatctggaagacggcgaggggggccacgttcagcttcagcaggtccaccaggatcttgaacacgtcggggtcgataccgccgcccgccgcctgagccagctcgtacagctccatctcctcggtgctcagcaccttcttgcgccgcagcgccagcttctgccgggccgcctccagccccgggggcgccgccgaccccggcccaggccctannnnnnnnnnnnnnnnnnnnnnnnnnnnnnnnnnnnnnnnnnnnnnnnnnnnnnnnnnnntagcggatgcgcccaccgccctctccctgcagcgccagcgtctggcctcccgggctgccctggcgggagcggcgggagcgcggggacggggccgcctcctcggcgtcattggagcccaacagttagtgggcgctcacggtgtgctgagcggcgcgctaggcgtcgggagtggcatggcggactgcaggggccagctgcttggcggtcagggcgtccctgatagacttgcattggtcgtgctcgcttaggtggcagcacccagcccagtgccaggcatacattgggcgctcagtcaataccttttgaggtaacccaacttttttgtacaaag

SEQ ID NO: 183429 - DNA, 1539 bp, Homo Sapiens
gagtctcgagggtaaaattcgctgagggtgctctgagggattctcttcagcatttctttggggaagattcggagtagctgccagccaatgtccaaagtctcaaagacagtgcgattttcgtaaggaccctgagcaatgaagttcctctcaaacttctgcagaaattccaagtagagaagatcatctgaggtaagggcttcttctccaacgacagctttcatggcttgcacatcctttccaatagcatagcacgcatatagctggttagatacatcggcatgatccttcctggtcatcccttctccaatagcagacttcattaaccgtgatagtgagggcagcacattgataggtggataaatctgtctgttgtgcagctgtctgtccacatagatctgcccctctgtaatgtagccagtcaagtctgggatggggtgagtgatatcatcattaggcatggttagaatagggatttgagtaatcgagccgtttctcccttccactcgcccagcgcgttcatatatcgtggctaaatctgtatacatgtaacctggaaaacctcgtcgaccaggtacctcttccctggctgctgaaacctctcgaagtgcttcagcataagaactcatgtctgttagaataaccaatacatgtttctcacattggtacgccagaaattcagctgtggttagagccaggcgaggagtgataattcgctcaatggttgggtcattagccaagttcaaaaagaggcagacattgtccattgagccattttcttcaaagtcagatttgaagaaccgggcagtttccatgtttacacccatagcagcaaatacaattgcaaaattttcctcactgtagtctactacatctttggatttctttaccaaaccagcctggcgacagatctgagctgcaatctcattgtgtggtagcccagcagcagagaagataggaattttctgccccctagcaatactgttcatcccatcgatggccgaaatgccagtctgaatcatttcctctgggtagattcgacattgagggttgattggctgacccatgatatcaaggaagtcttcggccagtacaacaggacctctgtcaatgggttttcccgatccattgaatacccgaccaagcatatcctcagacaccggtgttcggagaatatccccagtaaactcacaggacgttttcttagcatctatacctgaagtcccttcaaatacctgaactactgccttggaaccactaacttccagaacttgcccacttctctttgtgccatccggtaaggtcaaatggacaatttcagcatacctgggaaacttaacatgatctaagatcactagtggaccattgactccagatactgtcttgtatgtgaggcgaggctgggagaggtagttccgactgactgccagcgcctgctcccgagctcccaccgccggcccaccggtgggcacgggtagctcgggtgcggccccgttgacaatcccccgcatcgcccgcagcgccatcttgtctccaatccaa

SEQ ID NO: 183430 - DNA, 2008 bp, Homo Sapiens
tttgtacaaaaaagttgggaaccagaccctgtatagctcctcaagaaatgggagatgaaaatgcggagataacggaggagatgatggatcaggcaaatgataaaaaagtggctgctattgaagccctaaatgatggtgaactccagaaagccattgacttattcacagatgccatcaagctgaatcctcgcttggccattttgtatgccaagagggccagtgtcttcgtcaaattacagaagccaaatgctgccatccgagactgtgacagagccattgaaataaatcctgattcagctcagccttacaagtggcgggggaaagcacacagacttctaggccactgggaagaagcagcccatgatcttgcccttgcctgtaaattggattatgatgaagatgctagtgcaatgctgaaagaagttcaacctagggcacagaaaattgcagaacatcggagaaagtatgagcgaaaacgtgaagagcgagagatcaaagaaagaatagaacgagttaagaaggctcgagaagagcatgagagagcccagagggaggaagaagccagacgacagtcaggagctcagtatggctcttttccaggtggctttcctgggggaatgcctggtaattttcccggaggaatgcctggaatgggagggggcatgcctggaatggctggaatgcctggactcaatgaaattcttagtgatccagaggttcttgcagccatgcaggatccagaagttatggtggctttccaggatgtggctcagaacccagcaaatatgtcaaaataccagagcaacccaaaggttatgaatctcatcagtaaattgtcagccaaatttggaggtcaagcgtaatgtccttctgataaataaagcccttgctgaaggaaaagcaacctagatcaccttatggatgtcgcaataatacaaaccagtgtacctctgaccttctcatcaagagagctggggtgctttgaagataatccctacccctctcccccaaatgcagctgaagcattttacagtggtttgccattagggtattcattcagataatgttttcctactaggaattacaaactttaaacactttttaaatcttcaaaatatttaaaacaaatttaaagggcctgttaattcttatatttttctttactaatcattttggatttttttctttgaattattggcagggaatatacttatgtatggaagattactgctctgagtgaaataaaagttattagtgcgaggcaaacataactcatttgaggataaagtttgtgttggatatgtggttcctgatgcattttgacttgtctttttaaatgctttatctttttctttaaagatttatttcaataaaactaattgggaccacccgtatttcagtaggacctgggtagggattggaagtacttggcagggcagcagcaatcttgctgtgtttgatataacatgcatccttgggcaggttgcccttaaatcttacactgtggtgaagggatgttttttttgtaatgctgcagtagagttggagtacttagttctcttgttgtccagtatatctaataagtgtttttcatattatttccacgtaagggaaataaggtagtacttttctttttatatttctatgcttaaaattctctttcctagtcaaaaattgcccaaatctgtgtttgctttctgcttgctacatttgtctcccttacttttcttgagctaaagacaggctttttccaccggcatcatcactgctatcatcattaacagcgtaattatacaagcatatttaatgctgagtttaatttaatatgtaatacatatggtaattgtagggtaatacccacaacaactgtagtttcttacttggccaagagaatgcttatttaagtgttagacttccattctggcaaaatcttgccttatcagaagacattggaaaaagggattccctttggtgttggtcttctactttaaaaaacctattgcagtta

SEQ ID NO: 183431 - DNA, 1073 bp, Homo Sapiens
ccaactttgtacaaaaaagttgggttttttttgtaatgctgcagtagagttggagtacttagttctcttgttgtccagtatatctaataagtgtttttcatattatttccacgtaagggaaataaggtagtacttttctttttatatttctatgcttaaaattctctttcctagtcaaaaattgcccaaatctgtgtttgctttctgcttgctacatttgtctcccttacttttcttgagctaaagacaggctttttccaccggcatcatcactgctatcatcattaacagcgtaattatacaagcatatttaatgctgagtttaatttaatatgtaatacatatggtaattgtagggtaatacccacaacaactgtagtttcttacttggccaagagaatgcttatttaagtgttagacttccattctggcaaaatcttgccttatcagaagacattggaaagagggattccctttggtgtttggtcttctacttagaaaaacctattgcagttagtttatcttgtagtattcatctttgtattctgaagataaggtttgaattaaattgatacacacagaggggaaccgattttttttatccaatgtgaattataaatgagataatccacagttattcattgtggagttgttgagactatgaaagactcattgtctttgtattcagctcttaaatagtgtaactatatccccacctctgcttgctttctttccctcccctccaatgataaagaaaatgataaattttctgttgtgcattcaattcttattttaaataagactaagtataggcattgtacctgacattgctacgtttctaccagtgtttcaatttaaagtgctagtgtttaaaaacattttcaagggataaggccttctgtactttgcttatttgaagaatcagtggtaggagcagtgaagtaaattctatggagtacatttctaaaataccacatttctgaaatcataaataagtttattcaggttctaaccctttgctgtacacaagccgacagaaaatgcatctgttacataaatgagaaaagctattt

SEQ ID NO: 183432 - DNA, 1010 bp, Homo Sapiens
tttgtacaaaaaagttggggtatatatttccttcttagagaagacaacatcaaacacatcataatggattcactgaggggagacaaagggagccgagaccctggatggggcttccagctcagaacccatccctctggtgggtacctctggcacccatctgcaaatatctccctctctccaacaaatggagtagcatccccctggggcacttgctgaggccaagccactcacatcctcactttgctgccccaccatcttgctgacaacttccagagaagccatggttttttgtattggtcataactcagccctttgggcggcctctgggcttgggcaccagctcatgccagccccagagggtcagggttggaggcctgtgcttgtgtttgctgctaatgtccagctacagacccagaggataagccactgggcactgggctggggtccctgccttgttggtgttcagctgtgtgattttggactagccacttgtcagagggcctcaatctcccatctgtgaaataaggactccacctttaggggaccctccatgtttgctgggtattagccaagctggtcctgggagaatgcagatactgtccgtggactaccaagctggcttgtttcttatgccagaggctaacagatccaatgggagtccatggtgtcatgccaagacagtatcagacacagccccagaagggggcattatgggccctgcctccccataggccatttggactctgccttcaaacaaaggcagttcagtccacaggcatggaagctgtgaggggacaggcctgtgcgtgccatccaaagtcatctcagccctgcctttctctggagcattctgaaaacagatattctggcccagggaatccagccatgacccccacccctctgccaaagtactcttaggtgccagtctggtaactgaactccctctggaggcaggcttgagggaggaatcctcaagggtttccccttgaaagctttaattatttattttg

SEQ ID NO: 183433 - DNA, 1448 bp, Homo Sapiens
actttgtacaaaaaagttggcgccctcttcctcctggccagcctcctgggcgcggctctagccggcccggtccttggactgaaagaatgcaccaggggctcggcagtgtggtgccagaatgtgaagacggcgtccgactgcggggcagtgaagcactgcctgcagaccgtttggaacaagccaacagtgaaatcccttccctgcgacatatgcaaagacgttgtcaccgcagctggtgatatgctgaaggacaatgccactgaggaggagatccttgtttacttggagaagacctgtgactggcttccgaaaccgaacatgtctgcttcatgcaaggagatagtggactcctacctccctgtcatcctggacatcattaaaggagaaatgagccgtcctggggaggtgtgctctgctctcaacctctgcgagtctctccagaagcacctagcagagctgaatcaccagaagcagctggagtccaataagatcccagagctggacatgactgaggtggtggcccccttcatggccaacatccctctcctcctctaccctcaggacggcccccgcagcaagccccagccaaaggataatggggacgtttgccaggactgcattcagatggtgactgacatccagactgctgtacggaccaactccacctttgtccaggccttggtggaacatgtcaaggaggagtgtgaccgcctgggccctggcatggccgacatatgcaagaactatatcagccagtattctgaaattgctatccagatgatgatgcacatggatcagcaacccaaggagatctgtgcgctggttgggttctgtgatgaggtgaaagagatgcccatgcagactctggtccccgccaaagtggcctccaagaatgtcatccctgccctggaactggtggagcccattaagaagcacgaggtcccagcaaagtctgatgtttactgtgaggtgtgtgaattcctggtgaaggaggtgaccaagctgattgacaacaacaagactgagaaagaaatactcgacgcttttgacaaaatgtgctcgaagctgccgaagtccctgtcggaagagtgccaggaggtggtggacacgtacggcagctccatcctgtccatcctgctggaggaggtcagccctgagctggtgtgcagcatgctgcacctctgctctggcacgcggctgcctgcactgaccgttcacgtgactcagccaaaggacggtggcttctgcgaagtgtgcaagaagctggtgggttatttggatcgcaacctggagaaaaacagcaccaagcagagatcctggctgctcttgagaaaggctgcagcttcctgccagacccttaccagaagcagtgtgatcagtttgtggcagagtacgagcccgtgctgatcgagatcctggtggaggtgatggatccttccttcgtgtgc

SEQ ID NO: 183434 - DNA, 1919 bp, Homo Sapiens
acaaaaaagttggggcagatttatatctgcgggggatcagctgacgctccgcattgcagactgcggagtcagacggcgctatgtacgccctcttcctcctggccagcctcctgggcgcggctctagccggcccggtccttggactgaaagaatgcaccaggggctcggcagtgtggtgccagaatgtgaagacggcgtccgactgcggggcagtgaagcactgcctgcagaccgtttggaacaagccaacagtgaaatcccttccctgcgacatatgcaaagacgttgtcaccgcagctggtgatatgctgaaggacaatgccactgaggaggagatccttgtttacttggagaagacctgtgactggcttccgaaaccgaacatgtctgcttcatgcaaggagatagtggactcctacctccctgtcatcctggacatcattaaaggagaaatgagccgtcctggggaggtgtgctctgctctcaacctctgcgagtctctccagaagcacctagcagagctgaatcaccagaagcagctggagtccaataagatcccagagctggacatgactgaggtggtggcccccttcatggccaacatccctctcctcctctaccctcaggacggcccccgcagcaagccccagccaaaggataatggggacgtttgccaggactgcattcagatggtgactgacatccagactgctgtacggaccaactccacctttgtccaggccttggtggaacatgtcaaggaggagtgtgaccgcctgggccctggcatggccgacatatgcaagaactatatcagccagtattctgaaattgctatccagatgatgatgcacatgcaacccaaggagatctgtgcgctggttgggttctgtgatgaggtgaaagagatgcccatgcagactctggtccccgccaaagtggcctccaagaatgtcatccctgccctggaactggtggagcccattaagaagcacgaggtcccagcaaagtctgatgtttactgtgaggtgtgtgaattcctggtgaaggaggtgaccaagctgattgacaacaacaagactgagaaagaaatactcgacgcttttgacaaaatgtgctcgaagctgccgaagtccctgtcggaagagtgccaggaggtggtggacacgtacggcagctccatcctgtccatcctgctggaggaggtcagccctgagctggtgtgcagcatgctgcacctctgctctggcacgcggctgcctgcactgaccgttcacgtgactcagccaaaggacggtggcttctgcgaagtgtgcaagaagctggtgggttatttggatcgcaacctggagaaaaacagcaccaagcaggagatcctggctgctcttgagaaaggctgcagcttcctgccagacccttaccagaagcagtgtgatcagtttgtggcagagtacgagcccgtgctgatcgagatcctggtggaggtgatggatccttccttcgtgtgcttgaaaattggagcctgcccctcggcccataagcccttgttgggaactgagaagtgtatatggggcccaagctactggtgccagaacacagagacagcagcccagtgcaatgctgtcgagcattgcaaacgccatgtgtggaactaggaggaggaatattccatcttggcagaaaccacagcattggtttttttctacttgtgtgtctgggggaatgaacgcacagatctgtttgactttgttataaaaatagggctcccccacctcccccatttctgtgtcctttattgtagcattgctgtctgcaagggagcccctagcccctggcagacatagctgcttcagtgccccttttctctctgctagatggatgttgatgcactggaggtcttttagcctgcccttgcatgg

SEQ ID NO: 183435 - DNA, 1479 bp, Homo Sapiens
actttgtacaaaaaagttggctcctggccaccctcctgggcgcggctctagccggcccggtccttggactgaaagaatgcaccaggggctcggcagtgtggtgccagaatgtgaagacggcgtccgactgcggggcagtgaagcactgcctgcagaccgtttggaacaagccaacagtgaaatcccttccctgcgacatatgcaaagacgttgtcaccgcagctggtgatatgctgaaggacaatgccactgaggaggagatccttgtttacttggagaagacctgtgactggcttccgaaaccgaacatgtctgcttcatgcaaggagatagtggactcctacctccctgtcatcctggacatcattaaaggagaaatgagccgtcctggggaggtgtgctctgctctcaacctctgcgagtctctccagaagcacctagcagagctgaatcaccagaagcagctggagtccaataagatcccagagctggacatgactgaggtggtggcccccttcatggccaacatccctctcctcctctaccctcaggacggcccccgcagcaagccccagccaaaggataatggggacgtttgccaggactgcattcagatggtgactgacatccagactgctgtacggaccaactccacctttgtccaggccttggtggaacatgtcaaggaggagtgtgaccgcctgggccctggcatggccgacatatgcaagaactatatcagccagtattctgaaattgctatccagatgatgatgcacatgcaacccaaggagatctgtgcgctggttgggttctgtgatgaggtgaaagagatgcccatgcagactctggtccccgccaaagtggcctccaagaatgtcatccctgccctggaactggtggagcccattaagaagcacgaggtcccagcaaagtctgatgtttactgtgaggtgtgtgaattcctggtgaaggaggtgaccaagctgattgacaacaacaagactgagaaagaaatactcgacgcttttgacaaaatgtgctcgaagctgccgaagtccctgtcggaagagtgccaggaggtggtggacacgtacggcagctccatcctgtccatcctgctggaggaggtcagccctgagctggtgtgcagcatgctgcacctctgctctggcacgcggctgcctgcactgaccgttcacgtgactcagccaaaggacggtggcttctgcgaagtgtgcaagaagctggtgggttatttggatcgcaacctggagaaaaacagcaccaagcaggagatcctggctgctcttgagaaaggctgcagcttcctgccagacccttaccagaagcagtgtgatcagtttgtggcagagtacgagcccgtgctgatcgagatcctggtggaggtgatggatccttccttcgtgtgcttgaaaattggagcctgcccctcggcccataagcccttgttgggaa

SEQ ID NO: 183436 - DNA, 1699 bp, Homo Sapiens
  misc_feature (215)..(223): n is a, c, g, or t
  misc_feature (421)..(444): n is a, c, g, or t
  misc_feature (570)..(579): n is a, c, g, or t
  misc_feature (883)..(913): n is a, c, g, or t
  misc_feature (1093)..(1109): n is a, c, g, or t
  misc_feature (1149)..(1161): n is a, c, g, or t
ttggtgaagaagcggatgaggaaggggaagaagaaggagatgaggaaaatgatccagactatgacccaaagaaggatcaaaacccagcagagtgcaagcagcagtgaagcaggatgtatgtggccttgaggataacctgcactgtaatagcctaaacacaactcttatttacttacagccttatgtttttgtattttcttggtagactaggtaannnnnnnnnaaaggacaggaaactgatattttaaagaccaatttgttctacctagcattttaactagtttttctgccagctatgttgaatgcacaaattctgtcacgcatgttcattcattgctacataatttggttcttctggaatatttttatgtagctcttggagtacagctatgaaaattaacaactgttaaaggaaataccnnnnnnnnnnnnnnnnnnnnnnnnccttgaagaaccaaagtattttttcagctggttgttgaatagggttaagtccgcttggattagctgtgcctttcattactttgttacagaaatgcagtgacttatactaagacaatttattgtttnnnnnnnnnnttggcaagacaactatatggttaagaatttccagtatgaccacacccaataactgttattagagtgttaatggattattgtgttttaggtgacatagttaactgtaaagtaacctgactcagtatagttactggtaccacagtgaggtgaataaaacgggattttcagaagttagcctgaatttaactgtatttttaaatttaacctccattaactaagcatcttttctttgtggtagggtctaccttctgcttccctggaaaggatgaatttacatcatttgacaagcctattttcaagttannnnnnnnnnnnnnnnnnnnnnnnnnnnnnncagctaaaataaaaatttcaaatacaattttagttcttacaagataatgtcttaattttgtaccaattcaggtagaagtagaggcctaccttgaattaagggttatactcagtttttaacacattgttgaagaaaaggtaccagctttggaacgagatgctatactaataagcaagtgtnnnnnnnnnnnnnnnnngaggaagaaaatcttaagtgattgatgctgttttcttttnnnnnnnnnnnnntaaaattcattttctttgggttagagctagagagaaggccccaagcttctatggtttcttctaattcttattgcttaaagtatgagtatgtcacttacccgtgcttctgtttactgtgtaattaaaatgggtagtactgtttacctaactacctcatggatgtgttaaggcatattgagttaaatctcatataatgtttctcaatcttgttaaaagctcaaaattttgggcctatttgtaatgccagtgtgacactaagcattttgttcacaccacgctttgataactaaactggaaaacaaaggtgttaagtacctctgttctggatctgggcagtcagcactctttttagatctttgtgtggctcctatttttatagaagtggagggatgcactatttcacaagggtccaagatttgttttcagatatttttgatgactgtattgtaaatactacagggatagcactatagtattgtagtcatgagacttaaagtggaaataagactatttttgacaaaagatgccattaaatttc

SEQ ID NO: 183437 - DNA, 1784 bp, Homo Sapiens
  misc_feature (64)..(73): n is a, c, g, or t
  misc_feature (377)..(407): n is a, c, g, or t
  misc_feature (587)..(602): n is a, c, g, or t
  misc_feature (642)..(654): n is a, c, g, or t
  misc_feature (1532)..(1542): n is a, c, g, or t
ccaactttgtacaaaaaagttggcagaaatgcacctgacttatactaagacaatttattgtttnnnnnnnnnnttggcaagacaactatatggttaagaatttccagtatgaccacacccaataactgttattagagtgttaatggattattgtgttttaggtgacatagttaactgtaaagtaacctgactcagtatagttactggtaccacagtgaggtgaataaaacgggattttcagaagttagcctgaatttaactgtatttttaaatttaacctccattaactaagcatcttttctttgtggtagggtctaccttctgcttccctgtaaaggatgaatttacatcatttgacaagcctattttcaagttannnnnnnnnnnnnnnnnnnnnnnnnnnnnnncagctaaaataaaaatttcaaatacaattttagttcttacaagataatgtcttaattttgtaccaattcaggtagaagtagaggcctaccttgaattaagggttatactcagtttttaacacattgttgaagaaaaggtaccagctttggaacgagatgctatactaataagcaagtgtnnnnnnnnnnnnnnnngaggaagaaaatcttaagtgattgatgctgttttcttttnnnnnnnnnnnnntaaaattcattttctttgggttagagctagagagaaggccccaagcttctatggtttcttctaattcttattgcttaaagtatgagtatgtcacttacccgtgcttctgtttactgtgtaattaaaatgggtagtactgtttacctaactacctcatggatgtgttaaggcatattgagttaaatctcatataatgtttctcaatcttgttaaaagctcaaaattttgggcctatttgtaatgccagtgtgacactaagcattttgttcacaccacgctttgataactaaactggaaaacaaaggtgttaagtacctctgttctggatctgggcagtcagcactctttttagatctttgtgtggctcctatttttatagaagtggagggatgcactatttcacaaggtccaagatttgttttcagatatttttgatgactgtattgtaaatactacagggatagcactatagtattgtagtcatgagacttaaagtggaaataagactatttttgacaaaagatgccattaaatttcagactgtagagccacatttacaatacctcaggctaattactgttaattttggggttgaacttttttttgacagtgagggtggattattggattgtcattagaggaaggtctagatttcctgctcttaataaaattacattgaattgatttttagaggtaatgaaaacttcctttctgagaagttagtgttaaggtcttggaatgtgaacacattgtttgtagtgctatccattcctctcctgagattttaacttactactggaaatccttaaccaattataatagctttttttctttattttcaaaatgatttcctttgctttgattagacactatgtgcnnnnnnnnnnnaaccatagttcatcgaaatgcagctttttctgaacttcaaagatagaatcccatttttaatgaactgaagtagcaaaatcatctttttcattctttaggaaatagctattgccaaagtgaaggtgtagataatacctagtcttgttacataaagggggatgtggtttgcagagaattttctttataaattgaagtttaagggacgtcagtgtttatgccatttttccgttccaaatgattcc

SEQ ID NO: 183438 - DNA, 2928 bp, Homo Sapiens
tttgtacaaaaaagttggggccgagtagtgcccactgaagtggactgtcgtaaggggatgaaggagaggaccgtgccacagaccaggttccagacatggctatttttatgcctacagatatcatggtggaagagtttgtggaagggggtcctctggatctcttcatgcaccggaaaagcgatgtccttaccacaccatggaaattcaaagttgccaaacagctggccagtgccctgagctacttggaggataaagacctggtccatggaaatgtgtgtactaaaaacctcctcctggcccgtgagggcatcgacagtgagtgtggcccattcatcaagctcagtgaccccggcatccccattacggtgctgtctaggcaagaatgcattgaacgaatcccatggattgctcctgagtgtgttgaggactccaagaacctgagtgtggctgctgacaagtggagctttggaaccacgctctgggaaatctgctacaatggcgagatccccttgaaagacaagacgctgattgagaaagagagattctatgaaagccggtgcaggccagtgacaccatcatgtaaggagctggctgacctcatgacccgctgcatgaactatgaccccaatcagaggcctttcttccgagccatcatgagagacattaataagcttgaagagcagaatccagatattgtttcagaaaaaaaaccagcaactgaagtggaccccacacattttgaaaagcgcttcctaaagaggatccgtgacttgggagagggccactttgggaaggttgagctctgcaggtatgaccccgaaggggacaatacaggggagcaggtggctgttaaatctctgaagcctgagagtggaggtaaccacatagctgatctgaaaaaggaaatcgagatcttaaggaacctctatcatgagaacattgtgaagtacaaaggaatctgcacagaagacggaggaaatggtattaagctcatcatggaatttctgccttcgggaagccttaaggaatatcttccaaagaataagaacaaaataaacctcaaacagcagctaaaatatgccgttcagatttgtaaggggatggactatttgggttctcggcaatacgttcaccgggacttggcagcaagaaatgtccttgttgagagtgaacaccaagtgaaaattggagacttcggtttaaccaaagcaattgaaaccgataaggagtattacaccgtcaaggatgaccgggacagccctgtgttttggtatgctccagaatgtttaatgcaatctaaattttatattgcctctgacgtctggtcttttggagtcactctgcatgagctgctgacttactgtgattcagattctagtcccatggctttgttcctgaaaatgataggcccaacccatggccagatgacagtcacaagacttgtgaatacgttaaaagaaggaaaacgcctgccgtgcccacctaactgtccagatgaggtttatcaacttatgaggaaatgctgggaattccaaccatccaatcggacaagctttcagaaccttattgaaggatttgaagcacttttaaaataagaagcatgaataacatttaaattccacagattatcaagtccttctcctgcaacaaatgcccaagtcattttttaaaaatttctaatgaaagaagtttgtgttctgtccaaaaagtcactgaactcatacttcagtacatatacatgtataaggcacactgtagtgcttaatatgtgtaaggacttcctctttaaatttggtaccagtaacttagtgacacataatgacaaccaaaatatttgaaagcacttaagcactcctccttgtggaaagaatataccaccatttcatctggctagttcaccatcacaactgcattaccaaaaggggatttttgaaaacgaggagttgaccaaaataatatctgaagatgattgcttttccctgctgccagctgatctgaaatgttttgctggcacattaatcatagataaagaaagattgatggacttagccctcaaatttcagtatctatacagtactagaccatgcattcttaaaatattagataccaggtagtatatattgtttctgtacaaaaatgactgtattctctcaccagtaggacttaaactttgtttctccagtggcttagctcctgttcctttgggtgatcactagcacccatttttgagaaagctggttctacatggggggatagctgtggaatagataatttgctgcatgttaattctcaagaactaagcctgtgccagtgctttcctaagcagtatacctttaatcagaactcattcccagaacctggatgctattacacatgcttttaagaaacgtcaatgtatatccttttataactctaccactttggggcaagctattccagcactggttttgaatgctgtatgcaaccagtctgaataccacatacgctgcactgttcttagagggtttccatacttaccaccgatctacaagggttgatccctgtttttaccatcaatcatcaccctgtggtgcaacacttgaaagacccggctagaggcactatggacttcaggatccactagacagttttcagtttgcttggaggtagctgggtaatcaaaaatgtttagtcattgattcaatgtgaacgattacggtctttatgaccaagagtctgaaaatctttttgttatgctgtttagtattcgtttgatattgttacttttcacctgttgagcccaaattcaggattggttcagtggcagcaatgaagttgccatttaaatttgttcatagcctacatcaccaaggtctctgtgtcaaacctgtggccactctatatgcactttgtttactctttatacaaataaatatactaaaggacttt

SEQ ID NO: 183439 - DNA, 1876 bp, Homo Sapiens
ccaactttgtacaaaaaagttggcgtctgtctcccgcaccagcttcacctccgtgtcccggtccgggggtggcggtggtggtggcttcggcagggtcagccttgcgggtgcttgtggagtgggtggctatggcagccggagcctctacaacctggggggctccaagaggatatccatcagcactagtggtggcagcttcaggaaccggtttggtgctggtgctggaggcggctatggctttggaggtggtgccggtagtggatttggtttcggcggtggagctggtggtggctttgggctcggtggcggagctggctttggaggtggcttcggtggccctggctttcctgtctgccctcctggaggtatccaagaggtcactgtcaaccagagtctcctgactcccctcaacctgcaaatcgaccccagcatccagagggtgaggaccgaggagcgcgagcagatcaagaccctcaacaataagtttgcctccttcatcgacaaggtgcggttcctggagcagcagaacaaggttctggacaccaagtggaccctgctgcaggagcagggcaccaagactgtgaggcagaacctggagccgttgttcgagcagtacatcaacaacctcaggaggcagctggacagcatcgtgggggaacggggccgcctggactcagagctgagaaacatgcaggacctggtggaagacttcaagaacaagtatgaggatgaaatcaacaagcgtaccactgctgagaatgagtttgtgatgctgaagaaggatgtagatgctgcctacatgaacaaggtggagctggaggccaaggttgatgcactgatggatgagattaacttcatgaagatgttctttgatgcggagctgtcccagatgcagacgcatgtctctgacacctcagtggtcctctccatggacaacaaccgcaacctggacctggatagcatcatcgctgaggtcaaggcccagtatgaggagattgccaaccgcagccggacagaagccgagtcctggtatcagaccaagtatgaggagctgcagcagacagctggccggcatggcgatgacctccgcaacaccaagcatgagatctctgagatgaaccggatgatccagaggctgagagccgagattgacaatgtcaagaaacagtgcgccaatctgcagaacgccattgcggatgccgagcagcgtggggagctggccctcaaggatgccaggaacaagctggccgagctggaggaggccctgcagaaggccaagcaggacatggcccggctgctgcgtgagtaccaggagctcatgaacaccaagctggccctggacgtggagatcgccacttaccgcaagctgctggagggcgaggaatgcagactcagtggagaaggagttggaccagtcaacatctctgttgtcacaagcagtgtttcctctggatatggcagtggcagtggctatggcggtggcctcggtggaggtcttggcggcggcctcggtggaggtcttgccggaggtagcagtggaagctactactccagcagcagtgggggtgtcggcctaggtggtgggctcagtgtggggggctctggcttcagtgcaagcagtggccgagggctgggggtgggctttggcagtggcgggggtagcagctccagcgtcaaatttgtctccaccacctcctcctcccggaagagcttcaagagctaagaacctgctgcaagtcactgccttccaagtgcagcaacccagcccatggagattgcctcttctaggcagttgctcaagccatgttttatccttttctggagagtagtctagaccaagccaattgcagaaccacattctttggttcccaggaga

SEQ ID NO: 183440 - DNA, 2097 bp, Homo Sapiens
actttgtacaaaaaagttggctccctctcctccagcctctcacactctcctaagccctctcatctcctggaaccatggccagcacatccaccaccatcaggagccacagcagcagccgccggggtttcagtgccagctcagccaggctccctggggtcagccgctctggcttcagcagcatctccgtgtcccgctccaggggcagtggtggcctgggtggcgcatgtggaggagctggctttggcagccgcagtctgtatggcctggggggctccaagaggatctccattggagggggcagctgtgccatcagtggcggctatggcagcagagccggaggcagctatggctttggtggcgccgggagtggatttggtttcggtggtggagccggcattggctttggtctgggtggtggagccggccttgctggtggctttgggggccctggcttccctgtgtgcccccctggaggcatccaagaggtcactgtcaaccagagtctcctgactcccctcaacctgcaaattgaccccgccatccagcgggtgcgggccgaggagcgtgagcagatcaagaccctcaacaacaagtttgcctccttcatcgacaaggtgcggttcctagagcagcagaacaaggttctggacaccaagtggaccctgctgcaggagcagggcaccaagactgtgaggcagaacctggagccgttgttcgagcagtacatcaacaacctcaggaggcagctggacaacatcgtgggggaacggggtcgtctggactcggagctgagaaacatgcaggacctggtggaggacctcaagaacaaatatgaggatgaaatcaacaagcgcacagcagcagagaatgaatttgtgactctgaagaaggatgtggatgctgcctacatgaacaaggttgaactgcaagccaaggcagacactcttacagatgagatcaacttcctgagagccttgtatgatgcagagctgtcccagatgcagacccacatctcagacacatccgtggtgctatccatggacaacaaccgcaacctggacctggacagcatcatcgctgaggtcaaggcccaatatgaggagattgctcagaggagcagggctgaggctgagtcctggtaccagacaaaagtacgaggagctgcaggtcacagcaggcagacatggggacgacctgcgcaacaccaagcaggagattgctgagatcaaccgcatgatccagaggctgagatctgagatcgaccacgtcaagaagcagtgcgccaacctgcaggccgccattgctgatgctgagcagcgtggggagatggccctcaaggatgccaagaacaagctggaagggctggaggatgccctgcagaaggccaagcaggacctggcccggctgctgaaggagtaccaggagctgatgaatgtcaagctggccctggacgtggagatcgccacctaccgcaagctgctggagggtgaggagtgcaggctgaatggcgaaggcgttggacaagtcaacatctctgtggtgcagtccaccgtctccagtggctatggcggtgccagtggtgtcggcagtggcttaggcctgggtggaggaagcagctactcctatggcagtggtcttggcgttggaggtggcttcagttccagcagtggcagagccattgggggtggcctcagctctgttggaggcggcagttccaccatcaagtacaccaccacctcctcctccagcaggaagagctataagcactaaagtgcgtctgctagctctcggtcccacagtcctcaggcccctctctggctgcagagccctctcctcaggttgcctgtcctctcctggcctccagtctcccctgctgtcccaggtagagctggggatgaatgcttagtgccttcacttcttctctctctctctataccatctgagcacccattgctcaccatcagatcaacctctgatttacatcatgatgtaatcaccactgggagcttcacttagttactaaattattaatttcttgcctccagtgttctatctctgagcctgagcattataagaaaatgaactctgcttcttttc

SEQ ID NO: 183441 - DNA, 1392 bp, Homo Sapiens
ctttaaaagccaactttgtacaaaaaagttggagcagagccagggcagggcgagctgcaggaatcacccctctgcccctgcagctggaatgtgccacagaggccccacctgaagggtggatgtgctggaggggtggcagcagagccatactgcgtccaccctgagctcggggacaggtgacagtggctgctctgggaaggggcttttagatgtaacctacaattcagttaggctagagacagatgctggtggaggaagggctgggccaccagggatcacagaccacaggaagatgggaggtggaagcagaggccctgcccccaccccttcctgtctcactcttctgtcttgtccccacccatgcgccttcgtgcctgagaccagggtggccacacaggcagggcctggctccagtctcatcctcccattgcccagtgagccctgctcttctctccccagccccctcccaccgctgcctcgtagagtgacctcggacagagcccccctagcaatacagggaggctcccggggcctggacaggcgggctcggaggctacccgctgtggccggtgccagctgcccttgcagggtgggtgagctctcaggccgagagccttatttacctagtgcaaaaactgtaaaagtgtacagactcttcacagatttttatcttaattgcaagtctgccgattttgtaaatgttcttggtgtttgactgtaatgtaactatctcacctaatggttgtacatatcctttggtcctggtgctgccgagggctggccggggactgctgctctcccaagggttttattttatttctgaatctaaagaacagtattggggcaggaggaaaaggcttggtgtctgcggggggtgtcttccctgcctgtggcatttgtgtgttggctttgcagctgctgtctgagtagtggccactggggtgccttcactgggccagtcaacggggggctcctgcccaggccacagagaacctgagttcccgggagctgggccctgcctgcagccagggctggggttgccagaggccctggagggaaggacagtccctgctggggaagaacagccccggggccccctggtcaccgagactcagcctctgctggagaaagccacgccctccctgctagcacagaggcctgactgacttttttgcttaacttccatgttctgggtgatggaaactgccaaacctcctgtcagtgaggactctttccgactgcccagaaagtgggggtggaggaccgaggctacagctccacacgccccggtcccccagagcatctgccccaggtacacctccccctgcgccccgcacgactgcgggagccagactgtccagggaaacagcctctctcttttctacacactca

SEQ ID NO: 183442 - DNA, 914 bp, Homo Sapiens
ttgggttcccagcccctgcagattctgagcaaaggccctgggtaagaagggtgggagtggggcctttgccagcagagccagggcagggcgagctgcaggaatcacccctctgcccctgcagctggaatgtgccacagaggccccacctgaagggtggatgtgctggaggggtggcccagagccatactgcgtccaccctgagctcggggacaggtgacagtggctgctctgggaaggggcttttagatgtaacctacaattcagttaggctagagacagatgctggtggaggaagggctgggccaccagggatcacagaccacaggaagatgggaggtggaagcagaggccctgcccccaccccttcctgtctcactcttctgtcttgtccccacccatgcgccttcgtgcctgagaccagggtggccacacaggcagggcctggctccagtctcatcctcccattgcccagtgagccctgctcttctctccccagccccctcccaccgctgcctcgtagagtgacctcggacagagcccccctagcaatacagggaggctcccggggcctggacaggcgggctcggaggctacccgctgtggccggtgccagctgcccttgcagggtgggtgagctctcaggccgagagccttatttacctagtgcaaaaactgtaaaagtgtacagactcttcacagatttttatcttaattgcaagtctgccgattttgtaaatgttcttggtgtttgactgtaatgtaactatctcacctaatggttgtacatatcctttggtcctggtgctgccgagggctggccgggactgctgctctccccagggttttattttatttctgaatctagagaacagtattgggcaggaggaaaggcttggtgtctggcggggggtgtc

SEQ ID NO: 183443 - DNA, 863 bp, Homo Sapiens
  misc_feature (118)..(156): n is a, c, g, or t
  misc_feature (494)..(522): n is a, c, g, or t
ttggcaagattcgatgggatttatcagtgtgtagatagctctataatgcttgaattgtacacttctaagtgtgcagtgcaagagcttgtttatatttcatactttttatactttgagnnnnnnnnnnnnnnnnnnnnnnnnnnnnnnnnnnnnnnnccatgaccaagtaaaggataaattcaaaaaatagcctcatgagacttggcatacacactcatgggattccagttattatggagtgcttccatccctctccaccccttccccccaaaaggttttctttgcaagtgcttttggaactaagagctagtatcttggattaactgatgcctgctagtgctttctgattactcgcattctgtttcttgctttaaaagaagagtaaagacaagagtgttggaccagtattgcagttctgtagtgtcatttcttataaaaaacaaaacaacaacaataatttatcaaaattggcatatttaaagcctaacattctnnnnnnnnnnnnnnnnnnnnnnnnnnnnntgtttcagcctctttaatctctttataagttaactaataaatctattttcttcagacttctgcaatagttctttaaaatcacaacagttagcaagctgacttttgtaatgtgctcaatacaaatacttgtgaacttttaatatgttgagtgctttcattttgataactggatctccatttgatattttcatttgtataactcatttgcagtctgaaaattttttttagtgccagtccctgaacatatcattgaaagttaattttctttgcattttaaaatatctggattatgaagaaaaagtgatgaaaataaattaaaactgaattacctttttctaatg

SEQ ID NO: 183444 - DNA, 1655 bp, Homo Sapiens
  misc_feature (1395)..(1433): n is a, c, g, or t
ttggccatttgatatttatattttgaaatttattatttctatattgttgagttattttagtcatagttataaactgtcagtgggaaaataaatctaagttgctggccattcttagttatagtttctgaggaataaaggtaagttctgagataaagcagtacttgagactataaatacactaacttaataaattggtctttattggttcatatttttgggttatattaattttcaaaacattgaaagtaaatttggtatcttttttcccctctctaggctgaagggtatgtgattggcagctgtattaaacacattccaatcgcaggacgagatataacatattttattcagcaactgctgagagaccgagaagtaggaatccctccagaacaatccttggaaactgctaaggcagtaaaggagcgctatagttatgtctgcccagatttagtaaaagaatttaacaagtatgatacagatgggtcaaaatggattaaacagtatactggaatcaatgctatctcaaagaaagagttttctatcgatgttggttatgagagatttttgggacctgaaatcttttttcatccagagtttgctaatccagactttacacaacctatctcagaagttgtagatgaagtaattcagaattgtcctattgatgtcagacgtcctctctacaagaatattgtcctctctggaggttcaaccatgttcagggactttggacgtcgcttgcaaagagatttgaaaagaactgtagatgcccggctgaaattaagtgaggaattgagtggtggtagattgaagccaaaacctattgatgtacaagtcattacacaccacatgcagcgatatgcagtttggtttggaggatcaatgctggcttccacgcctgagttctaccaagtatgccacaccaaaaaggattatgaagaaattggacctagcatttgtcgtcacaatccagtgtttggagtcatgtcgtaaaattggcttcatagttattggggttagggaggtggggaagagataatctttctgattacctgttttgtctggatggctggttttgaggttttaaacctgacttgaaatagtaacaccaaacatgattatacaggaatattttaataagtgtatcaccatgcagatgtagaagagagcgaaagtgattgtgtttttctttagattgaatatttgaatcttatgtgtaacaaaaagaagtgggttttagttctttctgtgccctgatattttgtatattaatgaattatccaagattcgatgggatttatcagtgtgtagatagctctataatgcttgaattgtacacttctaagtgtgcagtgcaagagcttgtttatatttcatactttttatactttgagnnnnnnnnnnnnnnnnnnnnnnnnnnnnnnnnnnnnnnnccatgaccaagtaaaggataaattcaaaaaatagcctcatgagacttggcatacacactcgtgggattccagttattatggagtgcttccatccctctccaccccttccccccaaaaggttttctttgcaagtgcttttgggaactaagagctagtatcttggattaactgatgcctgctagtgcttttctgattactcgcattctgtttcttgcttttaaa

SEQ ID NO: 183445 - DNA, 2480 bp, Homo Sapiens
ccaactttgtacaaaaaagttggggaagtgatagccgccgaccgagcctgctgctttcttgctactgcttcggcttcccggctaccccccggacggtgaaggcggcccagctgtggatggtcagatagcccttgtctcccgccgccaatctctggcccctagcagcacggagcagacggcggcagcagcagcagcaggcgaggaggaagatggcgggacggctgccggcctgtgtggtggactgtggcacggggtatacaaaactaggatatgctggaaatacagaaccacagtttatcatcccttcctgtattgctattaaggagtcagcaaaagtgggtgatcaagctcaaaggagggtgatgaaaggtgttgatgacctagacttcttcattggtgatgaagcaatagaaaaacctacatatgcaacaaagtggccaatccgccatggtatagttgaagattgggacttaatggaaaggtttatggagcaagtgatctttaaatatttaagggcagaacctgaagaccattattttcttttgactgaacctccattgaatactccagaaaacagggaatatactgctgaaataatgtttgagtccttcaatgttccaggcttgtacattgctgtgcaggctgttcttgccttagctgcatcttggacctcaagacaagtaggagaacggacgttgaccggtacggtaatagacagtggagatggtgtcactcatgtcattcctgtggctgaagggtatgtgattggcagctgtattaaacacattccaatcgcaggacgagatataacatattttattcagcaactgctgagagaccgagaagtaggaatccctccagaacaatccttggaaactgctaaggcagtaaaggagcgctatagttatgtctgcccagatttagtaaaagaatttaacaagtatgatacagatgggtcaaaatggattaaacagtatactggaatcaatgctatctcaaagaaagagttttctatcgatgttggttatgagagatttttgggacctgaaatcttttttcatccagagtttgctaatccagactttacacaacctatctcagaagttgtagatgaagtaattcagaattgtcctattgatgtcagacgtcctctctacaagaatattgtcctctctggaggttcaaccatgttcagggactttggacgtcgcttgcaaagagatttgaaaagaactgtagatgcccggctgaaattaagtgaggaattgagtggtggtagattgaagccaaaacctattgatgtacaagtcattacacaccacatgcagcgatatgcagtttggtttggaggatcaatgctggcttccacgcctgagttctaccaagtatgccacaccaaaaaggattatgaagaaattggacctagcatttgtcgtcacaatccagtgtttggagtcatgtcgtaaaattggcttcatagttattggggttagggaggtggggaagagataatctttctgattacctgttttgtctggatggctggttttgaggttttaaacctgacttgaaatagtaacaccaaacatgattatacaggaatattttaataagtgtatcaccatgcagatgtagaagagagcgaaagtgattgtgtttttctttagattgaatatttgaatcttatgtgtaacaaaaagaagtgggttttagttctttctgtgccctgatattttgtatattaatgaattatccaagattcgatgggatttatcagtgtgtagatagctctataatgcttgaattgtacacttctaagtgtgcagtgcaagagcttgtttatatttcatactttttatactttgaggaaaaaaagtcaaagaaaaattgtatttgagggaaaaaaccatgaccaagtaaaggataaattcaaaaaatagcctcatgagacttggcatacacactcatgggattccagttattatggagtgcttccatccctctccaccccttccccccaaaaggttttctttgcaagtgcttttggaactaagagctagtatcttggattaactgatgcctgctagtgctttctgattactcgcattctgtttcttgctttaaaagaagagtaaagacaagagtgttggaccagtattgcagttctgtagtgtcatttcttataaaaaacaaaacaacaacaataatttatcaaaattggcatatttaaagcctaacattctaataaagggcacaaatttctttttaatacttgtttcagcctctttaatctctttataagttaactaataaatctattttcttcagacttctgcaatagttctttaaaatcacaacagttagcaagctgactttggtaatgtgctcaatacaaatacttgtgaacttttaatatgttgagtgctttcattttgataactggatctccatttgatattttcatttgtatactcatttgc

SEQ ID NO: 183446 - DNA, 808 bp, Homo Sapiens
aagtatgattatgtaccattgtatcatagtaaaactagccaaagaaatttatgaaaggatgaaaaaatgattctggccataaaaggtagtatattttggtgggttcttaagccagcatgataatggcgagtttttttcttctcaggaggaaaaaaagcaagagcagaagtcgtagtcatgaacgaaagagaagcaaaagtaaggaacggaagcgaagtagagacagagaaaggaaaaagagcaaaagccgtgaaagaaagcgaagtagaagcaaagagaggcgacggagccgctcaagaagtcgagatcgaagatttagaggccgctacagaagtccttactccggaccaaaatttaacagtgccatccgaggaaagattgggttgcctcatagcatcaaattaagcagacgacgttcccgaagcaaaagtccattcagaaaagacaagagccctgtgagagaacctattgataatttaactcctgaggaaagagatgcaaggacagtcttctgtatgcagctggcggcaagaattcgaccaagggatttggaagagtttttctctacagtaggaaaggttcgagatgtgaggatgatttctgacagaaattcaagacgttccaaaggaattgcttatgtggagttcgtcgatgttagctcagtgcctctagcaatagggattaactggccaacgagttttaagcgtgccaatcatagtacaggcatcacaggcagaaaaaaacagagctgcagcaatggcaaacaatttacaaaaggaagtgctggacctatgagctttatgtgggc

SEQ ID NO: 183447 - DNA, 1187 bp, Homo Sapiens
ctttgtacaaaaaagttgggacagaaattcaagacgttccaaaggaattgcttatgtggagttcgtcgatgttagctcagtgcctctagcaataggattaactggccaacgagttttaggcgtgccaatcatagtacaggcatcacaggcagaaaaaaacagagctgcagcaatggcaaacaatttacaaaagggaagtgctggacctatgaggctttatgtgggctcattacacttcaacataactgaagatatgcttcgtgggatctttgagccttttggaagaattgaaagtatccagctgatgatggacagtgaaactggtcgatccaagggatatggatttattacattttctgactcagaatgtgccaaaaaggctttggaacaacttaatggatttgaactagcaggaagaccaatgaaagttggtcatgttactgaacgtactgatgcttcgagtgctagttcatttttggacagtgatgaactggaaaggactggaattgatttgggaacaactggtcgtcttcagttaatggcaagacttgcagagggtacaggtttgcagattccgccagcagcacagcaagctctacagatgagtggctctttggcatttggtgctgtggcagaattctcttttgttatagatttgcaaacaagactttcccagcagactgaagcttcagctttagctgcagctgcctctgttcagccacttgcaacacaatgtttccaactctctaacatgtttaaccctcaaacagaagaagaagttggatgggataccgagattaaggatgatgtgattgaagaatgtaataaacatggaggagttattcatatttatgttgacaaaattcagctcagggcaatgtgtatgtgaagtgcccatcaattgctgcagctattgctgctgtcaatgcattgcatggcaggtggtttgctggtaaaatgataacagcagcatatgtacctcttccaacttaccacaacctgtttcctgattctatgacagcaacacagctactggttccaagtagacgatgaagaagatatagtcccttatgtatatagctttttttctttcttgagaattcatcttgagttatcttttatttagataaaaataaagagcaaggatctactgtcatttgtatgcaatttcctgttaccttgaaaaa

SEQ ID NO: 183448 - DNA, 2274 bp, Homo Sapiens
  misc_feature (93)..(101): n is a, c, g, or t
  misc_feature (206)..(229): n is a, c, g, or t
ttggggagcttgtctacgctgtcgcaggggtggatcctgagctgccgaagccgccgtcctgctctcccgcgtgggcttctctaattccattgnnnnnnnnnagattctctcgggcctagccgtccttggaacccgatattcgggctgggcggttccgcggcctgggcctaggggcttaacagtagcaacagaagcggcggcggcgnnnnnnnnnnnnnnnnnnnnnnnnatctcttcccgaacacgagcaccacaggcgcccgaaggccggaacaggcgtttagagaaaatggcagacgatattgatattgaagcaatgcttgaggctccttacaagaagacttgcctaacgatatctcacctctactcccatgaattcacctttgattccagtgtgaactgtcaatcataaggatgagaacaagttgagcagtgccaacggccatgaagaacgtagcaaaaagaggaaaaaaagcaagagcagaagtcgtagtcatgaacgaaagagaagcaaaagtaaggaacggaagcgaagtagagacagagaaaggaaaaagagcaaaagccgtgaaagaaagcgaagtagaagcaaagagaggcgacggagccgctcaagaagtcgagatcgaagatttagaggccgctacagaagtccttactccggaccaaaatttaacagtgccatccgaggaaagattgggttgcctcatagcatcaaattaagcagacgacgttcccgaagcaaaagtccattcagaaaagacaagagccctgtgagagaacctattgataatttaactcctgaggaaagagatgcaaggacagtcttctgtatgcagctggcggcaagaattcgaccaagggatttggaagagtttttctctacagtaggaaaggttcgagatgtgaggatgatttctgacagaaattcaagacgttccaaaggaattgcttatgtggagttcgtcgatgttagctcagtgcctctagcaataggattaactggccaacgagttttaggcgtgccaatcatagtacaggcatcacaggcagaaaaaaacagagctgcagcaatggcaaacaatttacaaaagggaagtgctggacctatgaggctttatgtgggctcattacacttcaacataactgaagatatgcttcgtgggatctttgagccttttggaagaattgaaagtatccagctgatgatggacagtgaaactggtcgatccaagggatatggatttattacattttctgactcagaatgtgccaaaaaggctttggaacaacttaatggatttgaactagcaggaagaccaatgaaagttggtcatgttactgaacgtactgatgcttcgagtgctagttcatttttggacagtgatgaactggaaaggactggaattgatttgggaacaactggtcgtcttcagttaatggcaagacttgcagagggtacaggtttgcagattccgccagcagcacagcaagctctacagatgagtggctctttggcatttggtgctgtggcagatttgcaaacaagactttcccagcagactgaagcttcagctttagctgcagctgcctctgttcagccacttgcaacacaatgtttccaactctctaacatgtttaaccctcaaacagaagaagaagttggatgggataccgagattaaggatgatgtgattgaagaatgtaataaacatggaggagttattcatatttatgttgacaaaaattcagctcagggcaatgtgtatgtgaagtgcccatcaattgctgcagctattgctgctgtcaatgcattgcatggcaggtggtttgctggtaaaatgataacagcagcatatgtacctcttccaacttaccacaacctgtttcctgattctatgacagcaacacagctactggttccaagtagacgatgaaggaagatatagtcccttatgtatatagctttttttctttcttgagaattcatcttgagttatcttttatttagataaaaataaagaggcaaggatctactgtcatttgtatgcaatttcctgttaccttgaaaaaaaaaaatgttaaacaggaatgcagtgtgctcattctccctaaaatagtaaatcccactgtatacaaaactgttctcttgttctgccttttaaaaatgttcatgtagaaaattaatgaactataggaataactctaggagaacaaatgtgctttcctgtaaaaagggcagaccagggatgtaatgtttttaatgtttcagaa

SEQ ID NO: 183449 - DNA, 1298 bp, Homo Sapiens
ctttgtacaaaaaagttggctggaaaggactggaattgatttgggaacaactggtcgtcttcagttaatggcaagacttgcagagggtacaggtttgcagattccgccagcagcacagcaagctctacagatgagtggctctttggcatttggtgctgtggcagaattctcttttgttatagatttgcaaacaagactttcccagcagactgaagcttcagctttagctgcagctgcctctgttcagccacttgcaacacaatgtttccaactctctaacatgtttaaccctcaaacagaagaagaagttggatgggataccgagattaaggatgatgtgattgaagaatgtaataaacatggaggagttattcatatttatgttgacaaaaattcagctcagggcaatgtgtatgtgaagtgcccatcaattgctgcagctattgctgctgtcaatgcattgcatggcaggtggtttgctggtaaaatgataacagcagcatatgtacctcttccaacttaccacaacctgtttcctgattctatgacagcaacacagctactggttccaagtagacgatgaaggaagatatagtcccttatgtatatagctttttttctttcttgagaattcatcttgagttatcttttatttagataaaaataaagaggcaaggatctactgtcatttgtatgcaatttcctgttaccttgaaaaaataaaaatgttaacaggaatgcagtgtgctcattctccctaaatagtaaatcccactgtatacaaaactgttctcttgttctgccttttaaaatgttcatgtagaaaattaatgaactataggaatagctctaggagaacaaatgtgctttctgtaaaaaggcagaccagggatgtaatgtttttaatgtttcagaagcctaactttttacacagtggttacatttcacatttcactaatgttgatatttggctgatggttgagcagtttctgaaatacacatttagtgtatggaatacaagacagctaaagggctgtttggttagcatctcatcttgcattctgatcaattggcaagaaaagggagatttcaaaattatatttcttgatggtatcttttcaattaatgtatctgtaaaagtttctttgtaaatactatgtgttctggtgtgtcttaaaattccaaacaaaatgatccctgcatttcctgaagatgtttaaacgtgagagtctggtacgcaaagccttctgagaaagaaataggaaatgccaaaataggttttgtctggttgcatataa

SEQ ID NO: 183450 - DNA, 1958 bp, Homo Sapiens
  misc_feature (511)..(523): n is a, c, g, or t
ttggctcttgaagagctactttctgttttaatgttaagattcttgtgtcttagttttttttaacatggatgtaattccatgtaaacaggtatggaagtaggaaatgtttaggctggacttggtggattattaattgactttcttgggttcttgggagtcaacattactaaagcagtgtgaatccctgtttgcttcagggcgagatgtgtgacagaggtggcatcaagctcttacagtcccaaccctccaacggaaatgggcgaagatctcaggaatggcatcggtcacaggaaatcgatagtggctggctgctagcatggccacttggggcttaggcagaaatagagccatggtactgaccaaagggaccatagcacatggaataaaactcaaaacaggacttcatgttttatggaaattatatttaaccacttcaacattgtaaatctggataacttttaatatctaaactatataagaaagtaaaatttaacatgttaatatggaaaannnnnnnnnnnnngtatcttgatgacttaaatgtaagcaacaaagtggttaaacacatacccatctaaatttttttatagccttccatgttaaactataagtaaataattagttttaaaattgttttgtattttcttattcctgttccctttaccctttgacaacttgaaatgttaccacttcgtcctcatgatgttcttctatcaaccctgcttaggatgagaacaagttgagcagtgccaacggccatgaagaacgtagcaaaaagaggaaaaaaagcaagagcagaagtcgtagtcatgaacgaaagagaagcaaaagtaaggaacggaagcgaagtagagacagagaaaggaaaaagagcaaaagccgtgaaagaaagcgaagtagaagcaaagagaggcgacggagccgctcaagaagtcgagatcgaagatttagaggccgctacagaagtccttactccggaccaaaatttaacagtgccatccgaggaaagattgggttgcctcatagcatcaaattaagcagacgacgttcccgaagcaaaagtccattcagaaaagacaagagccctgtgagagaacctattgataatttaactcctgaggaaagagatgcaaggacagtcttctgtatgcagctggcggcaagaattcgaccaagggatttggaagagtttttctctacagtaggaaaggttcgagatgtgaggatgatttctgacagaaattcaagacgttccaaaggaattgcttatgtggagttcgtcgatgttagctcagtgcctctagcaataggattaactggccaacgagttttaggcgtgccaatcatagtacaggcatcacaggcagaaaaaaacagagctgcagcaatggcaaacaatttacaaaagggaagtgctggacctatgaggctttatgtgggctcattacacttcaacataactgaagatatgcttcgtgggatctttgagccttttggaagaattgaaagtatccagctgatgatggacagtgaaactggtcgatccaagggatatggatttattacattttctgactcagaatgtgccaaaaaggctttggaacaacttaatggatttgaactagcaggaagaccaatgaaagttggtcatgttactgaacgtactgatgcttcgagtgctagttcatttttggacagtgatgaactggaaaggactggaattgatttgggaacaactggtcgtcttcagttaatggcaagacttgcagagggtacaggtttgcagattccgccagcagcacagcaagctctacagatgagtggctctttggcatttggtgctgtggcagaattctcttttgttatagatttgcaaacaagactttcccagcagactgaagcttcagctttagctgcagctgctctgttcagccacttgcaacacaatgtttccactc

SEQ ID NO: 183451 - DNA, 1593 bp, Homo Sapiens
  misc_feature (212)..(234): n is a, c, g, or t
gctttcattagttcaacagtcagttttttaatttcattttgaagtttgtgaaccataacttcgagttgtcctttggaatttctctctctaaaaataatttcctttagcctatctgtggtaagtagagccagactatgaatatcctctttttcatttgcatgtttatgcagctcatcaatataatccatgagtttattttcggcttgctcagnnnnnnnnnnnnnnnnnnnnnnntggtctagctgttcaacaagggactggtaagtgttgtcttctgagtgactttggtctactttaattatttcagtctttggcttttctgattcttgtaacataggacagtttgctaaagatgagcttacatataattctttaaggtaaggtggtttcattttacgattacaacttacaaaagagttgtagtttttattgtggtgcttaatagtttgaatggttttggcatcataagggatttttgatcttcgaggaacttttctattgcattcttttctgtttccatagtcactttcagaagttatatctgtgtctctttttggtctggggtctttctcaagaacgttatctattgaattagaagtttcatttagaagttgtagaatttggtcatctaatttctgaagttttatctcattctgcaaatcgttttcatgattatttttctctggctcagaagattgacacacagacataaaagacgtcaacacagcatcacttggtgtacttgcaaactgttccaagggaactaactcatcgataggtgctgttatcactggcattctatcaatgatctcatcttcacttatatttaggggagaatcagaagaaactaaattatccaaaagaccttctaggcactgcagctgtgatgaatttatttctgtcaaatttactggttcaccaaatatgttcttgcaatctaggattctaagctgtggcaaagtctggagaataactgctctgtaccctggcagtcgacagacaggattatcgtctccatctttctccaaaataagattggtcaggaagtgcaatcctaccatacactgaagtaagtgatggatactatctatacgattactatgtagatcaatatatctaagtttatgcttaattccatgaaggggaatcaatccactaagatcatctatgtggttataagatacatttagtctagtcagattaattagttcttcaagtccttctacttttgtaatcaaattgcaggacaaatttaatgtgcacagttttgtcagtgtgtttagtccttcaattctacttatttgattagatgacagatctagatgttgtaaattccaaatatgatcaatggcttcgatcttggagatgttattgcaatgaagattgacggcatgaagagttgaatctaaagataattctgatatgctctgcaagcctttgtccatgaagcatacatccccgcagctgctgtcgccgtcttcgttttccacttccgcctctgccgccaccaccgccgccgccgcctccatagcactggcgacggggagcggggtcttaaccggcacccagcgaggggtccgtgagcttggccaa

SEQ ID NO: 183452 - DNA, 1647 bp, Homo Sapiens
  misc_feature (100)..(122): n is a, c, g, or t
  misc_feature (376)..(408): n is a, c, g, or t
ttggcaagaatcagaaaagccaaagactgaaataattaaagtagaccaaagtcactcagaagacaacacttaccagtcccttgttgaacagctagaccannnnnnnnnnnnnnnnnnnnnnnctgagcaagccgaaaataaactcatggattatattgatgagctgcataaacatgcaaatgaaaaagaggatattcatagtctggctctacttaccacagataggctaaaggaaattatttttagagagagaaattccaggacaactcgaagttatggttcacaaacttcaaaatgaaattaaaaaactgactgttgaactaatgaaagcaaaagatcaacaagaggatcaccttaaacacttaagaaccctcgnnnnnnnnnnnnnnnnnnnnnnnnnnnnnnnnnggcagcagcaggcagcacagataagactgatccaagaggtggaactcaaagcttcagctgccgatagagaaatatacttacttagaacttcccttcatcgagaaagagaacaagcgcaacaacttcatcaacttcttgcattgaaagaacaggaacacaggaaggaacttgaaacaagggagttttttactgatgctgacttccaggatgccttagctaaagaaatagccaaagaagagaaaaagcatgagcaaatgataaaagaataccaagagaaaattgacgtgttaagccagcagtatatggatttagaaaatgaattccgtattgctttaactgttgaagccagaagatttcaagatgttaaagatggttttgaaaatgttgcaactgagttagcaaagagcaaacatgctcttatttgggctcaacgaaaagaaaatgagtcttcctctttaattaaagatctgacctgtatggtaaaggaacaaaaaacaaaactggcagaagtttctaaattgaaacaagaaacagcagcaaatttacagaatcaaatcaacacccttgaaattttaattgaagatgacaagcagaagagtattcaaatagaacttctcaagcacgaaaaagtccagcttatttctgagctagcagccaaggaatcactaatatttggtttaaggacagaaagaaaagtatggggacatgagctggcacaacaaggatcttctctagcccaaaatcgtggaaaattggaggctcaaattgagagtttatctagagagaatgaatgtctgcgaaagacaaatgaaagtgatagtgatgcattaagaatgaagtgcaaaatcatagacgaccaaactgaaactattagaaaattaaaagattgtttacaagaaaaagatgaacacatcaaaagattacaagaaaagatcacagaaatagaaaaatgcactcaagaacaacttgatgaaaaatcttcacaactggatgaggtacttgagaagttggaaaggcacaatgaaagaaaagaaaaactaaaacaacagttgaaaggaaaggaagtagaacttgaagaaatcagaaaagcttacagtacactgaatcggaagtggcatgataaaggagaacttctatgtcatcttgaaacacaagtaaaagaagtgaaagaaaaatttgaaaccaaggaaagaaactaaaagcgggaaagagaacaaagtatttgaactacaaaagaaa

SEQ ID NO: 183453 - DNA, 1599 bp, Homo Sapiens
ttggcccacggctgccttcccggtgcccgacgtgttcccactgccgccgccaccaccgccgctcccgagcccgggacaggcgtcccactgctcgtcgcctgccacccgcttcggccacggccagacgcccgcggccttcctcagcgctctgctgccctcgcagccgccgccggcggccgtcaacgccctggggctgcccaagggtgtcacccccgcaggatttccaaagaaggccagtagaactgctagaatagcctccgatgaggaaattcaaggcacaaaggatgctgttattcaagacctggaacgaaaacttcgcttcaaggaggacctcctgaacaatggccagccgaggttaacatacgaagaaagaatggctcgtcgactgctaggtgctgacagtgcaactgtctttaatattcaggagccagaagaggaaacagctaatcaggaatacaaagtctccagctgtgaacagagactcatcagtgaaatagagtacaggctagaaaggtctcctgtggatgaatcaggtgatgaagttcagtatggagatgtgcctgtggaaaatggaatggcaccattctttgagatgaagctgaaacattacaagatctttgagggaatgccagtaactttcacatgtagagtggctggaaatccaaagccaaagatctattggtttaaagatgggaagcagatctctccaaagagtgatcactacaccattcaaagagatctcgatgggacctgctccctccataccacagcctccaccctagatgatgatgggaattatacaattatggctgcaaaccctcagggccgcatcagttgtactggacggctaatggtacaggctgtcaaccaaagaggtcgaagtccccggtctccctcaggccatcctcatgtcagaaggcctcgttctagatcaagggacagtggagacgaaaatgaaccaattcaggagcgattcttcagacctcacttcttgcaggctcctggagatctgactgttcaagaaggaaaactctgcagaatggactgcaaagtcagtgggttaccaaccccagatctaagctggcaactagatggaaagcccgtacgccctgacagtgctcacaagatgctggtgcgtgagaacggggtgcactctctgatcatagagccagtcacgtcacgtgatgccggcatctacacatgtatagctaccaaccgagcaggacagaactcattcagcctggagcttgtggttgctgctaaagaagcacacaaaccccctgtgtttattgagaagctccaaaacacaggagttgctgatgggtacccagtgcggctggaatgtcgtgtattgggagtgccaccacctcagatattttggaagaaagaaaatgaatcactcactcacagcactgaccgagtgagcatgcaccaggacaaccacggctacatctgcctgctcattcacggagccacaaaagaagatgctgggtggtatactgtgtcagccaagaatgaagcacggattgtgtcctgtactgccaggctggacgtttacacccagtggcatcagcagtcacagagcaccaagccaaaaaa

SEQ ID NO: 183454 - DNA, 1164 bp, Homo Sapiens
  misc_feature (992)..(1000): n is a, c, g, or t
ttggctaaaagtctggaagtaactactatctatatttctatctatctgtcatctttcttgtttcaaggcctcgttctagatcaagggacagtggagacgaaaatgaaccaattcaggagcgattcttcagacctcacttcttgcaggctcctggagatctgactgttcaagaaggaaaactctgcagaatggactgcaaagtcagtgggttaccaaccccagatctaagctggcaactagatggaaagcccgtacgccctgacagtgctcacaagatgctggtgcgtgagaacggggtgcactctctgatcatagagccagtcacgtcacgtgatgccggcatctacacatgtatagctaccaaccgagcaggacagaactcattcagcctggagcttgtggttgctgctaaagaagcacacaaaccccctgtgtttattgagaagctccaaaacacaggagttgctgatgggtacccagtgcggctggaatgtcgtgtattgggagtgccaccacctcagatattttggaagaaagaaaatgaatcactcactcacagcactgaccgagtgagcatgcaccaggacaaccacggctacatctgcctgctcattcagggagccacaaaagaagatgctgggtggtatactgtgtcagccaagaatgaagcagggattgtgtcctgtactgccaggctggacgtttacacccagtggcatcagcagtcacagagcaccaagccaaaaaaagtacggccctcagccagtcgctatgcagcactttcggaccagggactagacatcaaagcagcgttccaacctgaggccaacccatctcacctgacactgaatactgccttggtagaaagtgaggacctgtaatccagcattcttgttaaagctgaaacactgaaacagccattgccttgaccaacatattcctttgtcacattatgtaaaaggcagaaacatacctttgactataagaaattnnnnnnnnncaccaaaataatatttttcttacttgatataccaaacttagtttaagtagataatgctaatacaaatatacacattgcacagaaaatacacatttactgtccaatttaaaactttgggaattgctgtgattaaagtgatcaaaatgccaaaatactaaagggaa

SEQ ID NO: 183455 - DNA, 1531 bp, Homo Sapiens
ccaactttgtacaaaaaagttggagacagatacagtgaaccaagtgcaatatgtaaggatgaaagaagaagagatgacaaagaaatccaagtaaatgccttgtctttgcaaatgtttttatattaaatcataaggaaggaactacttgccttaaatgttaatatcaaaagagttttctaacaaggttaataccttagttcttaacattttttttctttatgtgtagtgttttcatgctaccttggtaggaaacttatttacaaaccatattaaaaggctaatttaaatataaataatataaagtgctctgaataaagcagaaatatattacagttcattccacagaaagcatccaaaccacccaaatgaccaaggcatatatagtatttggaggaatcaggggtttggaaggagtagggaggagaatgaaggaaaatgcaaccagcatgattatagtgtgttcatttagataaaagtagaaggcacaggagaggtagcaaaggccaggcttttctttggttttcttcaaacataggtgaaaaaaacactgccattcacaagtcaaggaacccagggccagctggaagtgtggagcacacatgctgtggagcacacatgctgtggagattgcagtgtgtctgaggtttgtgtagtagtggaagattttaggtatgtagagcaagttgaaaatggattgagactgcatggtggcataaatgagaaattgcctgtagcatctagtctacttgaaggaagtggagacataaggagagacaaaaacaggtttgtgccataaagtattttttcaaagacaccaagatgtggtaaatgaaaattattagttcacttccctgctgccatgaaactttgccttaagaaggtgctggattccaaggtttgtaaaggcatctcggtaaagactgctttttgaatgcatatgattttgcatcagctagactgagttgattctgaccagacttgatggttttaagtcggaaccgataaattttaaaaaggagaaaaaataatttgacctagtagtataaaacatgaggctttaatggtactttgctatgaaaagaaaacactgtattccttatgcaaaacacatgtatctttcattatttataagtggcctctcttagctcagttactcaattcatacgtagtattttttaaaataattttatatctgtgtaccaccccatatatttcatattactgtttcacatgtacagctttctacttctttgtaagaacaccaaccaaccaaggtttaagtgattaataggcttgagcaccgggtggcagatgttctatgcagtgtggttcaagtttctttgaccgcacttatatgcattgctaatatggaatttaagataccatacacagtctctcatggacctatctctattgtagaattatgacttatgtcttacttggcaaatttttctgaatgtgacctttttttgctgatttgctgggtttgggattaactagcattattttgccccctttatattgtatttat

SEQ ID NO: 183456 - DNA, 1029 bp, Homo Sapiens
ttgggtaaaaggcacaaacatacctttgactataagaaattagggagaaaacaccaaaataatatttttcttacttgatataccaaacttagtttaagtagataatgctaatacaaatatacacattgcacagaaaatacacatttactgtccaatttaaaactttggaattgctgtgattaaagtgatcaaaatgccaaaatactaaaggaaatcaattgttcacaggtaactacaatttgtattatctacaagtgcctttaaacacaagatataggtgctgtgtagcctgatagtgtgaaatgtttaatgagggagttgtaccacaaacagtactacaatgattctgaagcacagtgtattcagacagatacagtgaaccaagtgcaatatgtaaggatgaaagaagaagagatgacaaagaaatccaagtaaatgccttgtctttgcaaatgtttttatattaaatcataaggaaggaactacttgccttaaatgttaatatcaaaagagttttctaacaaggttaataccttagttcttaacattttttttctttatgtgtagtgttttcatgctaccttggtaggaaacttatttacaaaccatattaaaaggctaatttaaatataaataatataaagtgctctgaataaagcagaaatatattacagttcattccacagaaagcatccaaaccacccaaatgaccaaggcatatatagtatttggaggaatcaggggtttggaaggagtagggaggagaatgaaggaaaatgcaaccagcatgattatagtgtgttcatttagataaagtagaaggcacaggagaggtagcaaaggccaggcttttctttggtttcttcaaacataggtgaaaaaacactgccattcacaagtcaggaacccagggccagctggaagtgtggagcacacatgctgtggagcacacatgctgtggagattgcagtgtgtctgcgtttgtgtagtagtggaagattttactatgtagagcaagttgaaaatgga

SEQ ID NO: 183457 - DNA, 1633 bp, Homo Sapiens
gccaactttgtacaaaaaagttggcttgaattgcacgggtccacctgagcccattgaggcagctgtggccaggttcttctcagccagctgtgttcccggggcagataaaggacagttccccaacctgtgtcgcctgtgtgcggggacaggggaaaacaaatgtgccttctcctcccaggaaccgtacttcagctactctggtgccttcaagtgtctgagagacggggctggagacgtggcttttatcagagagagcacagtgtttgaggacctgtcagacgaggctgaaagggacgagtatgagttactctgcccagacaacactcggaagccagtggacaagttcaaagactgccatctggcccgggtcccttctcatgccgttgtggcacgaagtgtgaatggcaaggaggatgccatctggaatcttctccgccaggcacaggaaaagtttggaaaggacaagtcaccgaaattccagctctttggctcccctagtgggcagaaagatctgctgttcaaggactctgccattgggttttcgagggtgcccccgaggatagattctgggctgtaccttggctccggctacttcactgccatccagaacttgaggaaaagtgaggaggaagtggctgcccggcgtgcgcgggtcgtgtggtgtgcggtgggcgagcaggagctgcgcaagtgtaaccagtggagtggcttgagcgaaggcagcgtgacctgctcctcggcctccaccacagaggactgcatcgccctggtgctgaaaggagaagctgatgccatgagtttggatggaggatatgtgtacactgcaggcaaatgtggtttggtgcctgtcctggcagagaactacaaatcccaacaaagcagtgaccctgatcctaactgtgtggatagacctgtggaaggatatcttgctgtggcggtggttaggagatcagacactagccttacctggaactctgtgaaaggcaagaagtcctgccacaccgccgtggacaggactgcaggctggaatatccccatgggcctgctcttcaaccagacgggctcctgcaaatttgatgaatatttcagtcaaagctgtgcccctgggtctgacccgagatctaatctctgtgctctgtgtattggcgacgagcagggtgagaataagtgcgtgcccaacagcaatgagagatactacggctacactggggctttccggtgcctggctgaaatgctggagacgttgcatttgtgaaagatgtcactgtcttgcagaacactgatggaaataacaatgaggcatgggctaaggatttgaagctggcagactttgcgctgctgtgcctcgatggcaaacggaagcctgtgactgaggctagaagctgccatcttgccatggccccgaatcatgccgtggtgtctcggatggataaggtggaacgcctgaaacaggtgttgctccaccaacaggctaaatttgggagaaatggatctgactgcccggacaagttttgcttattccagtctgaaaccaaaaaccttctgttcaatgacaacactgagtgtctggccagactccatggcaaacacatatgaaaaatatttgggacacagtatgtcgcagcattactaa

SEQ ID NO: 183458 - DNA, 2633 bp, Homo Sapiens
  misc_feature (532)..(572): n is a, c, g, or t
ttgggtgggtagttttaatcctaatgtgacaagcagcatgcttggtaatgttaatataagtacaagcaatattcctagtgctgctggtgtgagtgttgggcctggagttaccagtggtgttaatgtgaatatcttgagtggcatgggcaatggtactatttcttcctctgctgctgttagcagtgttcctaatgcagctgcagggatgactgggggatcggtttcaagtcagcagcaacaaccaacagttaacacttcgaggttcagagttgtgaagttagattctagttctgagccctttaaaaaaggtagatggacttgcactgagttctatgaaaaagaaaatgctgtacctgctacagaaggtgtgctgataaataaagtggtggagactgtaaagcaaaatccgatagaagtgacttctgaaagggagagcactagtgggagttcagtgagcagtagtgtcagcacactgagtcactatacagagagtgtgggaagtggagagatgggagcccctactgtggtggtnnnnnnnnnnnnnnnnnnnnnnnnnnnnnnnnnnnnnnnnncagctctccaaggtgtgaccctccaacagatggattttggtagcactggtccacagagtattccagcagttagtataccacagagtatttctcagtcacagatctcacaagtacaattacagtctcaagaactgagctatcagcaaaagcaaggtcttcagccagtacctctgcaagccactatgagtgctgcaactggtatccagccatcgcctgtaaatgtggttggtgtaacttcagctttaggtcagcagccttccatttccagtttggctcaaccccagctaccatattctcaggcggctcctccagtgcaaactccccttccaggggcaccaccaccccaacagttacagtatggacaacagcaaccaatggtttctacacagatggccccaggccatgtcaaatcagtgactcaaaatcctgcttcagagtatgtacaacagcagccaattcttcaaacagcaatgtcctccggacagcccagttctgcaggagtaggagcaggaacaacagtgattcctgtggctcagccacagggtatccagctgccagtgcagcccacagcagtcccagcacaacctgcaggggcatctgtccagcctgttggccaggctccggcagcagtgtctgctgtacctactggcagtcagattgcaaatattggtcagcaagcaaacatacctactgcagtgcagcagccctctacccaggttccaccttcagttattcagcagggtgctcctccatcttcgcaagtggttccacctgctcaaactgggattattcatcagggagttcaaactagtgctccaagccttcctcaacaattggttattgcatcccaaagttccttgttaactgtgcctccccagccacaaggagtagaaccagtagctcaaggaattgtttcacagcagttgcctgcagttagttctttgccctctgctagtagtatttctgttacaagtcaggttagttcaactggtccttctggaatgccttctgccccaacaaacttggttccaccacaaaatatagcacaaacccctgctacccaaaatggtaatttggttcaaagtgttagtcaacctcccttgatagcaactaatacaaatttgcctttggcacaacagataccactaagttctacccagttctccgcacaatcattagctcaggcaattggaagccaaattgaagatgccaggcgtgcagcggagccctccttagttggcttacctcagactatcagtggtgacagtgggggaatgtcagcagtttcagatgggagtagcagcagcctagcagcctctgcttctcttttcccgttgaaggtgctaccgctgacgacacccctggtggatggcgaggatgagagctcctctggtgcaagtgtggtagctattgacaacaaaatcgagcaagctatggatctagtgaaaagccatttgatgtatgcggtcagagaagaagtggaggtcctcaaagagcaaatcaaagaactaatagagaaaaattcccagctggagcaggagaacaatctgctgaagacactggccagtcctgagcagcttgcccagtttcaggcccagctgcagactggctccccccctgccaccacccagccacagggcaccacacagccccccgcccagccagcatcgcagggctcaggaccaaccgcatagctgcctatgcccccgcagaactggctgctgcgtgtgaactgaacagacggagaagatgtgctagggagaatctgcctccacagtcacccatttcattgctcgctgcgaaagagacgtgagactgacatatgccattatctcttttccagtattaaacactcatatgcttatggcttgagaaatttcttagttgggtgaattaaaggttaatccgagaattagcatggatataccgggacctcatgcagcttggcagatatctgagaaatggtttaattcatgctcacgagctgtgtgcctttccatcccttccggctccctacccctcacttccaagggttctctctcctgcttgcgcttagtgtcc

SEQ ID NO: 183459 - DNA, 1141 bp, Homo Sapiens
gccaactttgtacaaaaaagttggcgtattcagctactctggtgccttcaagtgtctgagagacggggctggagacgtggcttttatcagagagagcacagtgtttgaggacctgtcagacgaggctgaaagggacgagtatgagttactctgcccagacaacactcggaagccagtggacaagttcaaagactgccatctggcccgggtcccttctcatgccgttgtggcacgaagtgtgaatggcaaggaggatgccatctggaatcttctccgccaggcacaggaaaagtttggaaaggacaagtcaccgaaattccagctctttggctcccctagtgggcagaaagatctgctgttcaaggactctgccattgggttttcgagggtgcccccgaggatagattctgggctgtaccttggctccggctacttcactgccatccagaacttgaggaaaagtgaggaggaagtggctgcccggcgtgcgcgggtcgtgtggtgtgcggtgggcgagcaggagctgcgcaagtgtaaccagtggagtggcttgagcgaaggcagcgtgacctgctcctcggcctccaccacagaggactgcatcgccctggtgctgaaaggagaagctgatgccatgagtttggatggaggatatgtgtacactgcaggcaaatgtggtttggtgcctgtcctggcagagaactacaaatcccaacaaagcagtgaccctgatcctaactgtgtggatagacctgtggaaggatatcttgctgtggcggtggttaggagatcagacactagccttacctggaactctgtgaaaggcaagaagtcctgccacaccgccgtggacaggactgcaggctggaatatccccatgggcctgctcttcaaccagacgggctcctgcaaatttgatgaatatttcagtcaaagctgtgcccctgggtctgacccgagatctaatctctgtgctctgtgtattggcgacgagcagggtgagaataagtgcgtgcccaacagcaacgagagatactacggctacactggggctttccggtgcctggctgagaatgctggagacgttgcatttgtgaaagatgtcactgtcttgcagaacactgatggaaataacaatgac

SEQ ID NO: 183460 - DNA, 983 bp, Homo Sapiens
gagcaatgcttttttttaatagccaactttgtacaaaaaagttgggtttggatggaggatatgtgtacactgcaggcaaatgtggtttggtgcctgtcctggcagagaactacaaatcccaacaaagcagtgaccctgatcctaactgtgtggatagacctgtggaaggatatcttgctgtggcggtggttaggagatcagacactagccttacctggaactctgtgaaaggcaagaagtcctgccacaccgccgtggacaggactgcaggctggaatatccccatgggcctgctcttcaaccagacgggctcctgcaaatttgatgaatatttcagtcaaagctgtgcccctgggtctgacccgagatctaatctctgtgctctgtgtattggcgacgagcagggtgagaataagtgcgtgcccaacagcaacgagagatactacggctacactggggctttccggtgcctggctgagaatgctggagacgttgcatttgtgaaagatgtcactgtcttgcagaacactgatggaaataacaatgaggcatgggctaaggatttgaagctggcagactttgcgctgctgtgcctcgatggcaaacggaagcctgtgactgaggctagaagctgccatcttgccatggccccgaatcatgccgtggtgtctcggatggataaggtggaacgcctgaaacaggtgttgctccaccaacaggctaaatttgggagaaatggatctgactgcccggacaagttttgcttattccagtctgaaaccaaaaaccttctgttcaatgacaacactgagtgtctggccagactccatggcaaaacaacatatgaaaaatatttgggaccacagtatgtcgcaggcattactaatctgaaaaagtgctcaacctcccccctcctggaagcctgtgaattcctcaggaagtaaaaccgaagaagatggctcagctcctcaagaaagcctcag

SEQ ID NO: 183461 - DNA, 1612 bp, Homo Sapiens
  misc_feature (1333)..(1347): n is a, c, g, or t
  misc_feature (1469)..(1493): n is a, c, g, or t
ttgggaactgtttgtatggcagcccatgttctctaatgccactgctctgttttaaaaactcagaggcaatttttacatatcagtaattgtttttataatttgtggttttcatgaaacattgctatgcatttattaggaaaaactgaatttcccaacaggtgaactgaaaagttattttaactattatacataatcaagatcctgcctctacggaattagctaaacctaaaaatgtttgcattaatgaataaattcttcctgcattccttggcccagttctggagttggtgacctttatcacaattattattttaggcggccagtgaactgctgcttcagaagtccatagcccagctctgaactttctcgataaaatgccatcagttcacctttaaagacacacattcctttgaaatccacccagtgtttaaaaagcaacttggaaatttacacattagcattgtactttctagccctaatttgtgaggttgcagctatcattatattctgcatgtatgtataacctgttgtgaacaatcatacttaacaaaactactgatggtttatgacaacgtagggtaactacagttcattctgttccaggttatataaaactgcatttcctgaatttggttaaaaactaaggatgatggattgcaaaacagttcttttaaattagtttatatgctttaggtgttttggaatttgccttcttgaacttcctgagtcacacagaaagcaactgtacacagtagaattctgtggcgcagaccatgctgtattaacacatcacttgctgtttcctactgagtgtaccactgccttcccttctagcccaggagaatgtttactcagtttagtgtcttgtatttctataatactccaacaggaatggtagtcacactgtcttgaaattgaatctgtccatctgtttataatcaagaacatatcagaaatatataggtcccaggtaatactcccaaacatcccactttttactgtttcaggccatcatatcattcttaagctacttggggtggtagtagaggattaggttgtctattataaaaccaaaactcattcgtttaatgaacttgactgtcatacctctatttagtaattgcgagggtaagattcatagtaggaatattggaaattttggcactctgagaataaataggcatatgatacccacttggacttttaacaaaagtaaaggaataaatttgcatataggcttggaaagtgaggcagcaatgctgttaactgcatttgttgtgatggtgcatttgattgaagcagcttgtctttattatgcaagactgtgtagagnnnnnnnnnnnnnnnggcattgtactttttgtttttgttataaaggaagacagaacaaactggaatgttttatgatgttgtatagcaatcgctttttacctttcaaagttccgggtaaaaatgtgttatatctgtannnnnnnnnnnnnnnnnnnnnnnnnaaagcactacatctgttttcactaattgttaatttctgtttgaacccttcatttaattttctcatagatttaagtaaacaggatgtattttgcacagtgcacttatgtctattttaaca

SEQ ID NO: 183462 - DNA, 1600 bp, Homo Sapiens
aaaaaagaggtgcgcacatggtccaggaagaaggcgttctcgggcagcggggggcgtggcgcaggatgagcctcggatgagccgccggatggtctgtgccgcccacttcctcttggctgccttcctccggcccagtgttccacgccaccacgactggatgcagatggctgatctcttcacccggaggaatttctgccgccagtgaaagcccctccaggcagcttggatctttgtggccaggctctgccgccggacctccagggcatcctctgtggcaaacagggtcttggggaagcggatgaagatcttggtcctgcccatcttgtactcttctggcttgtagcccaggtgtcggaccagcacagccaccccatcctgcggccgtcctgcccacgtgggccacgtctctgggcacagtgacttgtacctttgcaggaaagcttcgtatttgcggcgataggcaaagccggctctgcgcacgcgcaggttttccaacagccccaggtacttcacctggtggcggatcagcacctcgtcaaagcggccgggctgtttggcatcattgggtttgatgcagcggacgtaggcgggctccttagactgcaggatctccaccagctgcaggaggctcatcttgaactgggtggcgaccgtctctggccgcttcttgtcactgagctcgctccggtcaaagcactggctcataatgggattctttgagctacacatggtctccttaaggttccggaagagaaggtcattgtttttgtccagaaacccggtcacgctgtaggtcacctcccccgcatagtgcagaaggcggaattcccctcggcccagagatttcctggtccgctggtcagccagcttgtgcgtcaggaagtgtggatggtgcttgacagtatcctccagcttctccaggaaggtcaggtctgtggcctccccggggcgcagacactcctcatccaaaatcgagatgatgcccttaaacttctcctccaccagatcacagatgattttgttgttgaaatactggacgggctcccacgcgatgccctctgcctcgtactcctcctgctccgacttgagcgtgagctcgatgaagagctgctgcagcttctcgttgcagtaattgatgcagaactgctcaaagctgttatgctgaaacacttcaaagccataaatatccaggagcccgagaaccgtggtgctccgccagctggggctctccacgtccttggaggccagcgacctgttgatcttcccgacgagccaggtaaaagtgcggctgtacacagccttggcgagggcgtctcgtgcgtacgcggcctgctccaggttcagcgggctcaggagctcctcccccttggcgatgatcttcctgtgtgtcagggcttctcgcagcgtcgagccttccacgctgaggagcctggtcagatacttgagctggttctcggtggtgacctgggcattgctctcctcgttggcagcaaagtggatgttgcccaaatgaaggacgctggccacgatgctcagcaggtcctccacttcatcctcggtgaaatcaatgactgtcagagccaacttttttgtacaaagt

SEQ ID NO: 183463 - DNA, 1615 bp, Homo Sapiens
ttgggccacgattgacaagacacgggacgcggaggccttagttggccaagtactagtgaaaccatacatagacgaggtgattatagagcagtttgttgaatctcatcccaatggccttcaggtcatgtataataaactcctggagtttgttcctcaccattgccgccttcttcgagaagtcacaggaggtgccatctccagtgaaaaaggcaatactgttcctggatatgactttttggtgaattctgtttggccacaaatagtacaaggattagaagaaaagttaccctcgctttttaatcctgggaatcccgatgcatttcatgagaaatataccataagtatggattttgtcagaagattggaacggcagtgtggatcacaggctagtgtaaagagattaagagcccatcctgcctatcacagcttcaataagaagtggaacttgcctgtttattttcaaataagatttagagaaatagcgggatccttagaagcagcacttacagatgtcctggaagatgccccagctgaaagtccgtattgccttttggcttctcatagaacttggagcagccttaggaggtgttggtcagatgagatgttcttgccattactggtgcatcgcctgtggagactcactctgcagattttggcacgatactctgtgtttgtcaatgagctttcactcaggcccatttctaatgaaagtcccaaggagatcaagaaacctttggtaactggtagcaaagaaccttccatcacccaaggaaacactgaagaccaaggaagtggtccttcggaaacaaagcctgtggtttccatttcccgcactcagctcgtgtatgtggttgcagacctggacaagcttcaggagcagcttccagaactcttggaaataatcaagccaaaacttgaaatgattggctttaagaatttttcttctatctcagcagccctggaggactcccagagctctttttcagcctgtgtgccctccttgagtagcaagatcatccaggatttaagtgactcttgcttcggtttcctaaaaagcgccctggaggttcccaggctttaccgaagaaccaataaggaggtcccaaccacagcttcctcctatgtggacagtgctctgaagcccttagtccagcttcagagcggacacaaggataagctcaaacaagcaataattcagcagtggctagaaggcactctcagtgaaagcactcataagtactatgaaaccgtgtcagatgtattaaactctgtgaagaagatggaagagagcctgaaaaggctgaaacaagccagaaaaaccactcccgccaaccccgtcggtcccagtggtggcatgagcgacgacgacaaaatcaggctgcagttggccctagatgttgagtacttgggagagcagatacaaaagttgggactacaagcaagtgacataaaaaagcttctcagctctcgcagagcttgttgctgctgccaaggaccaggcaacagcagagcagccttaggcatcttggaagatcccgaggttagatcttaagcaggagaagagttggacttcaaggctgaagggaagaaagtgactctgttctcttagcaaccg

SEQ ID NO: 183464 - DNA, 1389 bp, Homo Sapiens
  misc_feature (1303)..(1313): n is a, c, g, or t
actttgtacaaaaaagttggcaaggagatcaagaaacctttggtaactggtagcaaagaaccttccatcacccaaggaaacactgaagaccaaggaagtggtccttcggaaacaaagcctgtggtttccatttcccgcactcagctcgtgtatgtggttgcagacctggacaagcttcaggagcagcttccagaactcttggaaataatcaagccaaaacttgaaatgattggctttaagaatttttcttctatctcagcagccctggaggactcccagagctctttttcagcctgtgtgccctccttgagtagcaagatcatccaggatttaagtgactcttgcttcggtttcctaaaaagcgccctggaggttcccaggctttaccgaagaaccaataaggaggtcccaaccacagcttcctcctatgtggacagtgctctgaagcccttattccagcttcagagcggacacaaggataagctcaaacaagcaataattcagcagtggctagaaggcactctcagtgaaagcactcataagtactatgaaaccgtgtcagatgtattaaactctgtgaagaagatggaagagagcctgaaaaggctgaaacaagccagaaaaaccactcccgccaaccccgtcggtcccagtggtggcatgagcgacgacgacaaaatcaggctgcagttggccctagatgttgagtacttgggagagcagatacaaaagttgggactacaagcaagtgacataaaaagcttctcagctctcgcagagcttgttgctgctgccaaggaccaggcaacagcagagcagccttaagcatcttggaagatcccgaggttagattcttaagcaagagaagagttggacttccaggctgaaggggagaaagtgactctgttctcttagcaaccgtctgtagcaaagaagtgcttccagcatcactccagcaacacgcccatgcgtcttctctcagcgtatttgggtcttctttgcccaaaagaacacaaaagcctttttccattgtatggaagatagtttttaagacatttgaaactttctactatagtttacagaacaaattattttatttttattgtaaatcttagtgtggaagagctgatttctaaaatatgattaaagtaaatatatacctatgaatatcaagagtcgtctccctgagcctgtagttggaagtgacgactgtaatggaatgatgtcttgtatagaaatgcccttctctgaaataaagagaactcctgggctttctaaagaggctgcgggaagccatcctccnnnnnnnnnnngtgtgggagagcagtgcttctgatcctgctggcacccccacctctggccggagccggcgccagtaggaaagacctc

SEQ ID NO: 183465 - DNA, 1175 bp, Homo Sapiens
aaagactcgttacaaaagaatcactgaccccaagtagtcgagtctagtctactgacctgtaaggctggcccaggccctgcaccgtctgaaggaaagcacctttctgggcaagcatccttgcctcccatcccattgcacctccccaccctttcccccggcagacgagaccagccaccggcttacccaaatggcagcgggagcctaagacccagccgcaggcctgcagttctggcagaaggtggctggtcaggaactctagacacggctcctgggactggagagggcagcctcaggaacagcatgagtgggtgcagtccccactcagagcctgcatgtcccagcagcccagagaccatttaagatctctcctgtgccggtgcgaagggtaatcttctggaaccagagaggggctggcaggtggtcagctgcccttagagctagaggtgagaaattcccatggtggaaaaagggccagaaacatccaccaggcaagctgcccagacacaggattgggggaatgtcccctccctgggtaaaagcaagtcttttctggtctttaatgcacgacgtaatacttttacagtggtgggtgaggtgaggacagtaggagtttggaagagggaggtaatattagtgcatgtttgttaaaaatccctcccaggtgaatgacttttttcttcatctccaaaatacaagagaattatttttaggtctccaacttaaaaataatatctggagttagcaggtaggtggatcagggccagccctggtcccttagccccccacccctgtcttagcctagggactgttgcccagggacccgtgggcacagaagcaccccccaccccacgccctcgggacaactgccatttccacattatccccatctttagcctgagcgtggattaagacagaggagatcacagacacacaaggttaaagatgtttcttccatttcagatttccattgtaaacagaagtcctgttaatccctgcatgcctttaataaaaaaaaggaattagttgataaaaattggtgagtcacattcatacattagatttttttctttaactttcaggatgttggtatattcgtaagaaaaatagcctctcaggatctagccaaaaaggctgaaagtcaatcagtttagtaattcaccaaaaacaggagccaa

SEQ ID NO: 183466 - DNA, 556 bp, Homo Sapiens
tttgtacaaaaaagttggctgagcctgaaagcttccagccccaccgctggctgagaaacagccagcctgctacccccaggatccagcacccatttggctctgtgccctttggctatggggtccgggcctgcctgggccgcaggattgcagagctggagatgcagctactcctcgcaaggctgatccagaagtacaaggtggtcctggccccggagacgggggagttgaagagtgtggcccgcattgtcctggttcccaataagaaagtgggcctgcagttcctgcagagacagtgctgagctgagtctccgccttgctggggcttgtcctataggctccagctctggcacagtggttcctggctgctgccatgtctcagatgaggagggagagaaggaggccgccagactcgagaggtgggaggaactccttgcacacaccctgagcttttgccacttctatcatttttgagcaactccctctcagctaaaaggccacccctttatcgcattgctgtccttgggtagaatataaaataaagggacttttatttctt

SEQ ID NO: 183467 - DNA, 1432 bp, Homo Sapiens
ctttctctacagtgatttcttaaaactgtattcaaatctaggtctagtgagtttttattatgaaaatgttaactgttttatcctcctgcattcatccgattgttctaattaaccctaacaaacttctaacaatggaccacaagtgtctcagaagaggtagtgactaaagatgccttcattatccaaaaggaaatcaggcaaacaaatagaaatcatcattgaacacttggcccttagtgatctcccacatatcatctacttttgtgttatcagctaaaatttctttaacagctgtagtttaaagatgtaaacaaaatcctaaccagaaaatacttcaaacactcatatttacaaattacattaaaaccatcacctgcatgagcaataagccgtgctccaactaattccccaaccatgactgtaacattgggtgcaatggccatcattcgattttgtagatattcatagagctgggttcgatattcagagatttcaatcacctgggtgcaaagatgcagaatattgcaaatatcttcttctgaaacctctgttcccattgatatctctgcagctgctttcacttctgcttcaacttcttctggcagcaactcagaaagcttggcagaggcatagttcttcctatcgcctatggaatgtttgcagaggatgagggagaatcactcttcaacaaattatataaaatccagcaaatagtcaaaagaaaaagtagaaagccaatgaaaaggatccaactttctgtaaacacttgcagtatgttaaattatctgaaataatttttcctaattcagggaaatgccagccataccattctctacatcgcataatgtagttgtttagttctttatccaagtcatctaacaaggaaattgcctgaacaatcattgtgtctactttatcagcgctaaacttcaatctatatcgagacaggctgtgagccaatccaagacacatagctgccatttcacgtggttctaccccagggattaatccatccatttgtgaacgaattcctctcataagttcattaacaacaggactatggatacaactgagattcagcttttcctgctaatgcttctgctgtatcctgaaatttctcaaaatgttttagctttactattttgtttgctttctctggagtttcaaattctttccataaactatcaacctcttgaagtttcttctcatttagaaccttaaagatggcgtaacccacagacgtttcaaacagcaccaacatggtgaggccgggtcagggcgccgcacggcctgccagaagctgtagagtcagttcaaaaacaccgactacgcggcctcaaaaggcctcctaggccgcggcgggcaaagcacaaatgcgctcgccgtcccgcaaagaatcagaacacgctgcctaaaccctccacgctgccaa

SEQ ID NO: 183468 - DNA, 1841 bp, Homo Sapiens
  misc_feature (1423)..(1518): n is a, c, g, or t
  misc_feature (1587)..(1609): n is a, c, g, or t
ttggatgatgcattcctattggaactgaatttaagtgatctgactcattcgtcactaccactgagacaacattgagttagcttttttcaccatagggctggttttccccatgtgtgaggagaggtgagaagtggttaagttgatctccctgtggaaaccagcaacataatgctgaagcacaattcagtaaaaggtgttctacaagggaccaagcattcacagctctgatggagggcaaaatcaataagcagctgaaaaaagttctgaagaaaatagtaaaagaagcccatgaaccgctggcagtagctgatgctaaactaggaggggtcataaaggaaaagctgaatctcagttgtatccatagtcctgttgttaatgaacttatgagaggaattcgttcacaaatggatggattaatccctggggtagaaccacgtgaaatggcagctatgtgtcttggattggctcacagcctgtctcgatatagattgaagtttagcgctgataaagtagacacaatgattgttcaggcaatttccttgttagatgacttggataaagaactaaacaactacattatgcgatgtagagaatggtatggctggcatttccctgaattaggaaaaattatttcagataatttaacatactgcaagtgtttacagaaagttggcgataggaagaactatgcctctgccaagctttctgagttgctgccagaagaagttgaagcagaagtgaaagcagctgcagagatatcaatgggaacagaggtttcagaagaagatatttgcaatattctgcatctttgcacccaggtgattgaaatctctgaatatcgaacccagctctatgaatatctacaaaatcgaatgatggccattgcacccaatgttacagtcatggttggggaattagttggagcacggcttattgctcatgcaggttctcttttaaatttggccaagcatgcagcttctaccgttcagattcttggagctgaaaaggcacttttcagagccctcaaatctagacgggatacccctaagtatggtctcatttatcatgcttcactcgtgggccagacaagtcccaaacacaaaggaaagatttctcgaatgctggcagccaaaaccgttttggctatccgttatgatgcttttggtgaggattcaagttctgcaatgggagttgagaacagagccaaattagaggccaggttgagaactttggaagacagagggataagaaaaataagtggaacaggaaaagcattagcaaaaacagaaaaatatgaacacaaaagtgaagtgaagacttacgatccttctggtgactccacacttccaacctgttctaaaaaacgcaaaatagaacaggtagataaagaggatgaaattactgaaaagaaagccaaaaaagnnnnnnnnnnnnnnnnnnnnnnnnnnnnnnnnnnnnnnnnnnnnnnnnnnnnnnnnnnnnnnnnnnnnnnnnnnnnnnnnnnnnnnnnnnnnnnnnaacacattaaggaagaaccactttctgaggaagaaccatgtaccagcacagcaattgctagtccagagnnnnnnnnnnnnnnnnnnnnnnntgagagagaacgaggattaacagaaaggaattacgattatatcacccggacacacatcatgcttaagattcaactgggagcataccaggggatgctctctaacgtaatcaagggaaagttcagtaagacaaagtgatttatcatctataacttcaaacctatttgtcttgacatcaactctgttaaccttatgtcatcatttcttaaagtctttgaatacaaataaattttc

SEQ ID NO: 183469 - DNA, 1784 bp, Homo Sapiens
gggggggagcattagtttattatgatgggagagttgaacaggagagggaggggatttttgctttatgttgttattctgggggatagcaattgctgggagggtacatagtttttcctcagaaagtggttcttccttaatgggtttctttttacaccttttagtgttcgtcttcacagatgtttgttgttgttgtgccactttttcttcttcctgttcttcaactttaactttaatcttggcttttttggctttcttttcagtaatttcatcctctttatctacctgttctattttgcgttttttagaacaggttggaagtgtggagtcaccagaaggatcgtaagtcttcacttcaataagcacacaatgttgtttcattttagtggctttggggtagtttatgaagactaatagtttccaaaagttaaaggtattaatatttttcaagtaggtcaatcacattcaagagatgtggtgagctaaatgaattctgatttagtaatcaatgtagttacttttgtgttcatatttttctgtttttgctaatgcttttcctgttccacttatttttcttatccctctgtcttccaaagttctcaacctggcctctaatttggctctgttctcaactcccattgcagaacttgaatcctcaccaaaagcatcataacggatagccaaaacggttttggctgccagcattcgagaaatctgcatgagcaataagccgtgctccaactaattccccaaccatgactgtaacattgggtgcaatggccatcattcgattttgtagatattcatagagctgggttcgatattcagagatttcaatcacctgggtgcaaagatgcagaatattgcaaatatcttcttctgaaacctctgttcccattgatatctctgcagctgctttcacttctgcttcaacttcttctggcagcaactcagaaagcttggcagaggcatagttcttcctatcgccaactttctgtaaacacttgcagtatgttaaattatctgaaataatttttcctaattcagggaaatgccagccataccattctctacatcgcataatgtagttgtttagttctttatccaagtcatctaacaaggaaattgcctgaacaatcattgtgtctactttatcagcgctaaacttcaatctatatcgagacaggctgtgagccaatccaagacacatagctgccatttcacgtggttctaccccagggattaatccatccatttgtgaacgaattcctctcataagttcattaacaacaggactatggatacaactgagattcagcttttcctttatgacccctcctagtttagcatcagctactgccagcggttcatgggcttcttttactattttcttcagaacttttttcagctgcttattgattttgccctccatcagagctgtgaatgctgctaatgcttctgctgtatcctgaaatttctcaaaatgttttagctttactattttgtttgctttctctggagtttcaaattctttccataaactatcaacctcttgaagtttcttctcatttagaaccttaaagatggcgtaacccacagacgtttcaaacagcaccaacatggtgaggccgggtcagggcgccgcacggcctgccagaagctgtagagtcagttcaaaaacaccgactacgcggcctcaaaaggcctcctaggccgcggcgggcaaagcacaaatgcgctcgccgtcccgcaaagaatcagaacacgctgcctaaaccctccaccaa

SEQ ID NO: 183470 - DNA, 3018 bp, Homo Sapiens
  misc_feature (2549)..(2559): n is a, c, g, or t
ttggtccggtgcgaggcagagtgctagcgggagcgcgagccagcaagaggcgcctgcgcgatgtccgggcccctgagcccgcggcgctgagccagccgggacggacatgcgcgggagggcgccgcggggcagccgccgctcctccgggggaatgaaagctactggttgattttaaagtgcctgggcctcacaggtttggagatgtcccagaataaggcacaatgtcaatagcaggagttgctgctcaggagatcagagtcccattaaaaactggatttctacataatggccgagccatggggaatatgaggaagacctactggagcagtcgcagtgagtttaaaaacaactttttaaatattgacccgataaccatggcctacagtctgaactcttctgctcaggagcgcctaataccacttgggcatgcttccaaatctgctccgatgaatggccactgctttgcagaaaatggtccatctcaaaagtccagcttgccccctcttcttattcccccaagtgaaaacttgggaccacatgaagaggatcaagttgtatgtggttttaagaaactcacagtgaatggggtttgtgcttccacccctccactgacacccataaaaaactccccttcccttttcccctgtgcccctctttgtgaacggggttctaggcctcttccaccgttgccaatctctgaagccctctctctggatgacacagactgtgaggtggaattcctaactagctcagatacagacttccttttagaagactctacactttctgatttcaaatatgatgttcctggcaggcgaagcttccgtgggtgtggacaaatcaactatgcatattttgataccccagctgtttctgcagcagatctcagctatgtgtctgaccaaaatggaggtgtcccagatccaaatcctcctccacctcagacccaccgaagattaagaaggtctcattcgggaccagctggctcctttaacaagccagccataaggatatccaactgttgtatacacagagcttctcctaactccgatgaagacaaacctgaggttccccccagagttcccatacctcctagaccagtaaagccagattatagaagatggtcagcagaagttacttcgagcacctatagtgatgaagacaggcctcccaaagtaccgccaagagaacctttgtcaccgagtaactcgcgcacaccgagtcccaaaagccttccgtcttacctcaatggggtcatgcccccgacacagagctttgcccctgatcccaagtatgtcagcagcaaagcactgcaaagacagaacagcgaaggatctgccagtaaggttccttgcattctgcccattattgaaaatgggaagaaggttagttcaacacattattacctactacctgaacgaccaccatacctggacaaatatgaaaaattttttagggaagcagaagaaacaaatggaggcgcccaaatccagccattacctgctgactgcggtatatcttcagccacagaaaagccagactcaaaaacaaaaatggatctgggtggccacgtgaagcgtaaacatttatcctatgtggtttctccttagaccttggggtcatggttcagcagaggttacataggagcaaatggttctcaattttccagtttgattgaagtgcagagaaaaatcccttagattgcaaaataaaatagttgaactctctgtcttcatgtggaaggtttagagcagttgtgagatgctgttatgctgagaaaccctgactttgttagtgttggaaaaaagtcttacaagtctataatttaaagatgtgatggtggggaggggaggatggggaagctttttatatatgcatacattacatacctatatataaacttgtggtataaccatagaccatagctgcaggttaaccagttagttactatcgtagagtaatatatattcagaataataaactcaagctggagaaatgagtcctgatagactgaaaattgagcaaatggaagaagatacagtattgtttagatcagaatcattaaaaaatatttttgtttagtaagtttgaagatttctggcttttaggccttttctattttgttccatttatttttgcaggcaatcttttccatggagggcaggggtatccattctttaccatgggtgtacctgcttaggttaaaaatcataccaaggcctcatacttccaggtttcatgttgcgtcttgttgagggagggagagcaggttacttggcaaccatattgtcacctgtacctgtcacacatcttgaaaaataaaacgataatagaactagtgactaattttcccttacagttcctgcttggtcccacccactgaagtagctcatcgtagtgcgggccgtattagaagcagtggggtacgttagactcagatggaaaagtattctaggtgccagtgttaggatgtcagttttacaaaataatgaagcaattagctatgtgattgagagttattgtttggggatgtgtgttgtggttttgcnnnnnnnnnnnagactgtattaataaacatacaacacaagctggccttgtgttgctggttcctattcagtatttcctggggattgtttgctttttaagtaaaacacttctgacccatagctcagtatgtctgaattccagaggtcacatcagcatctttctgctttgaaaactctcacagctgtggctgcttcacttagatgcagtgagacacatagttggtgttccgattttcacatccttccatgtatttatcttgaagagataagcacagaagagaaggtgctcactaacagaggtacattactgcaatgttctcttaacagttaaacaagctgtttacagtttaaactgctgaatattatttgagctatttaaagcttattatattttaatatgaactaaatgaaggttaaaacatgcttaagaaaaatgcactgatttctgcattatgtgtacagtattggacaa

SEQ ID NO: 183471 - DNA, 1989 bp, Homo Sapiens
ttggggcggcggcggcggcggcccagcttcttctttcctcgcacagccaggcggcccctgctcgagtcccgcgtcgccatggccgcggttcccgagttgctgcagcagcaggaggaggaccgcagcaagctgagatctgtatctgtggacctgaatgttgatccctcgcttcagattgacatacctgatgcgctcagtgagagagacaaagtcaaatttacagtgcacacaaagaccacactgcccacgtttcagagcccagagttttctgttacaaggcaacatgaagactttgtgtggctacatgacactcttattgaaacaacagactatgctgggcttattattccacctgctcctacgaagcccgactttgatggtcctcgagagaagatgcagaaactgggagaaggtgaagggtctatgaccaaagaagaatttgccaagatgaaacaagaactggaagctgagtatctcgctgtgtttaagaagactgtgtcctcccatgaagtctttcttcagcggctttcttctcaccctgttctcagtaaagatcgcaactttcatgttttcctggaatatgatcaggatctaagtgttaggcggaaaaatactaaagagatgtttggtggcttcttcaaaagtgtggtgaaaagtgctgatgaagtcctttttactggagttaaggaggtagatgacttctttgagcaagagaagaacttccttattaactattacaataggatcaaagattcttgtgtgaaagctgacaaaatgaccagatctcataaaaatgttgccgatgactatatccacaccgcagcctgcttacatagcctggctttagaagagcccacagtcatcaaaaagtacctattgaaggttgctgagctatttgaaaaactaaggaaagtagagggtcgagtttcatcagatgaagatttgaagctaacagagctcctccgatactacatgctcaacattgaagctgctaaggatctcttatacagacgcaccaaagccctcattgactatgagaactcaaacaaagctctggataaggcccggttaaagagcaaagacgtcaagttggctgaggcacaccagcaggagtgctgccagaaatttgaacaactttccgaatctgcaaaagaagaactgataaatttcaaacggaagagagtggcagcatttagaaagaatctaattgaaatgtctgaactggaaataaaacatgccaggaacaatgtctcccttttgcagagctgtattgacttgttcaagaataactgatatgccttcactcagaagaaaagaaatgaatgtgaaagaaagccaagcatcacttgcacttaaatcattaccacggaagatatattagcttcaactttagtttaaaattatgtgaataaatattttgatttctacaaatcttaacatttaaccatgttggtttaaaaatattattgcttgctacttggacataactaatttttccttgtgcatttaatacctctgggcagaatccaaatactgggttctcccgtagttcgtctttagttactaagaaagggtgtaggacacattagccttctggaaacaagtagaagccatcacctggcccatgtccctacaaacccatgattgtcagggaggtgccagttacagcaggtgattcagctacttgaggtcggtaacagaccttccattcctcattgaaggtggggtttgtgtttttgttttgccctgttactccactggtagtcatctggtgtttgtactataacaacagcaagaaaatctcatttatctttatatactctttgcacctcctttttttagtcgagatataaatatttgaggggagagaaatatcttcaggtatatatggaaacaaataatgtggtctgctttataagatggccagatctacattaagaaaaatataacccccctccctaatggccgctggggggtgatggcggagtg

SEQ ID NO: 183472 - DNA, 1242 bp, Homo Sapiens
  misc_feature (188)..(196): n is a, c, g, or t
ttggaaatttggtgagcggcctccacctaaacgacttactagggaagctatgcgaaattatttaaaagagcgaggggatcaaacagtacttattcttcatgcaaaagttgcacagaagtcatatggaaatgaaaaaaggtttttttgcccacctccttgtgtatatcttatgggcagtggatggaagnnnnnnnnngaacaaatggaacgcgatggttgttctgaacaagagtctcaaccgtgtgcatttattgggataggaaatagtgaccaagaaatgcagcagctaaacttggaaggaaagaactattgcacagccaaaacattgtatatatctgactcagacaagcgaaagcacttcatgttgtctgtaaagatgttctatggcaacagtgatgacattggtgtgttcctcagcaagcggataaaagtcatctccaaaccttccaaaaagaagcagtcattgaaaaatgctgacttatgcattgcctcaggaacaaaggtggctctgtttaatcgactacgatcccagacagttagtaccagatacttgcatgtagaaggaggtaattttcatgccagttcacagcagtggggagccttttttattcatctcttggatgatgatgaatcagaaggagaagaattcacagtccgagatggctacatccattatggacaaacagtcaaacttgtgtgctcagttactggcatggcactcccaagattgataattaggaaagttgataagcagaccgcattattggatgcagatgatcctgtgtcacaactccataaatgtgcattttaccttaaggatacagaaagaatgtatttgtgcctttctcaagaaagaataattcaatttcaggccactccatgtccaaaagaaccaaataaagagatgataaatgatggcgcttcctggacaatcattagcacagataaggcagagtatacattttatgagggaatgggccctgtccttgccccagtcactcctgtgcctgtggtagagagccttcagttgaatggcggtggggacgtagcaatgcttgaacttacaggacagaatttcactccaaatttacgagtgtggtttggggatgtagaagctgaaactatgtacaggtgtggagagagtatgctctgtgtcgtcccagacatttctgcattccgagaaggtttggagatgggtccggcaaccagtccaggttccagtaaactttggttccgaaatga

SEQ ID NO: 183473 - DNA, 2264 bp, Homo Sapiens
  misc_feature (2100)..(2112): n is a, c, g, or t
ctttgtttggttgggtctggttggagctgttgtcttgtatgctcagcgaggcccggagagacccgggagagagctaggccgagtccaccgcccgagtctgctgcccgagcccgcgttacgcacaaagccgccgatccccggcctggggtgagcagagcgaccaccgcccgggagcagcgcggcgagacgcacggtgcgccctatgcccccgcgcccccaccgcccccgccgcggcagccgaagcgcagcgagagaacgcgccaccgcggggcccgggtgcagctagcgaccctctcgccacctgcgcgcagcccgaggtgagcagtgagcggcgagcgggagggcagcgaggcgttcgcgggccccctcctgctgcccgggcccggcccgctcatggcggccatccgcaagaagctggtggtggtgggcgacggcgcgtgtggcaagacgtgcctgctgatcgtgttcagtaaggacgagttccccgaggtgtacgtgcccaccgtcttcgagaactatgtggccgacattgaggtggacggcaagcaggtggagctggcgctgtgggacacggcgggccaggaggactacgaccgcctgcggccgctctcctacccggacaccgacgtcattctcatgtgcttctcggtggacagcccggactcgctggagaacatccccgagaagtgggtccccgaggtgaagcacttctgtcccaatgtgcccatcatcctggtggccaacaaaaaagacctgcgcagcgacgagcatgtccgcacagagctggcccgcatgaagcaggaacccgtgcgcacggatgacggccgcgccatggccgtgcgcatccaagcctacgactacctcgagtgctctgccaagaccaaggaaggcgtgcgcgaggtcttcgagacggccacgcgcgccgcgctgcagaagcgctacggctcccagaacggctgcatcaactgctgcaaggtgctatgagggccgcgcccgtcgcgcctgcccctgccggcacggctccccctcctggaccagtcccccgcgagcccggagaaggggagacccgtgtcccacaaggaccccaccggcctgcctggcatctgtctgctgacgcctctggcttgcgccaggacttggcgtgggcaccgggcgcccccatcccagtgtctgtgtgcgtccagctgtgttgcacaggcctgggctccccactgagtgccaagggtcccctgagcatgcttttctgaagagccgggcctcagagtgtgtggctgtgtgtctgttcgactcccctcgccccattttcaccccacccccgcctctgatccccgggggcgagattggcgcgggagtgtggccgcgccccatcagatgttcgcccttcaccagcgggagcttgatatcccttgtctgtaacatagaccccgggtactgcgggaggggagggctgctggggaggatggggggatgttatataaatatagatataattttattttcggagctaagatggtgttatttaagggtggtgatgggtgagcgctctggcccaggctgggccagactcccgcccaagcatgaacaggacttgaccatctttccaacccctggggaagacatttgcaactgacttggggaggacacagcttcagcacagcctctcctgcgggccagcccgctgcgaaccctccaccagctaccggagggaggagggaggatgcgctgtggggttgtttttgccataagcgaactttgtgcctgtcctagaagtgaaaattgttcagtccaagaaactgatgttatttgatttatttaaaggctaaatttgtttttttattctttgcacaattgtttcattgtttgacacttaatgcactcgtcatttgcatacgacagtagcattctgaccacacttgtacgctgtaacctcatctacttctgatgtttttaaaaaatgacttttaacaaggagagggaaaagaaacccactaaattttgctttgtttccttgaagaatgtggcaacactgttttgtgattttatttgtgcaggtcatgcacacagttttgataaagggcagtaacaagtattggggcctannnnnnnnnnnnnccacaaggcattctctaaagctatgtgaaattttctctgcaccctgtacagaaaaatacacctgcccctgtatatcctttttacccctccccctccctcccatgggaacatctactaaaattgttgtcctgttttttattatttaaaataaa

SEQ ID NO: 183474 - DNA, 1982 bp, Homo Sapiens
  misc_feature (154)..(166): n is a, c, g, or t
  misc_feature (280)..(289): n is a, c, g, or t
  misc_feature (862)..(881): n is a, c, g, or t
ttggtacattctcaggggttcaaatttccttctaccattcaaatgttttatcaacagcaaacttcagccgtttcactttttgttggagaaaaatagtagattttaatttgactcacagtttgaagcattctgtgatcccctggttactgagttnnnnnnnnnnnnngtacgagttagacatatgaaatggttatgaacgcttttgtgctgctgatttttaatgctgtaaagttttcctgtgtttagcttgttgaaatgttttgcatctgtcaattaaggnnnnnnnnnntcactctatgttgccccactttagagccctgtgtgccaccctgtgttcctgtgattgcaatgtgagaccgaatgtaatatggaaaacctaccagtggggtgtggttgtgccctgagcgcgtgtgtaaaggactggggaggcgtgtcttgaaaaagcaactgcagaaattccttatgatgattgtgtgcaagttagttaacatgaaccttcatttgtaaattttttaaaatttcttttataatatgctttccgcagtcctaactatgctgcgttttataatagctttttcccttctgttctgttcatgtagcacagataagcattgcacttggtaccatgctttacctcatttcaagaaaatatgcttaacagagaggaaaaaaatgtggtttggccttgctgctgttttgatttatggaatttgaaaaagataattataatgcctgcaatgtgtcatatactcgcacaacttaaataggtcatttttgtctgtggcatttttactgtttgtgaaagtatgaaacagatttgttaactgaactcttaattatgtttttaaaatgtttgttatannnnnnnnnnnnnnnnnnnnatattacgtgaagtgatgaaatttagaatgacctctaacactcctgtaattgtcttttaaaatactgatatttttatttgttaataatactttgccctcagaaagattctgataccctgccttgacaacatgaaacttgaggctgctttggttcatgaatccaggtgttcccccggcagtcggcttcttcagtcgctccctggaggcaggtgggcactgcagaggatcactggaatccagatcgagcgcagttcatgcacaaggccccgttgatttaaaatattggatcttgctctgttagggtgtctaatccctttacacaagattgaagccaccaaactgagaccttgatacctttttttaactgcatctgaaattatgttaagagtctttaacccatttgcattatctgcagaagagaaactcatgtcatgtttattacctatatggttgttttaattacatttgaataattatatttttccaaccactgattacttttcaggaatttaattatttccagataaatttctttattttatattgtacatgaaaagttttaaagatatgtttaagaccaagactattaaaatgatttttaaagttgttggagacgccaatagcaatatctaggaaatttgcattgagaccattgtattttccactagcagtgaaaatgatttttcacaactaacttgtaaatatattttaatcattacttctttttttctagtccatttttatttggacatcaaccacagacaatttaaattttatagatgcactaagaattcactgcagcagcaggttacatagcaaaaatgcaaaggtgaacaggaagtaaatttctggcttttctgctgtaaatagtgaaggaaaattactaaaatcaagtaaaactaatgcatattatttgattgacaataaaatatttaccatcacatgctgcagctgttttttaaggaacatgatgtcattcattcatacagtaatcatgctgcagaaatttgcagtctgcaccttatggatcacaattacctttagttgttttttttgtaataattgtagccaagtaaatctccaataaagttatcgtctgtt

SEQ ID NO: 183475 - DNA, 1322 bp, Homo Sapiens
  misc_feature (58)..(74): n is a, c, g, or t
  misc_feature (1033)..(1046): n is a, c, g, or t
  misc_feature (1185)..(1199): n is a, c, g, or t
ttggcacaagagtgctttaatgatgacatttagcaagtgctcaaaataattgacaggnnnnnnnnnnnnnnnnngagtttatgtcagctttgcttagtgttagaaggccatggagcttaaacctccagcagtccctaggatgatgtagattcttctccatctctccgtgtgtgcagtagtgccagtcctgcagtagttgataagctgaatagaaagataaggttttcgagaggagaagtgcgccaatgttgtcttttctttccacgttatactgtgtaaggtgatgttcccggtcgctgttgcacctgatagtaagggacagatttttaatgaacattggctggcatgttggtgaatcacattttagttttctgatgccacatagtcttgcataaaaaagggttcttgccttaaaagtgaaaccttcatggatagtctttaatctctgatctttttggaacaaactgttttacattcctttcattttattatgcattagacgttgagacagcgtgatacttacaactcactagtatagttgtaacttattacaggatcatactaaaatttctgtcatatgtatactgaagacattttaaaaaccagaatatgtagtctacggatattttttatcataaaaatgatctttggctaaacaccccattttactaaagtcctcctgccaggtagttcccactgatggaaatgtttatggcaaataattttgccttctaggctgttgctctaacaaaataaaccttagacatatcacacctaaaatatgctgcagattttataattgattggttacttatttaagaagcaaaacacagcacctttacccttagtctcctcacataaatttcttactatacttttcataatgttgcatgcatatttcacctaccaaagctgtgctgttaatgccgtgaaagtttaacgtttgcgataaactgccgtaattttgatacatctgtgatttaggtcattaatttagataaactagctcattatttccatctttggaaaaggnnnnnnnnnnnnnncttctttaggcatttgcctaagtttctttaattagacttgtaggcactcttcacttaaatacctcagttcttcttttcttttgcatgcatttttcccctgtttggtgctatgtttatgtattatgcttgaaattttaannnnnnnnnnnnnnngcactgtaactataatacctcttaatttacctttttaaaagctgtgggtcagtcttgcactcccatcaacataccagtagaggtttgctgcaatttgccccgttaattatgcttgaagtttaa

SEQ ID NO: 183476 - DNA, 2043 bp, Homo Sapiens
  misc_feature (340)..(353): n is a, c, g, or t
  misc_feature (492)..(505): n is a, c, g, or t
  misc_feature (1497)..(1509): n is a, c, g, or t
  misc_feature (1623)..(1632): n is a, c, g, or t
acaaattgatgagcaatgctttacattaaagggaactttgtacaaaaaagttggcaaaataaaccttattacatatcacacctaaaatatgctgcagattttataattgattggttacttatttaagaagcaaaacacagcacctttacccttagtctcctcacataaatttcttactatacttttcataatgttgcatgcatatttcacctaccaaagctgtgctgttaatgccgtgaaagtttaacgtttgcgataaactgccgtaattttgatacatctgtgatttaggtcattaatttagataaactagctcattatttccatctttggaaaaggnnnnnnnnnnnnnncttctttaggcatttgcctaagtttctttaattagacttgtaggcactcttcacttaaatacctcagttcttcttttcttttgcatgcatttttcccctgtttggtgctatgtttatgtattatgcttgaaattttaannnnnnnnnnnnnngcactgtaactataatacctcttaatttacctttttaaaagctgtgggtcagtcttgcactcccatcaacataccagtagaggtttgctgcaatttgccccgttaattatgcttgaagtttaagaaagctgagcagaggtgtctcatatttcccagcacatgattctgaacttgatgcttcatggaatgctgcatttatatgtaagtgacatttgaatactgtccttcctgctttatctgcatcatccacccacagagaaatgcctctgtgcgagtgcaccgacagaaaactgtcagctctgctttctaaggaaccctgagtgaggggggtattaagcttctccagtgttttttgttgtctccaatcttaaacttaaattgagatctaaattattaaacgagtttttgagcaaattaggtgacttgttttaaaaatatttaattccgatttggaaccttaaatgtctatttgattttttaaaaaaccttaatgtaagatatgaccagttaaaacaaagcaattcttgaattatataactgtaaaagtgtgcagttaacaaggctggatgtgaattttattctgagggtgatttgtgatcaagtttaatcacaaatctcttaatatttataaactacctgatgccaggagcttagggctttgcattgtgtctaatacattgatcccagtgttacgggattctcttgattcctggcaccaaaatcagattgttttcacagttatgattcccagtgggagaaaaatgcctcaatatatttgtaaccttaagaagagtatttttttgttaatactaagatgttcaaacttagacatgattaggtcatacattctcaggggttcaaatttccttctaccattcaaatgttttatcaacagcaaacttcagccgtttcactttttgttggagaaaaatagtagattttaatttgactcacagtttgaagcattctgtgatcccctggttactgagttnnnnnnnnnnnnngtacgagttagacatatgaaatggttatgaacgcttttgtgctgctgatttttaatgctgtaaagttttcctgtgtttagcttgttgaaatgttttgcatctgtcaattaaggnnnnnnnnnntcactctatgttgccccactttagagccctgtgtgccaccctgtgttcctgtgattgcaatgtgagaccgaatgtaatatggaaaacctaccagtggggtgtggttgtgccctgagcacgtgtgtaaaggactggggaggcgtgtcttgaaaaagcaactgcagaaattccttatgatgattgtgtgcaagttagttaacatgaaccttcatttgtaaattttttaaaatttcttttataatatgctttccgcagtcctaactatgctgcgttttataatagctttttcccttctgttctgttcatgtagcacagataagcattgcacttgggtaccatgctttacctcatttcagaaatatgcttatagagaggaaaaaatgtggtttggccttgctgctgttttgattt

SEQ ID NO: 183477 - DNA, 1813 bp, Homo Sapiens
  misc_feature (229)..(253): n is a, c, g, or t
ttggccctagcaaagggagcagaactgaaccggctttaccaaaccgccagcgaacttgacaattgtattgcgatggcgtgggctgcgtgacgtcacctccggtcgtgtctctggtctccgtgttttccagttaattacatcctcatgcagccgtgatcaagggaatgtaactgctgaaaactagctcgtgattggcatataatggagttaacgggtgaataataaaagnnnnnnnnnnnnnnnnnnnnnnnnnaatattttaaatatctttcatgttccaaatgtacaaggatgtttggtctttaatgaaaagctgaatccagatcattcctcagaatgaggacccgaggacagtggcagacagacgcgttggcacagttcatggtttcctccagaggagacattggcttatcatggggaaaaagaggatctggagaacctcatccagctccccttctgaatcagctgggatgactggctttgagaaggaagggaagatggaacaggctcagatctcatgggatagcacgtggagctcttggctggggctgaccctgggcagggactttcctgcagggccagacctgcctgcattctgagacaaagcaatggacggtccgcagaagcagacctcattgattgagtcctttcttccatccccttggcctgctccctgtaggaagtcatcctgccaactgatttaaaagggctctttagccagttgttgccaaccttatagggatgagtcccctgtgagattttgcttttccactgcctgggatgatgcagtttgaagaggcccttggacctccttgtaacatcagggacctttggagaccattatcagtgtaagccctgcttagctcatcttagagcaaagagccagcaccctgatgtccctggggtggctaggcaggagtggcgtggggccaatacccagaccccttcagccaccatcccctggcctgtgccttccaacccattagccatttcttgttgtgcccctttccaagatacagcctgcaagtggtagcaagaagtgattagaggcagatctggacttggcaacagaagtggtttcccatctccattgtctgagtctgattttcgctgatgctgttttgtggatttttgtggtagtgatggttgtcagtgctgccagtttcccaaaacgtaatcaagcctctggtcacatggctgtcgatgtaggcattctggagtggtgttcagccaagtgaccgggcaaaattgggctgtgaaattgtacttccaggcttggatgtaatttttgctctagagagaagcaagtggtgggaaggaggtagcatgacgtgtggtgtgcgggtttccttgctgccgtcacctctccgctcatacaggaatgaagccttagccaggaggccaggctcagccctgtgccactcaccgaagccactttctacaggccagcaggggcttgttgcaggctgtgggttttggtgtggtttgtcagaggctaattctgcagagtttccaaaaccagaagacatcgtatgcttgggatgggggccgtgccacccgtgggaatgctgcccgctctgcagactgctgctagagccagcaactccactaaggtggattttcatcaggggcctgcagggccctcccttttcccattgttcctgcgctgcaaattgcaaccccagcaatcgtgactgacgtttgctccttgactccaagaaactgagaccaaagaagctgctgttcttagcaagatgcgcactgcattccacaatgggaggagtcggagaggcagggcttgctttgcagcccc

SEQ ID NO: 183478 - DNA, 961 bp, Homo Sapiens
ctttgtacaaaaaagttggatttaatttgtatttcagcaaatgctctgctatttttaaaagcttactgatagcaactgactttatctgatgcagggggcttagttgggaatgttgaatctggttgtaatgttgtccgtgattaaaaagataatgtcctcaaggtgtttctgaggaatgtagtgcagcaagagagaagaaatgcctctgcataaacaaagtaggcagactgttatttttaaagttgtttattcttctgcaccagcagtccattgtaaatgtgtgtgtgtgttttggtcatttttccctaagggagctctcttttgggcgtggctccacggcacctgtaggaggcggggctttccctaccatcgttgagagagagccttgggacggcagggatggcgaggtgagtgcccgggagggaagctgtgcgggcagcagtcctggtttactctcttgagcctgtgcatctctgcacctggagtcaagtccttcccatcagacctcagccctggtgcacccgtgggccttttaagaggttcttctctgaagacccttcatcttccttatcacaagtttaagtgctgcatggcatttgatactcttgacagccaagatacatttcagtagtaaggttgctttcctgattattaccttaaagtgaacatttaacctggaattcatttactttatcttagaaaaatagaaaatgatagctttgaaattagcacttatttctgtactgttgtgtcccaccctcctcaaaaggacacgttcagtggcttccagtgttaaaatggtgagtgatgtgatgttgaaatgtttcacctgagttctgagcttttccatccgtataatcatcgtacgaacgtcaggtaggagtcagactgagagaacctggattgtagcatgagtagctccagagagtcgctcttccgtaaaatgagatgttgaccttcc

SEQ ID NO: 183479 - DNA, 1726 bp, Homo Sapiens
ctttgtacaaaaaagttggggtgttcagggcatttcctaccattaagatttttggatccaacaaaaacagaccagaagattaccaaggtggcagaactggtgaagccattgtagatgctgcgctgagtgctctgcgccagctcgtgaaggatcgcctcgggggacgaagcggaggatacagttctggaaaacaaggcagaagtgatagttcaagtaagaaggatgtgattgagctgacagacgacagctttgataagaatgttctggacagtgaagatgtttggatggttgagttctatgctccttggtgtggacactgcaaaaacctagagccagagtgggctgccgcagcttcagaagtaaaagagcagacgaaaggaaaagtgaaactggcagctgtggatgctacagtcaatcaggttctggcctcccgatacgggattagaggatttcctacaatcaagatatttcagaaaggcgagtctcctgtggattatgacggtgggcggacaagatccgacatcgtgtcccgggcccttgatttgttttctgataacgccccacctcctgagctgcttgagattatcaacgaggacattgccaagaggacgtgtgaggagcaccagctctgtgttgtggctgtgctgccccatatccttgatactggagctgcaggcagaaattcttatctggaagttcttctgaagttggcagacaaatacaaaaagaaaatgtgggggtggctgtggacagaagctggagcccagtctgaacttgagaccgcgttggggattggagggtttgggtaccccgccatggccgccatcaatgcacgcaagatgaaatttgctctgctaaaaggctccttcagtgagcaaggcatcaacgagtttctcagggagctctcttttgggcgtggctccacggcacctgtaggaggcggggctttccctaccatcgttgagagagagccttgggacggcagggatggcgagcttcccgtggaggatgacattgacctcagtgatgtggagcttgatgacttagggaaagatgagttgtgagagccacaacagaggcttcagaccattttcttttcttgggagccagtggatttttccagcagtgaagggacattctctacactcagatgactctaccagtggccttttaaccaagaagtagtacttgattggtcatttgaaaacactgcaacagtgaacttttgcatctcaagaaaacattgaaaaattctatgaattgttgtagccggtgaattgagtcgtattctgtcacataatattttgaagaaaacttggctgtcgaaacatttttctctctgactgctgcttgaatgttcttggaggctgtttcttatgtatgggttttttttaatgtgatcccttcatttgaatattaatggctttttccattaaagaataaaatattttggacaatgccgataaatgtatgaagttagtatccacatcataaattcagagtgatgtttagcagtaaatcaatattttgaagtgatacacagatgtctttcctccccacaaacttttttaaacaaaaaacaagacctcttttctttagatggtgccacctatgcccaccacaacagagattttacatggaaaccggggctcagtgagaactgatttcctgcccaatatttgtctttgggcctgtctctagtgactaattattaaggaatctaacc

SEQ ID NO: 183480 - DNA, 2135 bp, Homo Sapiens
  misc_feature (1768)..(1768): n is a, c, g, or t
acaaaaaagttggggactggcctggggcgggacgtgggcgcgggggcgcggcgtgcggcacgctgcagggctgaagcggcggcggcggtggggactgcacgtagcccggcgctcggcatggctctcctggtgctcggtctggtgagctgtaccttctttctggcagtgaatggtctgtattcctctagtgatgatgtgatcgaattaactccatcaaatttcaaccgagaagttattcagagtgatagtttgtggcttgtagaattctatgctccatggtgtggtcactgtcaaagattaacaccagaatggaagaaagcagcaactgcattaaaagatgttgtcaaagttggtgcagttgatgcagataagcatcattccctaggaggtcagtatggtgttcagggatttcctaccattaagatttttggatccaacaaaaacagaccagaagattaccaaggtggcagaactggtgaagccattgtagatgctgcgctgagtgctctgcgccagctcgtgaaggatcgcctcgggggacgaagcggaggatacagttctggaaaacaaggcagaagtgatagttcaagtaagaaggatgtgattgagctgacagacgacagctttgataagaatgttctggacagtgaagatgtttggatggttgagttctatgctccttggtgtggacactgcaaaaacctagagccagagtgggctgccgcagcttcagaagtaaaagagcagacgaaaggaaaagtgaaactggcagctgtggatgctacagtcaatcaggttctggcctcccgatacgggattagaggatttcctacaatcaagatatttcagaaaggcgagtctcctgtggattatgacggtgggcggacaagatccgacatcgtgtcccgggcccttgatttgttttctgataacgccccacctcctgagctgcttgagattatcaacgaggacattgccaagaggacgtgtgaggagcaccagctctgtgttgtggctgtgctgccccatatccttgatactggagctgcaagcagaaattcttatctggaagttcttctgaagttggcaaaatacaaaaagaaaatgtggggggtggctgtggacagaagctggagcccagtctgaacttgagaccgcgttggggattggagggtttgggtaccccgccatggccgccatcaatgcacgcaagatgaaatttgctctgctaaaaggctccttcagtgagcaaggcatcaacgagtttctcagggagctctcttttgggcgtggctccacggcacctgtaggaggcggggctttccctaccatcgttgagagagagccttgggacggcagggatggcgagcttcccgtggaggatgacattgacctcagtgttgtggagcttgatgacttagggaaagatgagttgtgagagccccaacagaggcttcagaccattttcttttcttgggagccagtggatttttccagcagtgaagggacattctctacactcagatgactctaccagtggccttttaaccaagaagtagtacttgattggtcatttgaaaacactgcaacagtgaacttttgcatctcaagaaaacattgaaaaattctatgaattgttgtagccggtgaattgagtcgtattctgtcacataatattttgaagaaaacttggctgtcgaaacatttttctctctgactgctgcttgaatgttcttggaggctgtttcttatgtatgggttttttttnaatgtgatcccttcatttgaatattaatggctttttccattaaagaataaaatattttggacaatgccgataaatgtatgaagttagtatccacatcataaattcagagtgatgtttagcagtaaatcaatattttgaagtgatacacagatgtctttcctccccacaaacttttttaaacaaaaaacaagacctcttttctttagatggtgccacctatgcccaccacaacagatattttacatggaaaccgggctcagtgagaactgatttcctgcccaatatttgtctttgggctgtctctagtgactaattattaaggaatctagctggttatacagttcaaggctttctatgttgttaatga

SEQ ID NO: 183481 - DNA, 1921 bp, Homo Sapiens
ccaactttgtacaaaaaagttggcgctggtcccgagcacgagctgtgaggggattcacttgtgtgcggaactcctcggaaccatggcgtccctttcccttgcacctgttaacatctttaaggcaggagctgatgaagagagagcagagacagctcgtctgacttcttttattggtgccatcgccattggagacttggtaaagagcaccttgggacccaaaggcatggacaaaattcttctaagcagtggacgagatgcctctcttatggtaaccaatgatggtgccactattctaaaaaacattggtgttgacaatccagcagctaaagttttagttgatatgtcaagggttcaagatgatgaagttggtgatggcactacctctgttaccgttttagcagcagaattattaagggaagcagaatctttaattgcaaaaaagattcatccacagaccatcatagcgggttggagagaagccacgaaggctgcaagagaggcgctgttgagttctgcagttgatcatggttccgatgaagttaaattccgtcaagatttaatgaatattgcgggcacaacattatcctcaaaacttcttactcatcacaaagaccactttacaaagttagctgtagaagcagttctcagactgaaaggctctggcaacctggaggcaattcatattatcaagaagctaggaggaagtttggcagattcctatttagatgaaggcttcctgttggataaaaaaattggagtaaatcaaccaaaacgaattgaaaatgctaaaattcttattgcaaatactggtatggatacagacaaaataaagatatttggttcccgggtaagagttgactctacagcaaaggttgcagaaatagaacatgcggaaaaggaaaaaatgaaggagaaagttgaacgtattcttaagcatggaataaattgctttattaacaggcaattaatttataattatcctgaacagctctttggtgctgctggtgtcatggctattgagcatgcagattttgcaggtgtggaacgcctagctcttgtcacaggtggtgaaattgcctctacctttgatcacccagaactggtgaagcttggaagttgcaaacttatcgaggaagtcatgattggagaagacaaactcattcacttttctggggttgcccttggtgaggcttgtaccattgttttgcgtggtgccactcaacaaattttagatgaagcagaaagatcattgcatgatgctctttgtgttcttgcgcaaactgtaaaggactctagaacagtttatggaggaggctgttctgagatgttgatggctcatgctgtgacacagcttgccaatagaacaccaggcaaagaagctgttgcaatggagtcttatgctaaagcactgagaatgttgccaaccatcatagctgacaatgcaggctatgacagtgcagacctggtggcacagctcagggctgctcacagtgaaggcaataccactgctggattggatatgagggaaggcaccattggagatatggctatcctgggtataacagaaagttttcaagtgaagcgacaggttcttctgagtgcagctgaagcagcagaggtgattctgcgtgtggacaacatcatcaaagcggcacccaggaaacgtgtccctgatcaccacccctgttaagcattcccacgtgctgtcgatctttggaccagtttctagcaaagttgtgtttgaaagatactctattaaagaagactgtggaatctgtttatcggtgcccattatatccttaagtttggatatttagctgaccttcgctttaacataggtctaatttatttgccgtgtcattttccatacaaatcagttgatttaaaaaagttcatttctcatactgtgcattaaaataaa

SEQ ID NO: 183482 - DNA, 1639 bp, Homo Sapiens
ttggcacttgtgtgcggaactcctcggaaccatggcgtccctttcccttgcacctgttaacatctttaaggcaggagctgatgaagagagagcagagacagctcgtctgacttcttttattggtgccatcgccattggagacttggtaaagagcaccttgggacccaaaggcatggtaagaaaaatagaaaagttttatattttaatattgttttagagcgcttggtggaaatataataacaagcgtattaaaatgctttttaatctttaaaacgtttaattataaaagacaagtatgttctccttagtaaaaatcagagtccccagaatcaccatccccaatcccatgcccctccccaatgacaagtactgttatcatttgcacgtacatcttctaatattctgtttatgtagaagtatgtgtacttcattatgtattttatactcatgtaacatactgttttataaaacagatactatttatcaatacttttttgtagcttgctcttttaaattcctttcagtgtaagtagataacactgcccctttaactgtcaaatattatcctgtaccttaattattttataatttaattatggctgtattgatagtttctttccattgtttttgcagttacggtgttgaaacaaaaactagtgtctacctgtgcttctagtgtttctaggggtagatacatggtttggttacgtggtgtatgtattgaaaacatttgatgaatggataccacaaaatagctatccagagtgtttatacactagcactgtgtgagaatactgattgatccatgcattcttcaagatgtgcttatgtcttaacttgaaccaattatgttccctttaggacaaaattcttctaagcagtggacgagatgcctctcttatggtaaccaatgatggtgccactattctaaaaaacattggtgttgacaatccagcagctaaagttttagttgatatgtcaagggttcaagatgatgaagttggtgatggcactacctctgttaccgttttagcagcagaattattaagggaagcagaatctttaattgcaaaaaagattcatccacagaccatcatagcgggttggagagaagccacgaaggctgcaagagaggcgctgttgagttctgcagttgatcatggttccgatgaagttaaattccgtcaagatttaatgaatattgcgggcacaacattatcctcaaaacttcttactcatcacaaagaccactttacaaagttagctgtagaagcagttctcagactgaaaggctctggcaacctggaggcaattcatattatcaagaagctaggaggaagtttggcagattcctatttagatgaaggcttcctgttggataaaaaaattggagtaaatcaaccaaaacgaattgaaaatgctaaaattcttattgcaaatactggtatggatacagacaaaataaagatatttggttcccgggtaagagttgactctacggcaaaggttgcagaaatagaacatgcggaaaaggaaaaaatgaatgagaaagttgaacgtattcttaagcatggaataattgcttttattaacaggcatatatttataattatcttgaacagctctttggtgctgctgg

SEQ ID NO: 183483 - DNA, 2022 bp, Homo Sapiens
tttgtacaaaaaagttggcccgtgcagcatctgctcctggacacccacagggggctgctgtatgcggcctcacactcgggcgtagtccaggtgcccatggccaactgcagcctgtacaggagctgtggggactgcctcctcgcccgggacccctactgtgcttggagcggctccagctgcaagcacgtcagcctctaccagcctcagctggccaccaggccgtggatccaggacatcgagggagccagcgccaaggacctttgcagcgcgtcttcggttgtgtccccgtcttttgtaccaacaggggagaagccatgtgagcaagtccagttccagcccaacacagtgaacactttggcctgcccgctcctctccaacctggcgacccgactctggctacgcaacggggcccccgtcaatgcctcggcctcctgccacgtgctacccactggggacctgctgctggtgggcacccaacagctgggggagttccagtgctggtcactagaggagggcttccagcagctggtagccagctactgcccagaggtggtggaggacggggtggcagaccaaacagatgagggtggcagtgtacccgtcattatcagcacatcgcgtgtgagtgcaccagctggtggcaaggccagctggggtgcagacaggtcctactggaaggagttcctggtgatgtgcacgctctttgtgctggccgtgctgctcccagttttattcttgctctaccggcaccggaacagcatgaaagtcttcctgaagcagggggaatgtgccagcgtgcaccccaagacctgccctgtggtgctgccccctgagacccgcccactcaacggcctagggccccctagcaccccgctcgatcaccgagggtaccagtccctgtcagacagccccccgggggcccgagtcttcactgagtcagagaagaggccactcagcatccaagacagcttcgtggaggtatccccagtgtgcccccggccccgggtccgccttggctcggagatccgtgactctgtggtgtgagagctgacttccagaggacgctgccctggcttcaggggctgtgaatgctcggagagggtcaactggacctcccctccgctctgctcttcgtggaacacgaccgtggtgcccggcccttgggagccttggggccagctggcctgctgctctccagtcaagtagcgaagctcctaccacccagacacccaaacagccgtggccccagaggtcctggccaaatatgggggcctgcctaggttggtggaacagtgctccttatgtaaactgagccctttgtttaaaaaacaattccaaatgtgaaactagaatgagagggaagagataacatggcatgcagcacacacggctgctccagttcatggcctcccaggggtgctggggatgcatccaaagtggttgtctgagacagagttggaaaccctcaccaactggcctcttcaccttccacattatcccgctgccaccggctgccctgtctcactgcagattcaggaccagcttgggctgcgtgcgttctgccttgccagtcagccgaggatgtagttgttgctgccgtcgtcccaccacctcagggaccagagggctaggttggcactgcggccctcaccaggtcctgggctcggacccaactcctggacctttccagcctgtatcaggctgtggccacacgagaggacagcgcgagctcaggagagatttcgtgacaatgtacgcctttccctcagaattcagggaagagactgtcgcctgccttcctccgttgttgcgtgagaacccgtgtgccccttcccaccatatccaccctcgctccatctttgaactcaaacacgaggaactaactgcaccctggtcctctccccagtccccagttcacccctccatccctcaccttcctccactctaagggataatcaacactgcccagcacaggggccccggaatttatgtggtttttatatattttttaataagatgcac

SEQ ID NO: 183484 - DNA, 1188 bp, Homo Sapiens
ttggccgggctccatggcgccagcggcgtccgcctgagcagcgcgggcaacagcggcggcgtcggccggatcgggccgcgacacctcctggccatgggggacgtgctgtccacgcacctggcgacgcccggcgccagcacatcgcagaaaaaaccgggaagatcctgacggagttcctccagttctatgaagaccagtatggcgtggctctcttcaacagcatgcgccatgagattgagggcacggggctgccgcaggcccagctgctctggcgcaaggtgccactggacgagcgcatcgtcttctcggggaacctcttccagcaccaggaggacagcaagaagtggagaaaccgcttcagcctcgtgccccacaactacgggctggtgctctacgaaaacaaagcggcctatgagcggcaggtcccaccacgagccgtcatcaacagtgcaggctacaaaatcctcacgtccgtggaccaatacctggagctcattggcaactccttaccagggaccacggcaaagtcgggcagtgcccccatcctcaagtgccccacacagttcccgctcatcctctggcatccttatgcgcgtcactactacttctgcatgatgacagaagccgagcaggacaagtggcaggctgtgctgcaggactgcatccggcactgcaacaatggaatccctgaggactccaaggtagagggccctgcgttcacagatgccatccgcatgtaccgacagtccaaggagctgtacggcacctgggagatgctgtgtgggaacgaggtgcagatcctgagcaacctggtgatggaggagctgggccctgagctgaaggcagagctcggcccgcggctgaaggggaaaccgcaggagcggcagcggcagtggatccagatctcggacgccgtgtaccacatggtgtacgagcaggccaaggcgcgcttcgaggaggtgctgtccaaggtgcagcaggtgcagccggccatgcaggccgtcatccgaactgacatggaccaaattatcacctccaaggagcaccttgccagcaagatccgagccttcatcctccccaaggcagaggtgtgcgtgcggaaccatgtccagccctacatcccatccatcctggagccctgatggtccccaccagccagggcttcactgagtgcgagatgtcttcttc

SEQ ID NO: 183485 - DNA, 1300 bp, Homo Sapiens
ggccgagtgggagccacatctgacacagactccctaaagctgatgctggcattggatacgtgtccgtgggtgttccaccgtgagctgggtgggagccacatctgacacattctccccgaccctgatgctggcgtcagacacgtgcccgtgggtgttccaccgtggccgggtgggagctatttcagaagcgtagtcccctgtgggaagaccaccccctgacacctgcccaaagagccgctctgtgggctggctgctcccctcctccagagcagcacgcctgggtgggtgtgaggggagcagagtctcccgcgaggcggagccacaggcatccatcttcccacaactgtcctcccacagctgtagccctgagctgcccaagctgcactctgcagcctgcaggggccctggtgcaggtgaggtggccacagctggcctcaggacagtactaaagtcgtactcctgtggcctggagggctgagtgctggctgctgcgggtgcctccccaggagctgaggggggcaggtccaagttaatggtctgcagcgccacctccaggagagggaccatgccagtctgcacggacggctcagcccctgggcccacaggtaggaagtctccaatgctgaggctgtcagagaagggtctggccccctccgcctgctgcagccccctgccaccagcccccactgctagaggcttaaggggctgtggggtcagcaggcctggcctgttccagccatcccaggcaggcgagtgttgctctgcagacccagaatcacagccttggcctccctctgggtgctcagggcccggagacgtgacctgggggtgcacgctcaagaggacgtctggcggctcctggggctggtgagcctcagacactgctttcagcatctcctgaatgtgtttctcatcttctaagagaaaacgaagccgtgcactctccagtcggtgcctctggattctccacagtgccttctgctcccgacgagctgcctctgcagagagcttgctgtagtggtcgaccagtgcctgcctcgccttcctctccagctcctcctccagggacttcagccttctctccctgtctcggagttcacgggcgtagctgaagtcatcatccagctcctcctgcctggccgcctggcgtcgctcctggtccttcacaaattgttctttcagcctctgaaactgctcacgcttccgggcatccaaggccatccgttctgacatctgccggtcactcagtgcactcaggaccctggatgctgcttcccgggcatgagcgattaattcccaa

SEQ ID NO: 183486 - DNA, 410 bp, Homo Sapiens
ccataatttttattattaatctcattgtacaagtgagaaaactgagacccagagagcttaagtgacttcctcgaggtcatagttacttactgccttagtcccaatttgaattcaattctgattccaaataagttgcgcttaaataagacaacagatgtgggaaaaatatgtgaatgtgtagtgttgctatgtgtactgtctttacaagtagctaattattttagcacaaagatgtgcaaagaaaggagactttatggagagttcaggagaaaaaggattttgtggtggccatcactttcattcaatttgcgactgctctgatggcacattagatgaagttactgttgatcctgagttacgtgaataaaaaaacaattgaactgcttattaaaaaagtaaacatgtctttt

SEQ ID NO: 183487 - DNA, 1552 bp, Homo Sapiens
ctttgtacaaaaaagttggcgcatggtggggcccctgaccaacctacacaagttccctcccacaagtggacatcagtgtcttctctgtgaggcatctggccattcccactccctggtgtggtcagcctctctcacacaaggaggaacttgggtgaaggctgagtgtgaggcacctgaagtttccctgcggagtcgataaattagcagaaccacatccccatctgttaggccttggtgaggaggccctgggcaaagaagggtctttcgcaaagcgatgtcagagggcggttttgagctttctataagctatagctttgtttatttcacccgttcacttactgtataatttaaaatcatttatgtagctgagacacttctgtatttcaatcatatcatgaacattttattttgctaaatcttgtgtcatgtgtaggctgtaatatgtgtacattgtgtttaagagaaaaatgaaacccacatgccgccattttcctgaatcaaattctgcagtggaatggagaggaaaatacttctaggcaagcagctagactggtgaattgggggaaatagaaggaactagtaactgagactcctccagcctcctccctattggaatcccaatggctcctggagtaggaaaaaagtttaaactacattcatgttcttgttctgtgtcactcggccctgggtagtctaccatttacttcaccccaagtcctgctgcccatccagttgggaagccatgattttcctaagaatccagggccatgggagatacaattccaagttctcgcttcctcctttgggcatctcttctgcctcccaatcaaggaagctccatgctcaggctctcagctctcgggccagtgctctgctctgtccagggtaggtaatactgggagactcctgtcttttaccctcccctcgttccagacctgcctcatggtggcaacatggttcttgaacaattaaagaaacaaatgactttttggaatagccctgtctagggcaaactgtggcccccaggagacactacccttccatgccccagacctctgtcttgcatgtgacaattgacaatctggactaccccaagatggcacccaagtgtttggcttctggctacctaaggttaacatgtcactagagtatttttatgagagacaaacattataaaaatctgatggcaaaagcaaaacaaaatggaaagtaggggaggtggatgtgacaacaacttccaaattggctctttggaggcgagaggaaggggagaacttggagaatagtttttgctttgggggtagaggcttcttagattctcccagcatccgcctttccctttagccagtctgctgtcctgaaacccagaagtgatggagagaaaccaacaagagatctcgaacctgtctagaagaatgtatttgttgctaaatttcgtagcactgtttacagttttcctccatgttatttatgaattttatattccgtgaatgtatattgtcttgtaatgttgcataatgttcactttttatagtgtgtcctttattctaaa

SEQ ID NO: 183488 - DNA, 1604 bp, Homo Sapiens
  misc_feature (1479)..(1488): n is a, c, g, or t
gagcaatgcttttctttaaaggcgcaactttgtacaaaaaagttgggcctgaatgatcagaccagctcaccctctcccagcgcaaggggctgaactatcggtatcacctgggttgtaactgcaagatcaagtcctgctactacctgccttgctttgtgacttccaagaacgagtgtctctggaccgacatgctctccaatttcggttaccctggctaccagtccaaacactacgcctgcatccggcagaagggcggctactgcagctggtaccgaggatgggcccccccggataaaagcatcatcaatgccacagacccctgagcgccagaccctgccccacctcacttccctcccttcccgctgagcttcccttggacactaactcttcccagatgatgacaatgaaattagtgcctgttttcttgcaaatttagcacttggaacatttaaagaaaggtctatgctgtcatatggggtttattgggaactatcctcctggccccaccctgccccttctttttggttttgacatcattcatttccacctgggaatttctggtgccatgccagaaagaatgaggaacctgtattcctcttcttcgtgataatataatctctatttttttaggaaaacaaaaatgaaaaactactccatttgaggattgtaattcccacccctcttgcttcttccccacctcaccatctcccagaccctcttccctttgcccttctcctccaatacataaaggacacagacaaggaacttgctgaaaggccaaccatttcaggatcagtcaaaggcagcaagcagatagactcaaggtgtgtgaaagatgttatacaccaggagctgccactgcatgtcccaaccagactgtgtctgtctgtgtctgcatgtaagagtgagggagggaaggaaggaactacaagagagtcggagatgatgcagcacacacacaattccccagcccagtgatgcttgtgttgaccagatgttcctgagtctggagcaagcacccaggccagaataacagagctttcttagttggtgaagacttaaacatctgcctgaggtcaggaggcaatttgcctgccttgtacaaaagctcaggtgaaagactgagatgaatgtctttcctctccctgcctcccaccagacttcctcctggaaaacgctttggtagatttggccaggagctttcttttatgtaaattggataaatacacacaccatacactatccacagatatagccaagtagatttgggtagaggatactatttccagaatagtgtttagctcacctagggggatatgtttgtatacacatttgcatatacccacatggggacataagctaatttttttacaggacacagaattctgttcaatgctgttaaatatgccaatagtttaatctcttctattttgttgtcgttgcttgtttgaagaaaatcatgacattccaagttgacannnnnnnnnncattttaattaaaatttgaaattctgaacaccgtcagcaccctctcttccctatcatgggtcatctgacccctgtccgtctccttgtccctgcttcatgtttgggggcctttcttt

SEQ ID NO: 183489 - DNA, 1457 bp, Homo Sapiens
  misc_feature (86)..(94): n is a, c, g, or t
  misc_feature (467)..(481): n is a, c, g, or t
  misc_feature (728)..(740): n is a, c, g, or t
ttgggttaaatatgccaatagtttaatctcttctattttgttgtcgttgcttgtttgaagaaaatcatgacattccaagttgacannnnnnnnncattttaattaaaatttgaaattctgaacaccgtcagcaccctctcttccctatcatgggtcatctgacccctgtccgtctccttgtccctgcttcatgtttgggggcctttctttaactgccttcctggcttagctcagatggcagatgagagtgtagtcaagggcctgggcacaggagggagagctgcagagtgtcctgcctgccttggctggagggacacctctcctgggtgtggagacagcttggttccctttccctagctccctggtgggtgaatgccacctcctgagatcctcacctcttggaattaaaattgttggtcactggggaaagcctgagtttgcaaccagttgtagggtttctgttgtgnnnnnnnnnnnnnnngaaataaaactataatataaattctcctattaaataaaattattttaagttttagtgtcaaaagtgagatgctgagagtaggtgataatgtatattttacagagtgggggttggcaggatggtgacattgaacatgattgctctctgtctcttttttcagcttatgggtatttatcttctattagtatttgtatcttcagttcattccactttaggaaacagagctgccaattgaaacagaagaagnnnnnnnnnnnnngcagcagacaacacactgtagagtcttgcacacacacaagtgcccaggcaaggtgcttggcagaaccgcagagtgggaagagagtaccggcatcgggtttccttgggatcaatttcattaccgtgtacctttcccattgtggtcatgccatttggcagggggagaatgggaggcttggccttctttgtgaggcagtgtgagcagaagctgatgccagcatgtcactggttttgaagggatgagcccagacttgatgttttgggattgtccttattttaacctcaaggtctcgcatggtggggcccctgaccaacctacacaagttccctcccacaagtggacatcagtgtcttctctgtgaggcatctggccattcgcactccctggtgtggtcagcctctctcacacaaggaggaacttgggtgaaggctgagtgtgaggcacctgaagtttccctgcggagtcgataaattagcagaaccacatccccatctgttaggccttggtgaggaggccctgggcaaagaaggtctttcgcaaagcgatgtcagagggcggttttgagctttctataagctatagctttgtttatttcacccgttcacttactgtataatttaaaatcatttatgtagctgagacacttctgtatttcaatcatatcatgaacattttattttgctaaatcttgtgtcatgtgtaggctgtaatatgtgt

SEQ ID NO: 183490 - DNA, 1673 bp, Homo Sapiens
  misc_feature (454)..(466): n is a, c, g, or t
  misc_feature (713)..(729): n is a, c, g, or t
  misc_feature (1101)..(1109): n is a, c, g, or t
aaacttcaggtgctcacactcagccttcacccaagttcctccttgtgtgagagaggctgaccacaccagggagtgcgaatggcccagatgcctcacagagaagacactgatgtccacttgtgggagggaacttgtgtaggttggtcaggggccccaccatgcgagaccttgaggttaaaataaggacaatcccaaaacatcaagtctgggctcatcccttcaaaaccagtgacatgctggcatcagcttctgctcacactgcctcacaaagaaggccaagcctcccattctccccctgccaaatggcatgaccacaatgggaaaggtacacggtaatgaaattgatcccaaggaaacccgatgccggtactctcttcccactctgcggttctgccaagcaccttgcctgggcacttgtgtgtgtgcaagactctacagtgtgttgtctgctgcnnnnnnnnnnnnncttcttctgtttcaattggcagctctgtttcctaaagtggaatgaactgaagatacaaatactaatagaagataaatacccataagctgaaaaaagagacagagagcaatcatgttcaatgtcaccatcctgccaacccccactctgtaaaatatacattatcacctactctcagcatctcacttttgacactaaaacttaaaataattttatttaataggagaatttatattatagttttatttcnnnnnnnnnnnnnnnnncacaacagaaaccctacaactggttgcaaactcaggctttccccagtgaccaacaattttaattccaagaggtgaggatctcaggaggtggcattcacccaccagggagctaggaaaggaaaccaagctgtctccacacccaggagaggtgtccctccagccaaggcaggcaggacactctgcagctctccctcctgtgcccaggcccttgactacactctcatctgccatctgagctaagccaggaaggcagttaaagaaaggcccccaaacatgaagcagggacaaggagacggacaggggtcagatgacccatgatagggaagagagggtgctgacggtgttcagaatttcaaattttaattaaaatgnnnnnnnnntgtcaacttggaatgtcatgattttcttcaaacaagcaacgacaacaaaatagaagagattaaactattggcatatttaacagcattgaacagaattctgtgtcctgtaaaaaaattagcttatgtccccatgtgggtatatgcaaatgtgtatacaaacatatccccctaggtgagctaaacactattctggaaatagtatcctctacccaaatctacttggctatatctgtggatagtgtatggtgtgtgtatttatccaatttacataaaagaaagctcctggccaaatctaccaaagcgttttccaggaggaagtctggtgggaggcagggagaggaaagacattcatctcagtctttcacctgagcttttgtacaaggcaggcaaattgcctcctgacctcaggcagatgtttaagtcttcaccaactaagaaagctctgttattctggcctgggtgcttgctccagactcaggaacatctggtcaacacaagcatcactgggctggggaattgtgtgtgtgctgcatcatctccgactctcttgtagttccttcccaa

SEQ ID NO: 183491 - DNA, 957 bp, Homo Sapiens
ttggggcaggcggcgggcgctcagacggcttctcctcctcctcttgctcctccagctcctgctccttcgccgggaggccgcccgccgagtcctgcgccagcgccgaggcagcctcgctgcgccccatcccgtcccgccgggcactcggagggcagcgcgccggaggccaaggttgccccgcacggcccggcgggcgagcgagctcgggctgcagcagccccgccggcggcgcgcacggcaactttggagaggcgagcagcagccccggcagcggcggcagcagcggcaatgaccccttggctcgggctcatcgtgctcctgggcagctggagcctgggggactggggcgccgaggcgtgcacatgctcgcccagccacccccaggacgccttctgcaactccgacatcgtgatccgggccaaggtggtggggaagaagctggtaaaggaggggcccttcggcacgctggtctacaccatcaagcagatgaagatgtaccgaggcttcaccaagatgccccatgtgcagtacatccacacggaagcttctgagagtctctgtggccttaagctggaggtcaacaagtaccagtacctgctgacaggtcgcgtctatgatggcaagatgtacacggggctgtgcaacttcgtggagaggtgggaccagctcaccctctcccagcgcaaggggctgaactatcggtatcacctgggttgtaactgcaagatcaagtcctgctactacctgccttgctttgtgacttccaagaacgagtgtctctggaccgacatgctctccaatttcggttaccctggctaccagtccaaacactacgcctgcatccggcagaagggcggctactgcagctggtaccgaggatgggcccccccggataaagcatcatcaatgccacaaacccttgagcggcagaccctgccccacctcacttccctccct

SEQ ID NO: 183492 - DNA, 2497 bp, Homo Sapiens
  misc_feature (259)..(267): n is a, c, g, or t
  misc_feature (640)..(655): n is a, c, g, or t
  misc_feature (901)..(913): n is a, c, g, or t
ttggtacacacaccatacactatccacagatatagccaagtagatttgggtagaggatactatttccagaatagtgtttagctcacctagggggatatgtttgtatacacatttgcatatacccacatggggacataagctaatttttttacaggacacagaattctgttcaatgctgttaaatatgccaatagtttaatctcttctattttgttgtcgttgcttgtttgaagaaaatcatgacattccaagttgacannnnnnnnncattttaattaaaatttgaaattctgaacaccgtcagcaccctctcttccctatcatgggtcatctgacccctgtccgtctccttgtccctgcttcatgtttgggggcctttctttaactgccttcctggcttagctcagatggcagatgagagtgtagtcaagggcctgggcacaggagggagagctgcagagtgtcctgcctgccttggctggagggacacctctcctgggtgtggagacagcttggttccctttccctagctccctggtgggtgaatgccacctcctgagatcctcacctcttggaattaaaattgttggtcactggggaaagcctgagtttgcaaccagttgtagggtttctgttgtgnnnnnnnnnnnnnnnngaaataaaactataatataaattctcctattaaataaaattattttaagttttagtgtcaaaagtgagatgctgagagtagtgataatgtatattttacagagtgggggttggcaggatggtgacattgaacatgattgctctctgtctcttttttcagcttatgggtatttatcttctattagtatttgtatcttcagttcattccactttaggaaacagagctgccaattgaaacagaagaagnnnnnnnnnnnnngcagcagacaacacactgtagagtcttggcacacacacaagtgcccaggcaaggtgcttggcagaaccgcagagtgggaagagagtaccggcatcgggtttccttgggatcaatttcattaccgtgtacctttcccattgtggtcatgccatttggcagggggagaatgggaggcttggccttctttgtgaggcagtgtgagcagaagctgatgccagcatgtcactggttttgaagggatgagcccagacttgatgttttgggattgtccttattttaacctcaaggtctcgcatggtggggcccctgaccaacctacacaagttccctcccacaagtggacatcagtgtcttctctgtgaggcatctggccattcgcactccctggtgtggtcagcctctctcacacaaggaggaacttgggtgaaggctgagtgtgaggcacctgaagtttccctgcggagtcgataaattagcagaaccacatccccatctgttaggccttggtgaggaggccctgggcaaagaagggtctttcgcaaagcgatgtcagagggcggttttgagctttctataagctatagctttgtttatttcacccgttcacttactgtataatttaaaatcatttatgtagctgagacacttctgtatttcaatcatatcatgaacattttattttgctaaatcttgtgtcatgtgtaggctgtaatatgtgtacattgtgtttaagagaaaaatgaaacccacatgccgccattttcctgaatcaaattctgcagtggaatggagaggaaaatacttctaggcaagcagctagactggtgaattgggggaaatagaaggaactagtaactgagactcctccagcctcctccctattggaatcccaatggctcctggagtaggaaaaaagtttaaactacattcatgttcttgttctgtgtcactcggccctgggtagtctaccatttacttcaccccaagtcctgctgcccatccagttgggaagccatgattttcctaagaatccagggccatgggagatacaattccaagttctcgcttcctcctttgggcatctcttctgcctcccaatcaaggaagctccatgctcaggctctcagctctcgggccagtgctctgctctgtccagggtaggtaatactgggagactcctgtcttttaccctcccctcgttccagacctgcctcatggtggcaacatggttcttgaacaattaaagaaacaaatgactttttggaatagccctgtctagggcaaactgtggcccccaggagacactacccttccatgccccagacctctgtcttgcatgtgacaattgacaatctggactaccccaagatggcacccaagtgtttggcttctggctacctaaggttaacatgtcactagagtatttttatgagagacaaacattataaaaatctgatggcaaaagcaaaacaaaatggaaagtagggaaggtggatgtgacaacaacttccaaattggctctttggaaggcgagagaaaggggaaaacttggagaataatttttgctttgggggtagaggcttc

SEQ ID NO: 183493 - DNA, 1621 bp, Homo Sapiens
caatgcttttttataatgccaactttgtacaaaaaagttgggtgctaccaaatgtattgcttgtcagaatccaggtaaacaaaatcaaactacttctgcagtttcaacacctgcctcttcagagacaagcaaggctccaaagagcggatttgagggaatgttcactaagaaggagggacagtgggattgcagtgtgtgcttagtaagaaatgaagccagtgctaccaaatgtattgcttgtcagaatccaggtaaacaaaatcaaactacttctgcagtttcaacacctgcctcttcagagacaagcaaggctccaaagagcggatttgagggaatgttcactaagaaggaaggacagtgggattgcagtgtgtgcttagtaagaaatgaagccagtgctaccaaatgtattgcttgtcagtgtccaagtaaacaaaatcaaacaactgcaatttcaacacctgcctcttcggagataagcaaggctccaaagagtggatttgaaggaatgttcatcaggaaaggacagtgggattgtagtgtttgctgtgtacaaaatgagagttcttccttaaaatgtgtggcttgtgatgcctctaaaccaactcataaacctattgcagaagctccttcagctttcacactgggctcagaaatgaagttgcatgactcttctggaagtcaggtgggaacaggatttaaaagtaatttctcagaaaaagcttctaagtttggcaatacagagcaaggattcaaatttgggcatgtggatcaagaaaattcaccttcatttatgtttcagggttcttctaatacagaatttaagtcaaccaaagaaggattttccatccctgtgtctgctgatggatttaaatttggcatttcggaaccaggaaatcaagaaaagaaaagtgaaaagcctcttgaaaatggtactggcttccaggctcaggatattagtggccagaagaatggccgtggtgtgatttttggccaaacaagtagcacttttacatttgcagatcttgcaaaatcaacttcaggagaaggatttcagtttggcaaaaaagaccccaatttcaagggattttcaggtgctggagaaaaattattctcatcacaatacggtaaaatggccaataaagcaaacacttccggtgactttgagaaagatgatgatgcctataagactgaggacagcgatgacatccattttgaaccagtagttcaaatgcccgaaaaagtagaacttgtaacaggagaagaagatgaaaaagtgctgtattcacagcgggtaaaactatttagatttgatgctgaggtaagtcagtggaaagaaaggggcttggggaacttaaaaattctcaaaaacgaggtcaatggcaaactaagaatgctgatgcgaagagaacaagtactaaaagtgtgtgctaatcattggataacgactacgatgaacctgaagcctctctctggatcagatagagcatggatgtggttagccagtgatttctctgatggtgatgccaaactagagcagttggcagcaaaatttaaaacaccagagctggctgaagaattcaagcagaaatttgaggaatgccagcggcttctgttagac

SEQ ID NO: 183494 - DNA, 3409 bp, Homo Sapiens
ttgggttctttgcgaaatgcagattcagaaataaaacattctacaccatctcctaccaaatattcactatcaccaagtaaaagttacaagtattctcccaaaacaccacctcgatgggcagaagatcagaattctttacggaaaatgatttgccaagaagtaaaggccattacgaaactaaatagcagtaagtcagcatcccgtcatcgttggcccacagagaattatggaccagactcggtgcctgatggatatcaggggtcacagacatttcatggggctccactaacagttgcaactactggcccttcagtatattatagtcagtcaccagcatataattcccagtatcttctcagaccagcagctaatgttactcccacaaagggttcttctaatacagaatttaagtcaaccaaagaaggattttccatccctgtgtctgctgatggatttaaatttggcatttcggaaccaggaaatcaagaaaagaaaagggaaaagcctcttgaaaatgatactggcttacaggctcaggatattagtggccggaagaagggccgtggtgtgatttttggccaaacaagtagcacttttacatttgcagatgttgcaaaatcaacttcaggagaaggatttcagtttggcaaaaaagaccccaatttcaagggattttcaggtgctggagaaaaattattctcatcacgatacggtaaaatggccaataaagcaaacacttccggtgactttgagaaagatgatgatgcctataagactgaggacagcgatgacatccattttgaaccagtagttcaaatgcctgaaaaagtagaacttgtaacaggagaagaaggtgaaaaagttctgtattcacagggggtaaaactatttagatttgatgctgaggtaaggcagtggaaagaaaggggcttggggaacttaaaaattctcaaaaacgaggtcaatggcaaactaagaatgctgatgcgaagagaacaagtactaaaagtgtgtgctaatcattggataacgactacaatgaacctgaagcccctctctggatcagatagagcatggatgtggtcagccagtgatttctctgatggtgatgccaaactagagcggttggcagcaaaatttaaaacaccagagctggctgaagaattcaagcagaaatttgaggaatgccagcggcttctgttagacataccacttcaaactccccataaacttgtagatactggcagagctgccaagttaatacagagagctgaagaaatgaagagtggactgaaagatttcaaaacatttttgacaaatgatcaaacaaaagtcactgaggaagaaaataagggttcaggtacaggtgtggccggtgcctcagacacaacaataaaacccaatgctgaaaacactgggcccacattagaatgggataactatgacttaagggaagatgctttggatgatagtgtcagtagtagctcagtacatgcttctccattggcaagtagccctgtgagaaaaaatcttttccgctttgatgagtcaacaacaggatctaacttcagttttaaatctgctttgagtctatctaagtctcctgccaagttgaatcagagtgggacttcagttggcactgatgaagaatctgttgttactcaagaagaagagagagatggacagtactttgaacctgttgttcctttacctgatctagttgaagtatccagtggtgaggaaaatgaacaagttgtttttagtcacatggcagaactctacagatatgataaagatgttggtcaatggaaagaaaggggcattggtgatataaagattttacagaattatgataataagcaagttcgtatagtgatgagaagggaccaagtattaaaactttgtgccaatcacagaataactccagacatgagtttgcaaaatatgaaagggacagaaagagtatgggtgtggactgcatgtgattttgcagatggagaaagaaaagtagagcatttagctgttcgttttaaactacaggatgttgcagactcgtttaagaaaatttttgatgaagcaaaaacagcccaggaaaaagattctttgataacacctcatgtttctcggtcaagcactcccagagagtcaccatgtggcaaaattgctgtagctgtattagaagaaaccacaagagagaggacagatgttattcagggtgatgatgtagcagatgcagcttcagaagttgaagtgtctagcacatctgaaacaacaacaaaagcagtggtttctcctccaaagtttgtatttgtttcagagtctgttaaaagaatttttagtagtgaaaaatcaaaaccatttgcatttggcaacagttctgccactgggtctttgtttggatttagttttaatgcacctttgaaaagtaacaatagtgaaactagttcagtagcccagagtggctgaaagcaaagtggaacctaaaaaatgtgaactgtcaaagaactctgatatcgaacagtcttcagatagcaaagtcaaaaatctctctgcttcctttccaacggaagaatcttcaatcaactacacatttaaaacaccagaaaaggagcctccattatggcatgctgaatttaccaaagaagaattggttcagaagctccgttccaccacaaaaagtgcagatcacttaaacggcctgcttcgggaaatagaggcaaccaatgcagtccttatggagcaaattaagcttctcaaaagtgaaataagaagattggaaaggaatcaagagcgagagaagtctgcagctaacctggaatacttgaagaacgtcttgctgcagttcattttcttgaagccaggtagtgaaagagagagacttcttcctgttataaatacgatgttgcagctcagccctgaagaaaagggaaaacttgctgcggttgctcaagatgaggaagaaaatgcttcccgttcttctggatgagcatcctatcttcgtggttggtttggacttcgataggttgatggaaggaatacttctattaaccaaatagaatctgtttacaaaaatggttcgtgtgtgttaccattattcttttgtcaaaaagtgtgtatatatgtttgcatttacatatatttgtacatctgtatgacagatgtattttaaaagtttcaacttgaagtaaaagtacaacagcttgaagtgttgataccaggccacagccctctaactcatgtgatctcccatgcatgctgccagaataaaaccaccaggaatgaattcactccccacttctctggaacctcaggacccgcccatttctcggcagtactgtgaattttgaagttaaactaaattttggtaccataccaactggaatttaggctttaaaaataatgtttcaag

SEQ ID NO: 183495 - DNA, 1855 bp, Homo Sapiens
actttgtacaaaaaagttggggaatccgaaaatggctaaaacagcttttccatcatttgccccatgaaacctcaaggcttgaaacaaatgcacctgaatcaatatgtattttagatcttgaagtatttctccttggagtagtatataccagccacttacaattaaaggagaaatgtaattctcaccacagctcctatcagccgttatgcctgccccttcctgtgtgtaaacagctttgtacagaaagacaaaaatcttggtgggatgcggtttgtactctgattcacagaaaagcagtacctggaaacgtagcaaaattgagacttctagttcagcatgaaataaacactctaagagcccaggaaaaacatggccttcaacctgctctgcttgtacattgggcagaatgccttcagaaaacgggcagcggtcttaattctttttatgatcaacgagaatacatagggagaagtgttcattattggaagaaagttttgccattgttgaagataataaaaaagaagaacagtattcctgaacctattgatcctctgtttaaacattttcatagtgtagacattcaggcatcagaaattgttgaatatgaagaagacgcacacataacttttgctatattggatgcagtaaatggaaatatagaagatgctgtgactgcttttgaatctataaaaagtgttgtttcttattggaatcttgcactgatttttcacaggaaggcagaagacattgaaaatgatgccctttctcctgaagaacaagaagaatgcagaaattatctgacaaagaccagggactacctaataaagattatagatgacggtgattcaaatctttcagtggtcaagaaattgcctgtgcccctggagtctgtaaaacagatgcttaattcagtcatgcaggaactcgaagactatagtgaaggaggtcctctctataaaaatggttctttgcgaaatgcagattcagaaataaaacattctacaccgtctcctaccaaatattcactatcaccaagtaaaagttacaagtattctcccgaaacaccacctcgatggacagaagatcggaattctttactgaatatgatttgccaacaagtagaggccattaagaaagaaatgcaggagttgaaactaaatagcagtaagtcagcatcccgtcatcgttggcccacagagaattatggaccagactcggtgcctgatggatatcaggggtcacagacatttcatggggctccactaacagttgcaactactggcccttcagtatattatagtcagtcaccagcatataattcccagtatcttctcagaccagcagctaatgttactcccacaaagggttcttctaatacagaatttaagtcaaccaaagaaggattttccatccctgtgtctgctgatggatttaaatttggcatttcggaaccaggaaatcaagaaaagaaaagggaaaagcctcttgaaaatgatactggcttccaggctcaggatattagtggccggaagaagggccgtggtgtgatttttggccaaacaagtagcacttttacatttgcagatgttgcaaaatcaacttcaggagaaggatttcagtttggcaaaaaagacctcaatttcaagggattttcacgtgctggagaaaaattattctcatcacgatacggtaaaatggccaataaagcaaacacttccggtgactttgagaaagatgatgatgcctataagactgagacagcgatgacatccattttgaaccagtagttcaaatgcctgaaaaagtagaacttgtaacaggagaagaagtgaaaaagttctgtattcacaggggg

SEQ ID NO: 183496 - DNA, 1647 bp, Homo Sapiens
ttggttttttgactgcgtgttacagcaaaagagaagaaaaaacctgaagattctccctcagatgatgatgttctcattgtatatgaactaactccaaccgctgagcagaaagcccttgcaaccaaacttaaacttcctccaactttcttctgctacaagaatagaccagattatgttagtgaagaagaggaggatgatgaagatttcgaaacagctgtcaagaaacttaatggaaaactatatttggatggctcagaaaaatgtagacccttggaagaaaatacagcagataatgagaaagaatgtattattgtttgggaaaagaaaccaacagttgaagagaaggcaaaagcagatacgttaaaacttccacctacatttttttgtggagtctgtagtgatactgatgaagacaatggaaatggggaagactttcaatcagagcttcaaaaagttcaggaagctcaaaaatctcagacagaagaaataactagcacaactgacagtgtatatacaggtgggactgaagtgatggtaccttctttctgtaaatctgaagaacctgattctattaccaaatccattagttcaccatctgtttcctctgaaactatggacaaacctgtagatttgtcaactagaaaggaaattgatacagattctacaagccaaggggaaagcaagatagtttcatttggatttggaagtagcacagggctctcatttgcagacttggcttccagtaattctggagattttgcttttggttctaaagataaaaatttccaatgggcaaatactggagcagctgtgtttggaacacagtcagtcggaacccagtcagccggtaaagttggtgaagatgaagatggtagtgatgaagaagtagttcataatgaagatatccattttgaaccaatagtgtcactaccagaggtagaagtaaaatctggagaagaagatgaagaaattttgtttaaagagagagccaaactttatagatgggatcgggatgtcagtcagtggaaggagcgcggtgttggagatataaagattctttggcatacaatgaagaattattaccggatcctaatgagaagagaccaggtttttaaagtgtgtgcaaaccacgttattactaaaacaatggaattaaagcccttaaatgtttcaaataatgctttagtttggactgcctcagattatgctgatggagaagcaaaagtagaacagcttgcagtgagatttaaaactaaagaagtagctgattgtttcaagaaaacatttgaagaatgtcagcagaatttaatgaaactccagaaaggacatgtatcactggcagcagaattatcaaaggagaccaatcctgtggtgttttttgatgtttgtgcggacggtgaacctctagggcggataactatggaattattttcaaacattgttcctcggactgctgagaacttcagagcactatgcactggagagaaaggctttggtttcaagaatttccatttttcacagagtaattccagattttgtttgccaaggaggagatatcaccaaacatgatggaacaggcggacagtccatttatggagacaaatttgaagatgaaaattttgatgtgaaacatactggttcctggtt

SEQ ID NO: 183497 - DNA, 2655 bp, Homo Sapiens
ctttgtacaaaaaagttggtccattttgaaccaatagtgtcactaccagaggtagaagtaaaatctggagaagaagatgaagaaattttgtttaaagagagagccaaactttatagatgggatcgggatgtcagtcagtggaaggagcgcggtgttggagatataaagattctttggcatacaatgaagaattattaccggatcctaatgagaagagaccaggtttttaaagtgtgtgcaaaccacgttattactaaaacaatggaattaaagcccttaaatgtttcaaataatgctttagtttggactgcctcagattatgctgatggagaagcaaaagtagaacagcttgcagtgagatttaaaactaaagaagtagctgattgtttcaagaaaacatttgaagaatgtcagcagaatttaatgaaactccagaaaggacatgtatcactggcagcagaattatcaaaggagaccaatcctgtggtgttttttgatgtttgtgcggacggtgaacctctagggcggataactatggaattattttcaaacattgttcctcggactgctgagaacttcagagcactatgcactggagagaaaggctttggtttcaagaattccatttttcacagagtaattccagattttgtttgccaaggaggagatatcaccaaacatgatggaacaggcggacagtccatttatggagacaaatttgaagatgaaaattttgatgtgaaacatactggtcctggtttactatccatggccaatcaaggccagaataccaataattctcaatttgttataacactgaagaaagcagaacatttggactttaagcatgtagtatttgggtttgttaaggatggcatggatactgtgaaaaagattgaatcatttggttctcccaaagggtctgtttgtcgaagaataactatcacagaatgtggacagatataaaatcattgttgttcatagaaaatttcatctgtataagcagttggattgaagcttagctattacaatttgatagttatgttcagcttttgaaaatggacgtttccgatttacaaatgtaaaattgcagcttatagctgttgtcactttttaatgtgttataattgaccttgcatggtgtgaaataaaagtttaaacactggtgtatttcaggtgtacttgtgtttatgtactcctgacgtattaaaatggaataatactaatcttgttaaaagcaatagacctcaaactattgaaggaatatgatatatgcaatttaattttaattccttttaagatattgggacttcctgcatggatatacttaccatttgaataaagggaccacaacttggataatttaattttaggtttgaaatatatttggtaatcttaactattggtgtactcatttatgcatagagactcgtttatgaatgggtagagccacagaacgtatagagttaaccaaagtgctcttctctagaatctttacacctcctgtgtggttacaagttaactttgtaagtagcgtaccttccttccttaaaatatctagcttcctgtgccctttcatagatattcgattaatttttacattttaaacaagttgactatttcctttaggggttttgtttcaaacttttctgtcatctgtctctactacctcagaaactgcagcttggttctgatgatagaaattgaatttttccttgtagttattgtgataaagtatgaatatttttagaaagtctataccatgttctttcgttaaagatttgctttatacaagattgttgcagtacctttttctggtaaattttgtagcagaaataaaatgacaattcctaagagccactgacattcaaaaaattcattacttacgcttcgggttcattctagtctaaagtaaggaagacaatttaaaggcagtaaattcaaactgctgcataatttccagagctcctagtttctcaagtttgatacacaccaaaaacgtatttggaaatggcttgtatcaaatgttaggcaaattgctaaagaaaagaggatgttcttattggcctactcaatatggaactacaaagaatccaggtagaacacaaaattttgtatattgcaattatgaatattgactgtcttccacccatctgtgttctttcgggtgaaattacctcattttatttagtgaggaaagacaggtttattccctgttacatggggatttggaaattgggtatcctaaagcaagtaactgttcaaccaccagtcaaaagaggggagggatgttgtgcgagtaatgagtgatggtataccatcaccattccactcggccacaaagccagatacttgaaataaacctactccaaatgtatcagttcagtcttgaaccatggattacatatgtttacactaaatatttcaaattggcttatttggaaatctatgtaatataaactgatgtaaagtgtgttgtaacttttcagctgagacagttgatgccttcgtcatgattttagaataaattcttaagttaatgcaagtgctttttaagagactttttacagatttgtatgctttcctaaagcactaaagttacaaattaaaaagctttaaaactttgaccaaaaatttgacaaaatgacatgtaaa

SEQ ID NO: 183498 - DNA, 1515 bp, Homo Sapiens
ttgggtgatgagaagggaccaagtattaaaactttgtgccaatcacagaataactccagacatgactttgcaaaatatgaaagggacagaaagagtatggttgtggactgcatgtgattttgcagatggagaaagaaaagtagagcatttagctgttcgttttaaactacaggatgttgcagactcgtttaagaaaatttttgatgaagcaaaaacagcccaggaaaaagattctttgataacacctcatgtttctcggtcaagcactcccagagagtcaccatgtggcaaaattgctgtagctgtattagaagaaaccacaagagagaggacagatgttattcagggtgatgatgtagcagatgcaacttcagaagttgaagtgtctagcacatctgaaacaacaccaaaagcagtggtttctcctccaaagtttgtatttggttcagagtctgttaaaagcatttttagtagtgaaaaatcaaaaccatttgcattcggcaacagttcagccactgggtctttgtttggatttagttttaatgcacctttgaaaagtaacaatagtgaaactagttcagtagcccagagtggatctgaaagcaaagtggaacctaaaaaatgtgaactgtcaaagaactctgatatcgaacagtcttcagatagcaaagtcaaaaatctctttgcttcctttccaacggaagaatcttcaatcaactacacatttaaaacaccagaaaaggcaaaagagaagaaaaaacctgaagattctccctcagatgatgatgttctcattgtatatgaactaactccaaccgctgagcagaaagcccttgcaaccaaacttaaacttcctccaactttcttctgctacaagaatagaccagattatgttagtgaagaagaggaggatgatgaagatttcgaaacagctgtcaagaaacttaatggaaaactatatttggatggctcagaaaaatgtagacccttggaagaaaatacagcagataatgagaaagaatgtattattgtttgggaaaagaaaccaacagttgaagagaaggcaaaagcagatacgttaaaacttccacctacatttttttgtggagtctgtagtgatactgatgaagacaatggaaatggggaagactttcaatcagagcttcaaaaagttcaggaagctcaaaaatctcagacagaagaaataactagcacaactgacagtgtatatacaggtgggactgaagtgatggtaccttctttctgtaaatctgaagaacctgattctattaccaaatccattagttcaccatctgtttcctctgaaactatggacaaacctgtagatttgtcaactagaaaggaaattgatacagattctacaagccaaggggaaagcaagatagtttcatttggatttggaagtagcacagggctctcatttgcagacttggcttccagtaattctggagattttgcttttggttctaaagataaaaatttccaatgggcaaa

SEQ ID NO: 183499 - DNA, 1734 bp, Homo Sapiens
acaaaaaagttgggtgttgaaaaattttagaagctaaataggtaaaaaagcaggaaggtgcagacctccactagtgctgctgctttatccatctggtcctgtgaaggctcaccctgaagctatgggatggctgcttttgtttcatttttctcacttgtgatttctgagtccttttaacaatgatgaggcatgattggggatgtggaagatgagtaggatggtggtgctacagctggaggccacaggagaggtgcaagctgggctcagtttgtgtggctgccccacccactgtgttacgccacagaggcagccctgggggttaggattggcagagctctcgtggagacctgccatcgtgctgatccagagccaccttgctattctctctgtagaggagaaggcagagcccccccaggctatgaatgccctgatgcggttgaaccagctgaagccagggctgcagtacaagctggtgtcccagactgggcccgtccatgcccccatctttaccatgtctgtggaggttgatggcaattcattcgaggcctctgggccctccaaaaagacggccaagctgcacgtggccgttaaggtgttacaggacatgggcttgccgacgggtgctgaaggcagggactcgagcaagggggaggactcggctgaggagaccgaggcgaagccagcagtggtggcccctgccccagtggtagaagctgtctccacccctagtgcggcctttccctcagatgccactgccgagaacgtaaaacagcaggggccgatcctgacaaagcacggcaagaacccagtcatggagctgaacgagaagaggcgtgggctcaagtacgagctcatctccgagaccgggggcagccacgacaagcgcttcgtcatggaggtcgaagtggatggacagaagttccaaggtgctggttccaacaaaaaggtggcgaaggcctacgctgctcttgctgccctagaaaagcttttccctgacacccctctcgcccttgatgccaacaaaaagaagagagccccagtacccgtcagagggggaccgaaatttgctgctaagccacataaccctggcttcggcatgggaggccccatgcacaacgaagtgcccccaccccccaaccttcgagggcggggaagaggcgggagcatccggggacgggggcgcgggcgaggatttggtggcgccaaccatggaggctacatgaatgccggtgctgggtatggaagctatgggtacggaggcaactctgcgacagcaggctacagtgactttttcacagactgctacggctatcatgattttgggtcttcctagagcgtctaaaagtattgcacacaaaatcaactttttactccaatttcctccaactccaaaacccaaagtgtccgtgctgtgtccctgtgcttcactgggtttctcaaccgtggcttttcaccgcagcttgtctgaaactcttagcctgcagaatttaagacaatggcagtttttatcgtgatttgcctttgaacttggtcctattgaagttcacaataagtggaaaacaattttttcagagaatgtatttttgtgcagaattgcacagaattctagagacagcgttgttcggcatcaaggcaaaagcccacctttgcttttatggaaagcattactttatttaaagagacagacaatgacgcatttaatctacctttgtcttaatttacagcaaggttttg

SEQ ID NO: 183500 - DNA, 961 bp, Homo Sapiens
actttgtacaaaaaagttggattttttcagagaatgtatttttgtgcagaattgcacagaattctagagacagcgttgttcggcatcaaggcaaaagcccacctttgctttttatggaaagcattactttatttaaagagacagacaatgacgcattttaatctacctttgtcttaatttacagcaggttttgtatgaatttttaaccttttaacaaactcccaaatctggttgatgcctttgacagtgatgaaaacgatttcaccacatctgaatccagagaaaccggctttttttcttattgcgagcatgttaaaacgttgggaacatgtggggaattgtatattgcgctgaattaacttctcccgcctcttgtaatgctctggtgggttcttgtttgggaatgcgatattttgtggctggtttagctagagagtgaactctcaaaggtatcaaaactgtgcttccattattagtgcaagaaacagacaggctttaaggggtagatgacgtgaaattttgcaagtcttaattacagctgcagatgcatgggattctggatttttttgttgctttttagtttaatgggactttaaaagtaattgaggagaaagaaccgtgatgttccctgtttctccagtaaaggactggcttttgcttgggcagaggtggtgctgctgggtgtgcagctgccacagactccaaaggcgtaaaagtttgtgccaacacacggagtcattctggctctctgctgaggcccctgttttctggcaggtgccctccttggaaactggtttggctctgatcagcggttctttttgcagcaaagcctgcatctgtgttgacttgcaaattttgcgtttattcaagcaaaaactggtcaaaatggttactacatgatttgttcccaaaggtttgaaacattccgtgaaacctttttaaactttgattgcatgatgta

SEQ ID NO: 183501 - DNA, 1441 bp, Homo Sapiens
ttgggtcttctcgcgcggatggtgaagctgaatttggtacgctggtggctcggacagacagcaagagagagacaagcccgaggcctgacttctagcactcctgagtttgagccctatgagcagtggaacctagggaccaccaaggatccagatataattctttcctcagtaatagaaaaaagaatctgggatctaagaagatacctactcattttctaagtgactggccatgtcattgtcccacttataccgggatggggaaggccgcattgatgatgatgatgacgagcgggagaactttgagatcactgactgggatctccagaatgagttcaaccccaaccgacagcgccactggcagaccaaggaagaagccacctacggggtgtgggcagagcgagactcggatgatgagaggcccagctttggaggcaaacgggcccgtgactactctgcgccagtcaacttcatcagcgcagggctcaagaaaggggcagcggaggaggcagagttggaagattctgatgacgaagagaaacctgttaagcaggacgactttcctaaggattttggaccaaggaagctaaaaacgggtggcaattttaagcccagccagaaaggttttgcaggaggaaccaaatctttcatggacttcggcagctgggaaagacacacaaaaggaattggacagaagcttcttcagaagatgggctacgtccctggacggggcctcgggaagaatgcacaaggtatcattaacccaattgaagccaagcagagaaagggaaaaggtgctgtgggggcttatggatccgagcgcaccactcagtccatgcaagacttccctgtggttgactcagaggaagaagctgaagaggagtttcagaaggagctgagccagtggaggaaagacccaagtggaagcaagaagaagcccaaatactcttacaagaccgtggaagagttgaaggccaagggcaggattagcaagaagctcactgctccccagaaggaactttctcaagtcaaggtcatagacatgacaggccgggagcagaaggtctactacagctacagtcagatcagccacaagcacaacgttcccgatgatgggctgccgctacagtcccaacagctgccacagtctggcaaagaggccaaggcccccggcttcgcgctgcccgagctggagcacaacctgcagctgctcatcgacctcacggagcaggagatcatccagaatgaccggcagctacagtatgagcgggacatggtggtcaacctcttccatgagctggagaagatgaccgaggtcctggaccacgaggagcgggtcatctcgaacctcagcaaggtcctggagatggtggaggagtgcgagcggcggatgcagcccgactgcagcaaccccctcaccctggacgagtgtgcccgcatcttc

SEQ ID NO: 183502 - DNA, 1940 bp, Homo Sapiens
cactttgtacaaaaaagttggcgactactgccctaatctcacccacttcagcaatggcaaggctgtcactgtggagacactgtctggccaggctgttgtgtcctaccacacagttgcttggagcaatggtcgtggcttcaatgccacctaccatgtgcggggctattgcttgccttgggacagaccctgtggcttaggctctggcctgggagctggcgaaggcctaggtgagcgctgctacagtgaggcacagcgctgtgacggctcatgggactgtgctgacggcacagatgaggaggactgcccaggctgcccacctggacacttcccctgtggggctgctggcacctctggtgccacagcctgctacctgcctgctgaccgctgcaactaccagactttctgtgctgatggagcagatgagagacgctgtcggcattgccagcctggcaatttccgatgccgggacgagaagtgcgtgtatgagacgtgggtgtgcgatgggcagccagactgtgcggacggcagtgatgagtgggactgctcctatgttctgccccgcaaggtcattacagctgcagtcattggcagcctagtgtgcggcctgctcctggtcatcgccctgggctgcacctgcaagctctatgccattcgcacccaggagtacagcatctttgcccccctctcccggatggaggctgagattgtgcagcagcaggcacccccttcctacgggcagctcattgcccagggtgccatcccacctgtagaagactttcctacagagaatcctaatgataactcagtgctgggcaacctgcgttctctgctacagatcttacgccaggatatgactccaggaggtggcccaggtgcccgccgtcgtcagcggggccgcttgatgcgacgcctggtacgccgtctccgccgctggggcttgctccctcgaaccaacaccccggctcgggcctctgaggccagatcccaggtcacaccttctgctgctccccttgaggccctagatggtggcacaggtccagcccgtgagggcggggcagtgggtgggcaagatggggagcaggcacccccactgcccatcaaggctcccctcccatctgctagcacgtctccagcccccactactgtccctgaagccccagggccactgccctcactgcccctagagccatcactattgtctggagtggtgcaggccctgcgaggccgcctgttgcccagcctggggcccccaggaccaacccggagcccccctggaccccacacagcagtcctggccctggaagatgaggacgatgtgctactggtgccactggctgagccgggggtgtgggtagctgaggcagaggatgagccactgcttacctgaggggacctgggggctctactgaggcctctcccctgggggctctactcatagtggcacaaccttttagaggtgggtcagcctcccctccaccacttccttccctgtccctggatttcagggacttggtgggcctcccgttgaccctatgtagctgctataaagttaagtgtccctcaggcagggagagggctcacagagtctcctctgtacgtggccatggccagacaccccagtcccttcaccaccacctgctccccacgccaccaccatttgggtggctgtttttaaaaagtaaagttcttagaggatcataggtctggacactccatccttgccaaacctctacccaaaagtggccttaagcaccggaatgccaattaactagagaccctccagcccccaaggggaggatttgggcagaacctgaggttttgccatccacaatccctcctacagggcctggctcacaaaaagagtgcaacaaatgcttctattccatagctacggcattgctcagtaagttgaggtcaaaaataaaggaatcatacatctc

SEQ ID NO: 183503 - DNA, 1522 bp, Homo Sapiens
tttgtacaaaaaagttggctccaacccctgtttagggcgggggtaccgcctgggcaagggccggggcgccgggccgagccacctcttcccctcccccgcttccctgtcgcgctccgctggctggacgcgctggaggagtggagcagcacccggccggccctgggggctgacagtcggcaaagtttggcccgaagaggaagtggtctcaaaccccggcaggtggcgaccaggccagaccaggggcgctcgctgcctgcgggcgggctgtaggcgagggcgcgccccagtgccgagacccggggcttcaggagccggccccgggagagaagagtgcggcggcggacggagaaaacaactccaaagttggcgaaaggcaccgcccctactcccgggctgccgccgcctccccgcccccagccctggcatccagagtacgggtcgagcccgggccatggagcccccctggggaggcggcaccagggagcctgggcgcccggggctccgccgcgaccccatcgggtagaccacagaagctccgggacccttccggcacctctggacagcccaggatgctgttggccaccctcctcctcctcctccttggaggcgctctggcccatccagaccggattatttttccaaatcatgcttgtgaggaccccccagcagtgctcttagaagtgcagggcaccttacagaggcccctggtccgggacagccgcacctcccctgccaactgcacctggctcatcctgggcagcaaggaacagactgtcaccatcaggttccagaagctacacctggcctgtggctcagagcgcttaaccctacgctcccctctccagccactgatctccctgtgtgaggcacctcccagccctctgcagctgcccgggggcaacgtcaccatcacttacagctatgctggggccagagcacccatgggccagggcttcctgctctcctacagccaagattggctgatgtgcctgcaggaagagtttcagtgcctgaaccaccgctgtgtatctgctgtccagcgctgtgatggggttgatgcctgtggcgatggctctgatgaagcaggttgcagctcagaccccttccctggcctgaccccaagacccgtcccctccctgccttgcaatgtcaccttggaggacttctatggggtcttctcctctcctggatatacacacctagcctcagtctcccacccccagtcctgccattggctgctggacccccatgatggccggcggctggccgtgcgcttcacagccctggacttgggctttggagatgcagtgcatgtgtatgacggccctgggccccctgagagctcccgactactgcgtagtctcacccacttcagcaatggcaaggctgtcactgtggagacactgtctggccagggctgttgtgtcctaccacacagttgcttggagcaatggtcgtggcttcaatgccacctaccatgtgcggggctattgcttgccttgggacagaccctggtggctta

SEQ ID NO: 183504 - DNA, 2296 bp, Homo Sapiens
ttggctcaaagacggtaaagatagctttctctcctccctggggaatctgggggttgtttaaaaggcctgctcctcttttagaaggcaggagggccccaagggaagcagaaggtgacagaaggggaaagggtcctctgatcattgctcaccccacagagatcttgaaaggaggggtcttgatccagcggaacccccagctctgctaccaggacacgattttgtggaaggacatcttccacaagaacaaccagctggctctcacactgatagacaccaaccgctctcgggcctgccacccctgttctccgatgtgtaagggctcccgctgctggggagagagttctgaggattgtcagagcctgacgcgcactgtctgtgccggtggctgtgcccgctgcaaggggccactgcccactgactgctgccatgagcagtgtgctgccggctgcacgggccccaagcactctgactgcctggcctgcctccacttcaaccacagtggcatctgtgagctgcactgcccagccctggtcacctacaacacagacacgtttgagtccatgcccaatcccgagggccggtatacattcggcgccagctgtgtgactgcctgtccctacaactacctttctacggacgtgggatcctgcaccctcgtctgccccctgcacaaccaagaggtgacagcagaggatggaacacagcggtgtgagaagtgcagcaagccctgtgcccgagtgtgctatggtctgggcatggagcacttgcgagaggtgagggcagttaccagtgccaatatccaggagtttgctggctgcaagaagatctttgggagcctggcatttctgccggagagctttgatggggacccagcctccaacactgccccgctccagccagagcagctccaagtgtttgagactctggaagagatcacaggttacctatacatctcagcatggccggacagcctgcctgacctcagcgtcttccagaacctgcaagtaatccggggacgaattctgcacaatggcgcctactcgctgaccctgcaagggctgggcatcagctggctggggctgcgctcactgagggaactgggcagtggactggccctcatccaccataacacccacctctgcttcgtgcacacggtgccctgggaccagctctttcggaacccgcaccaagctctgctccacactgccaaccggccagaggacgagtgtggtaagacagggagcccagtgtgcgcactccccatctgccagcacacagcagtgcccagggggccctggcagcagcgttcttggacttgtgcagactgcccgtctctgtgcacccttcttgactcagcacagctctggctggcttggcctcttggcatggcttctctagctgggtcctacctgccttggcatccttccctccccctctgtttctgaaatctcagaactcttcctctccctacatcggccccacctgtccccacccctccagcccacagccatgcccacagccagttccctggttcacttggacctggggcctcccctaaaagtcccctgcggtcccttcctcctcactgcagtgggcgagggcctggcctgccaccagctgtgcgcccgagggcactgctggggtccagggcccacccagtgtgtcaactgcagccagttccttcggggccaggagtgcgtggaggaatgccgagtactgcaggggctccccagggagtatgtgaatgccaggcactgtttgccgtgccaccctgagtgtcagccccagaatggctcagtgacctgttttggaccggaggctgaccagtgtgtggcctgtgcccactataaggaccctcccttctgcgtggcccgctgccccagcggtgtgaaacctgacctctcctacatgcccatctggaagtttccagatgaggagggcgcatgccagccttgccccatcaactgcacccactcctgtgtggacctggatgacaagggctgccccgccgagcagagagccagccctctgacgtccatcatctctgcggtggttggcattctgctggtcgtggtcttgggggtggtctttgggatcctcatcaagcgacggcagcagaagatccggaagtacacgatgcggagactgctgcacgaaacggagctggtggagccgctgacacctagcggagcgatgcccaaccaggcgcagatgcggatcctgaaagagacggagctgaggacgtgaagtgcttggatctggcgcttttggcacagtctacaaggcatctggatcc

SEQ ID NO: 183505 - DNA, 4250 bp, Homo Sapiens
  misc_feature (66)..(119): n is a, c, g, or t
ttggccggagaaaccaggggagccccccgggcagccgcgcgccccttcccacggggccctttactnnnnnnnnnnnnnnnnnnnnnnnnnnnnnnnnnnnnnnnnnnnnnnnnnnnnnnagccgggtccagccggagccatggggccggagccgcagtgagcaccatggagctggcggccttgtgccgctgggggctcctcctcgccctcttgccccccggagccgcgagcacccaagtgtgcaccggcacagacatgaagctgcggctccctgccagtcccgagacccacctggacatgctccgccacctctaccagggctgccaggtggtgcagggaaacctggaactcacctacctgcccaccaatgccagcctgtccttcctgcaggatatccaggaggtgcagggctacgtgctcatcgctcacaaccaagtgaggcaggtcccactgcagaggctgcggattgtgcgaggcacccagctctttgaggacaactatgccctggccgtgctagacaatggagacccgctgaacaataccacccctgtcacaggggcctccccaggaggcctgcgggagctgcagcttcgaagcctcacagagatcttgaaaggaggggtcttgatccagcggaacccccagctctgctaccaggacacgattttgtggaaggacatcttccacaagaacaaccagctggctctcacactgatagacaccaaccgctctcgggcctgccacccctgttctccgatgtgtaagggctcccgctgctggggagagagttctgaggattgtcagagcctgacgcgcactgtctgtgccggtggctgtgcccgctgcaaggggccactgcccactgactgctgccatgagcagtgtgctgccggctgcacgggccccaagcactctgactgcctggcctgcctccacttcaaccacagtggcatctgtgagctgcactgcccagccctggtcacctacaacacagacacgtttgagtccatgcccaatcccgagggccggtatacattcggcgccagctgtgtgactgcctgtccctacaactacctttctacggacgtgggatcctgcaccctcgtctgccccctgcacaaccaagaggtgacagcagaggatggaacacagcggtgtgagaagtgcagcaagccctgtgcccgagtgtgctatggtctgggcatggagcacttgcgagaggtgagggcagttaccagtgccaatatccaggagtttgctggctgcaagaagatctttgggagcctggcatttctgccggagagctttgatggggacccagcctccaacactgccccgctccagccagagcagctccaagtgtttgagactctggaagagatcacaggttacctatacatctcagcatggccggacagcctgcctgacctcagcgtcttccagaacctgcaagtaatccggggacgaattctgcacaatggcgcctactcgctgaccctgcaagggctgggcatcagctggctggggctgcgctcactgagggaactgggcagtggactggccctcatccaccataacacccacctctgcttcgtgcacacggtgccctgggaccagctctttcggaacccgcaccaagctctgctccacactgccaaccggccagaggacgagtgtgtgggcgagggcctggcctgccaccagctgtgcgcccgagggcactgctggggtccagggcccacccagtgtgtcaactgcagccagttccttcggggccaggagtgcgtggaggaatgccgagtactgcaggggctccccagggagtatgtgaatgccaggcactgtttgccgtgccaccctgagtgtcagccccagaatggctcagtgacctgttttggaccggaggctgaccagtgtgtggcctgtgcccactataaggaccctcccttctgcgtggcccgctgccccagcggtgtgaaacctgacctctcctacatgcccatctggaagtttccagatgaggagggcgcatgccagccttgccccatcaactgcacccactcctgtgtggacctggatgacaagggctgccccgccgagcagagagccagccctctgacgtccatcatctctgcggtggttggcattctgctggtcgtggtcttgggggtggtctttgggatcctcatcaagcgacggcagcagaagatccggaagtacacgatgcggagactgctgcaggaaacggagctggtggagccgctgacacctagcggagcgatgcccaaccaggcgcagatgcggatcctgaaagagacggagctgaggaaggtgaaggtgcttggatctggcgcttttggcacagtctacaagggcatctggatccctgatggggagaatgtgaaaattccagtggccatcaaagtgttgagggaaaacacatcccccaaagccaacaaagaaatcttagacgaagcatacgtgatggctggtgtgggctccccatatgtctcccgccttctgggcatctgcctgacatccacggtgcagctggtgacacagcttatgccctatggctgcctcttagaccatgtccgggaaaaccgcggacgcctgggctcccaggacctgctgaactggtgtatgcagattgccaaggggatgagctacctggaggatgtgcggctcgtacacagggacttggccgctcggaacgtgctggtcaagagtcccaaccatgtcaaaattacagacttcgggctggctcggctgctggacattgacgagacagagtaccatgcagatgggggcaaggtgcccatcaagtggatggcgctggagtccattctccgccggcggttcacccaccagagtgatgtgtggagttatggtgtgactgtgtgggagctgatgacttttggggccaaaccttacgatgggatcccagcccgggagatccctgacctgctggaaaagggggagcggctgccccagccccccatctgcaccattgatgtctacatgatcatggtcaaatgttggatgattgactctgaatgtcggccaagattccgggagttggtgtctgaattctcccgcatggccagggacccccagcgctttgtggtcatccagaatgaggacttgggcccagccagtcccttggacagcaccttctaccgctcactgctggaggacgatgacatgggggacctggtggatgctgaggagtatctggtaccccagcagggcttcttctgtccagaccctgccccgggcgctgggggcatggtccaccacaggcaccgcagctcatctaccaggagtggcggtggggacctgacactagggctggagccctctgaagaggaggcccccaggtctccactggcaccctccgaaggggctggctccgatgtatttgatggtgacctgggaatgggggcagccaaggggctgcaaagcctccccacacatgaccccagccctctacagcggtacagtgaggaccccacagtacccctgccctctgagactgatggctacgttgcccccctgacctgcagcccccagcctgaatatgtgaaccagccagatgttcggccccagcccccttcgccccgagagggccctctgcctgctgcccgacctgctggtgccactctggaaagggccaagactctctccccagggaagaatggggtcgtcaaagacgtttttgcctttgggggtgccgtggagaaccccgagtacttgacaccccagggaggagctgcccctcagccccaccctcctcctgccttcagcccagccttcgacaacctctattactgggaccaggacccaccagagcggggggctccacccagcaccttcaaagggacacctacggcagagaacccagagtacctgggtctggacgtgccagtgtgaaccagaaggccaagtccgcagaagccctgatgtgtcctcagggagcagggaaggcctgacttctgctggcatcaagaggtgggagggccctccgaccacttccaggggaacctgccatgccaggaacctgtcctaaggaaccttccttcctgcttgagttcccagatggctggaaggggtccagcctcgttggaagaggaacagcactggggagtctttgtggattctgaggccctgcccaatgagactctagggtccagtggatgccacagcccagcttggccctttccttccagatcctgggtactgaaagcctt

SEQ ID NO: 183506 - DNA, 1634 bp, Homo Sapiens
ctggaaaggtggttcccaagagggtggttcccagaattgttgatgagactgtttctcctgcagctgtgtggacctggatgacaagggctgccccgccgagcatagagccagccctctgacgtccatcatctctgcggtggttggcattctgctggtcgtggtcttgggggtggtctttgggatcctcatcaagcgacggcagcagaagatccggaagtacacaatgcggagactgctgcaggaaacggagctggtggagccgctgacacctagcggagcgatgcccaaccaggcgcagatgcggatcctgaaagagacggagctgaggaaggtgaaggtgcttggatctggcgcttttggcacagtctacaagggcatctggatccctgatggggagaatgtgaaaattccagtggccatcaaagtgttgagggaaaacacatcccccaaagccaacaaagaaatcttagacgaagcatacgtgatggctggtgtgggctccccatatgtctcccgccttctgggcatctgcctgacatccacggtgcagctggtgacacagcttatgccctatggctgcctcttagaccatgtccgggaaaaccgcggacgcctgggctcccaggacctgctgaactggtgtatgcagattgccaacgggatgagctacctggaggatgtgcggctcgtacacacggacttggccgctcggaacgtgctggtcaagagtcccaaccatgtcaaattacagacttcgggctggctcggctgctggacattgacgagacagagtaccatgcagatgggggcaaggtgcccatcaagtggatggcgctggagtccattctccgccggcggttcacccaccagagtgatgtgtggagttatggtgtgactgtgtgggagctgatgacttttggggccaaaccttacgatgggatcccagcccgggagatccctgacctgctggaaaagggggagcggctgccccagccccccatctgcaccattgatgtctacatgatcatggtcaaatgttggatgattgactctgaatgtcggccaagattccgggagttggtgtctgaattctcccgcatggccagggacccccagcgctttgtggtcatccagaatgaggacttgggcccagccagtcccttggacagcaccttctaccgctcactgctggaggacgatgacatgggggacctggtggatgctgaggagtatctggtaccccagcagggcttcttctgtccagaccctgccccgggcgctgggggcatggtccaccacaggcaccctccgaaggggctggctccgatgtatttgatggtgacctgggaatgggggcagccaaggggctgcaaagcctccccacacatgaccccagccctctacagcggtacagtgaggaccccacagtacccctgccctctgagactgatggctacgttgcccccctgacctgcagcccccagcctgaatatgtgaaccagccagatgttcgggctccagcccccttcgccccgagagggccctctgcctgctgcccgacctgctggtgccactctggaaggcccagactctctccccagggaagaatagggtcgtcaagacgttttgccttt

SEQ ID NO: 183507 - DNA, 2087 bp, Homo Sapiens
  misc_feature (1846)..(1876): n is a, c, g, or t
ctttgtacaaaaaagttggaaagataaccatcaaatgttatgcaaaaataatctgtaatactaaagacaatgaacgtgttgtgggctttcacgtactgggtccaaatgctggagaagttacacaaggctttgcagctgcgctcaaatgtggactgaccaaaaagcagctggacagcacaattggaatccaccctgtctgtgcagaggtattcacaacattgtctgtgaccaagcgctctggggcaagcatcctccaggctggctgctgaagttaagccccggtgtggatgctgttgccaagactgcaaaccactggctcgtttccgtgccccaatccaaggcgaatttttctagagggttcttgggctcttggcacctgcgtgtcctgtgcttaccaccgcccaaggcccccttggatctcttggataggagttggtgaatagaaggcaggcagcatcacactggggtcactgacagacttgaagctgacatttggcagggcatcgaagggatgcatccatgaagtcaccagtctcaagcccatgtggtaggcggtgatggaacaactgtcaaatcagttttagcatgacctttccttgtggattttcttattctcgttgtcaagttttctagggttgaatttttttcttatttctccatggtgttaatgatattagagatgaaaaacgttagcagttgatttttgtccaaaagcaagtcatggctagagtatccatgcaaggtgtcttgttgcatggaagggatagtttggctcccttggaggctatgtaggcttgtcccgggaaagagaactgtcctgcagctgaaatggactgttctttactgacctgctcagcagtttcttctctcatatattcccaaaacaagtacatctgcgatcaactctagccaaatttgcccctgtgtgctacatgatggatgattattattttaaggtctgtttaggaagggaaatggctacttggccagccattgcctggcatttggtagtatagtatgattctcaccattatttgtcatggaggcagacatacaccagaaatgggggagaaacagtacatatctttctgtctttagtttattgtgtgctggtctaagcaagctgagatcatttgcaatggaaaacacgtaacttgtttaaaagtttttctggtagctttagctttatgctaaaaaaaataatgacattgggtatctatttctttctaagactacattagtaggaaaataagtcttttcatgcttatgatttagctgttttgtggtaattgctttttaaaggaagttattaatatcataagttattattaatattttgaacacaggtggatgtgaaggattttcatttaaaaaccaagtggttttgactttttctgttgaatgaacaactgtgccttgtggaatttttgcagaagtgtttatgctttgttagcatttcaacttgcattattataaagaggtattaatgcctcagttatgtgtttgtcaatgtactggctgaggattctatctcagctgtcttttctaactgtgtaggttgagttttgaacacgtgcttgtggacatcaggcctcctgccagcagttcttgaagcttctttttcattcctgctactctacctgtatttctcaattgcagcactgagtggtcaaaatacatttctgggccacctcagggaacccatgcatctgcctggcatttaggcagcagagcccctgaccgtcccccacagggctctgcctcacgtcctcatctcatttggctgtgtaaagaaatgggaaaagggaaaaggagagagcaattgaagcagttgaccatattcagnnnnnnnnnnnnnnnnnnnnnnnnnnnnnnnctccaagtccaccagtctctgaaattataacagtaggcggtatgagataatcaagcctaatcatgttgtgattctcttttcttagtggagtggaatgttctatccccacaagaaggattatatcttatagacttgtcttgttcagattctgtatttacccattttattgaaacatatactaagttcatgtatttttgttacaaatcttctg

SEQ ID NO: 183508 - DNA, 2029 bp, Homo Sapiens
gcactccggcatttttcttgcaaagcgaaaggtggtggagtcctgaaggagggcctgatgtcttcatcattctcaaattcttaggacggtcgggccctggaaggaacgctctcggaattggccgcggaaaccgatctgcccgttgtgtttgtgaaacagagaaagataggcggccatggtccaaccttgaaggcttatcaggagggcagacttcaaaagctactaaaaatgaacggccctgaagatcttcccaagtcctatgactatgaccttatcatcattggaggtggctcaggaggtctggcagctgctaaggaggcagcccaatatggcaagaaggtgatggtcctggactttgtcactcccacccctcttggaactagatggggtctcggaggaacatgtgtgaatgtgggttgcatacctaaaaaactgatgcatcaagcagctttgttaggacaagccctgcaagactctcgaaattatggatggaaagtcgaggagacagttaagcatgattgggacagaatgatagaagctgtacagaatcacattggctctttgaattggggctaccgagtagctctgcgggagaaaaaagtcgtctatgagaatgcttatgggcaatttattggtcctcacaggattaaggcaacaaataataaaggcaaagaaaaaatttattcagcagagagatttctcattgccactggtgaaagaccacgttacttgggcatccctggtgacaaagaatactgcatcagcagtgatgatcttttctccttgccttactgcccgggtaagaccctggttgttggagcatcctatgtcgctttggagtgcgctggatttcttgctggtattggtttagacgtcactgttatggttaggtccattcttcttagaggatttgaccaggacatggccaacaaaattggtgaacacatggaagaacatggcatcaagtttataagacagttcgtaccaattaaagttgaacaaattgaagcagggacaccaggccgactcagagtagtagctcagtccaccaatagtgaggaaatcattgaaggagaatataatacggtgatgctggcaataggaagagatgcttgcacaagaaaaattggcttagaaaccgtaggggtgaagataaatgaaaagactggaaaaatacctgtcacagatgaagaacagaccaatgtgccttacatctatgccattggcgatatattggaggataaggtggagctcaccccagttgcaatccaggcaggaagattgctggctcagaggctctatgcaggttccactgtcaagtgtgactatgaaaatgttccaaccactgtatttactcctttggaatatggtgcttgtggcctttctgaggagaaagctgtggagaagtttggggaagaaaatattgaggtttaccatagttacttttggccattggaatggacgattccgtcaagagataacaacaaatgttatgcaaaaataatctgtaatactaaagacaatgaacgtgttgtgggctttcacgtactgggtccaaatgctggagaagttacacaaggctttgcagctgcgctcaaatgtggactgaccaaaaagcagctggacagcacaattggaatccaccctgtctgtgcagaggtattcacaacattgtctgtgaccaagcgctctggggcaagcatcctccaggctggctgctgaggttaagccccagtgtggatgctgttgccaagactgcaaaccactggctcgtttccgtgcccaaatccaaggcgaagttttctagagggttcttgggctcttggcacctgcgtgtcctgtgcttaccaccgcccaaggcccccttggatctcttggataggagttggtgaatagaagcagcagcatcacactggggtcactgacagacttgaagctgacatttggcaggcatcgaaggatgcatccatgaagtcaccagtctcaagcccatgtggtagcggtgatggacaactgtcaaatcagttta

SEQ ID NO: 183509 - DNA, 2081 bp, Homo Sapiens
ttggatacccggctcccagttttgggatgcatccaaaactttgagaactctccttgaggaagaatattttagggaaaagctaagtgatggcattggggtgatgttaccccaggtgcttaaaggtatgacttcagagtctgattccattgggttgacaccaggagagaaaagtgaattggccctctctgctctaggtggttgtgtcttctacctcaaaaaatgccttattgatcaggagcttttatcaatggctaattttgaagaatatattcccttggattctgacacagtcagcactacaagatctggtgctatcttcaccaaagcctatcaacgaatggtgctagatgcagtgacattaaacaacttggagatttttctgaatggaacaaatggttctactgaaggaaccctactagagagggttgatacttgccatactccttttggtaagcggctcctaaagcaatggctttgtgccccactctgtaaccattatgctattaatgatcgtctagatgccatagaagacctcatggttgtgcctgacaaaatctccgaagttgtagagcttctaaagaagcttccagatcttgagaggctactcagtaaaattcataatgttgggtctcccctgaagagtcagaaccacccagacagcagggctataatgtatgaagaaactacatacagcaagaagaagattattgattttctttctgctctggaaggattcaaagtaatgtgtaaaattatagggatcatggaagaagttgctgatggttttaagtctaaaatccttaagcaggtcatctctctgcagacaaaaaatcctgaaggtcgttttcctgatttgactgtagaattgaaccgatgggatacagcctttgaccatgaaaaggctcgaaagactggacttattactcccaaagcaggctttgactctgattatgaccaagctcttgctgacataagagaaaatgaacagagcctcctggaatacctagagaaacagcgcaacagaattggctgtaggaccatagtctattgggggattggtaggaaccgttaccagctggaaattcctgagaatttcaccactcgcaatttgccagaagaatacgagttgaaatctaccaagaagggctgtaaacgatactggaccaaaactattgaaaagaagttggctaatctcataaatgctgaagaacggagggatgtatcattgaaggactgcatgcggcgactgttctataactttgataaaaattacaaggactggcagtctgctgtagagtgtatcgcagtgttggatgttttactgtgcctggctaactatagtcgagggggtgatggtcctatgtgtcgcccagtaattctgttgccggaagataccccccccttcttagagcttaaaggatcacgccatccttgcattacgaagactttttttggagatgattttattcctaatgacattctaataggctgtgaggaagaggagcaggaaaatggcaaagcctattgtgtgcttgttactggaccaaatatggggggcaagtctacgcttatgagacaggctggcttattagctgtaatggcccagatgggttgttacgtccctgctgaagtgtgcaggctcacaccaattgatagagtgtttactagacttggtgcctcagacagaataatgtcaggtgaaagtacattttttgttgaattaagtgaaactgccagcatactcatgcatgcaacagcacattctctggtgcttgtggatgaattaggaagaggtactgcaacatttgatgggacggcaatagcaaatgcagttgttaaagaacttgctgagactataaaatgtcgtacattattttcaactcactaccattcattagtagaagattattctcaaaatgttgctgtgcgcctaggacatatggcatgcatggtagaaaatgaatgtgaagaccccagccaggagactattacgtttcctctataaattcattaagggagcttgtcctaaaagctatgggctttaatgcagcaagcttgctatctcccagaggaagttattc

SEQ ID NO: 183510 - DNA, 2272 bp, Homo Sapiens
  misc_feature (742)..(988): n is a, c, g, or t
  misc_feature (991)..(1045): n is a, c, g, or t
  misc_feature (1621)..(1645): n is a, c, g, or t
ctttgtacaaaaaagttggattgaatagcattaaaaataccctcccttttacagtgggaaggatgcttagagactgccagttcttttggttttataatgagggaacagtcatggagcagggatttggctgcctaaggtcatactgctagttaataacaaggaaggttagctctcaggcctccagggttctttcctctaaactaggtttattaaagtagtatactaagtataaatgagttggaataattctggtaaaaaatatatatggttttaaataatttggtaaacttagcacctaataaatccaataaatatttgttgaaaaaacagaagcaataaaaactgatagcttcttttaaccatttgtatagctaaactttttagcatgataagaaggcattttcatgactggtttctttttaactgagtatctttgattctcttaaaatttgtatgacagaagtttttgcatgcagatttcatcacaaatatatagtcccttcacctatgtgccccttattttcccaaatgacttttaatttatggattgtctactagtagaattctattcctaaatcaattaagaaggatcctgtcctcataatatctcaaatactttatacaattatacaatcttttaaataaaacctcttcttttacttttcattagctcatttttccacttaaaaaaataggatgagaaagccttgggtacagagatataaaaatggcaagtaggtgnnnnnnnnnnnnnnnnnnnnnnnnnnnnnnnnnnnnnnnnnnnnnnnnnnnnnnnnnnnnnnnnnnnnnnnnnnnnnnnnnnnnnnnnnnnnnnnnnnnnnnnnnnnnnnnnnnnnnnnnnnnnnnnnnnnnnnnnnnnnnnnnnnnnnnnnnnnnnnnnnnnnnnnnnnnnnnnnnnnnnnnnnnnnnnnnnnnnnnnnnnnnnnnnnnnnnnnnnnnnnnnnnnnnnnnnnnnnnnnnnnnnnnnccnnnnnnnnnnnnnnnnnnnnnnnnnnnnnnnnnnnnnnnnnnnnnnnnnnnnnnnttatactcaactattttgaactccctttaactaatctcaaatccacaataaatttccttggattttctagtatctgtagaatagtatgcagaatttacaagtagaattatttgttggaaattgagagttcaagaaaagttaccatgcatacttaatacctttttatagggaaaggccagcagcaatccctatagaaatcaaaagcattgatgatacttcaaattttgatgacttccctgaatctgatattttacaaccagtgccaaataccacagaaccggactacaaatccaaagactgggtttttctcaattatacctataaaaggtttgaagggttgactcaacgtggctctatccccacctacatgaaagctgggaagttatgaatgaagataacattcacccataaccaagagaactcaggtagctgcatcaccaggcttgcttggcgtagataacaatacactgaaatactcctgaagatggtggtgcttattgactacaagaggaaattctacaggattaggatttctaagactactataggaattggttggcagtgccagctggctcnnnnnnnnnnnnnnnnnnnnnnnnngttaactttattatatgaaggtactggaataaaaggaacagacatccctttctaactgcactgcctacatgcgtattaaggtccattctgcctgtgtgtgctgtggctttgaactgtaacacctctaatcaattcaggagaaacacatatcatttaaagcaacataggctaacctgtaggtaacactgcagtattgatgttttactgcaaatcttatgggtctagataatcagtaaaagccatcttccatagttggtgttagaacattgccctattggtttggacatctgtagaatatatatgaagacaatttctgtaatggttttaagagatttaaaaagaaattcactggttctttacaaaatagaatttatcatcaagttattacacaaacttcacagtaaggagtgacaagtttataataaggaagacaaagtttaacaccttcactcaagcactccactaatatatttacgttgcattcagaaatactgatgaccttcatatacgtagtctgtatactcatagggagatgtactgtattatataacatgtaaagttgatttttcttgtgacaagagaacttctttttttatcagaggacatggcattattttaatttgatta

SEQ ID NO: 183511 - DNA, 1878 bp, Homo Sapiens
  misc_feature (1661)..(1685): n is a, c, g, or t
ttggggccgcccggccggctgcggtccgtgcggaggctgagccggccgcgggcgcgaccggaggcagtttccgttactatggcaatgacggcagggactacaacaacctttcctatgagcaaccatacccgggaaagagtgactgtagccaagctcacattggagaatttttatagcaacctaattttacagcatgaagagagagaaaccaggcagaagaaattagaagtggccatggaagaagaaggattagcagatgaagagaaaaagttacgtcgatcacaacacgctcgcaaagaaacagagttcttacggctcaaaaggaccagacttggcttggatgactttgagtctctgaaagttataggaagaggagcttttggagaggtgcggttggtccagaagaaagatacaggccatatctatgcaatgaagatattgagaaagtctgatatgcttgaaaaagagcaggtggcccatatccgagcagaaagagatattttggtagaagcagatggtgcctgggtggtgaagatgttttacagttttcaggataagaggaatctttatctaatcatggaatttctccctggaggtgacatgatgacattgctaatgaagaaagacaccttgacagaagaggaaacacagttctacatttcagagactgttctggcaatagatgcgatccaccagttgggtttcatccatcgggatattaagccagacaaccttttattggatgccaagggtcatgtaaaattatctgattttggtttatgtacgggattaaagaaagctcacaggactgaattttatagaaatctcacacacaacccaccaagtgacttctcatttcagaacatgaactcaaagaggaaagcagaaacttggaagaagaacaggagacaactggcatattccacagttgggacaccagattacattgctccagaagtattcatgcagactggttacaacaaattgtgtgactggtggtctttgggagtgattatgtatgaaatgctaataggatatccacctttctgctctgaaacacctcaagaaacatacagaaaagtgatgaactggaaagaaactctggtatttcctccagaggtacctatatctgagaaagccaaggacttaattctcagattttgtattgattctgaaaacagaattggaaatagtggagtagaagaaataaaaggtcatcccttttttgaaggtgtcgactgggagcacataagggaaaggccagcagcaatccctatagaaatcaaaagcattgatgatacttcaaattttgatgacttccctgaatctgatattttacaaccagtgccaaataccacagaaccggactacaaatccaaagactgggtttttctcaattatacctataaaaggtttgaagggttgactcaacgtggctctatccccacctacatgaaagctgggaagttatgaatgaagataacattcacccataaccaagagaactcaggtagctgcatcaccaggcttgcttggcgtagataacaatacactgaaatactcctgaagatggtggtgcttattgactacaagaggaaattctacaggattaggatttctaagactactataggaattggttggcagtgccagctggctcnnnnnnnnnnnnnnnnnnnnnnnnngttaactttattatatgaaggtactggaataaaaggaacagacatccctttctaactgcactgcctacatgcgtattaaggtccattctgcctgtgtgtgctgtggctttgaactgtaacacctctaatcaattcaggagaaacacatatcatttaaagcaacataggctaacctgtaggtaacactgcagta

SEQ ID NO: 183512 - DNA, 3268 bp, Homo Sapiens
  misc_feature (166)..(190): n is a, c, g, or t
  misc_feature (2687)..(2720): n is a, c, g, or t
ttggagagaactcaggtagctgcatcaccaggcttgcttggcgtagataacaatacactgaaatactcctgaagatggtggtgcttattgactacaagaggaaattctacaggattaggatttctaagactactataggaattggttggcagtgccagctggctcnnnnnnnnnnnnnnnnnnnnnnnnngttaactttattatatgaaggtactggaataaaaggaacagacatccctttctaactgcactgcctacatgcgtattaaggtccattctgcctgtgtgtgctgtggctttgaactgtaacacctctaatcaattcaggagaaacacatatcatttaaagcaacataggctaacctgtaggtaacactgcagtattgatgttttactgcaaatcttatgggtctagataatcagtaaaagccatcttccatagttggtgttagaacattgccctattggtttggacatctgtagaatatatatgaagacaatttctgtaatggttttaagagatttaaaaagaaattcactggttctttacaaaatagaatttatcatcaagttattacacaaacttcacagtaaggagtgacaagtttataataaggaagacaaagtttaacaccttcactcaagcactccactaatatatttacgttgcattcagaaatactgatgaccttcatatacgtagtctgtatactcatagggagatgtactgtattatataacatgtaaagttgattttcttgtgacaagagaacttctttttttaacaagaggacatggcattattttaatttgattatggtgagttgaatttaagacatgaccatgaaggctgcttgtagaattagtgtatttttattaaactatttttttaaatgtcaaacttctatcatgtaaatggacttatagagaacaaaaagctatttactttggttttctagaaagttgttacatatcatggctggttaacttttatttcttttgatgaaaatttttcctttgatagtacttgtattattgtgccattattttcttatgctccaaatgtaccaaagatcttgaacagagtggatgttcacaactgagtagaattttcctttcctgtgggcatgctgtgttcagacctgacagatctttgatagaggtcagcttattaaagggcaatattgttcttgtttagctacatcactgtggtgaatatagatggaattaaggaagtaaatgcaggccagggggttgtgatgagaggataggggagataatatcagcatcaaattctttgggtatctctctaagaattaaataatcttttctagcttaatattttaattctaattcaaacaactctgaggttttggtttcattagtaatagttgaggaataatatactagcaaagaatggcctaatgtttgtcataactgttaatggatgaaattttttaaagatacaaccatgataaccattataaatgatctatgatcaaaatctaaagtgatgaattatttgtaggaatgtcttcctaatggggaagaattgcataggagcattatgcaaatctacacaagcttttataaatgttgctgctgggtagctccacagtgtttcataaggccatcctgtttcccccaactcccccatttttggtttgtttctttttaaatatttgttgagtacttacgtgtttatctaacagttcacttccatttttctagtctggattttttgagtatttaggaaagagagctattaaaaactctggggatttctcaatgtgactaactctaatttttctaattataactgcctttaattaacataatattaacttttgctgaggtttatgagattttctcaccccacatcgctcccctttttttaaaaaggactgttttgctagtgtgataatgaataggtaagatatgagataattgcaacattgtctagttctagtatggtaactattcttgaaatggtattgaaaaataccgttaattcaaattgacagagattgataaaaagaaactgatttacctaagtttactttttaattgcataatagagcattttttgttttgagttccctcattcttattaccagaaagagcttgcaaatagttttactttcttggcactggaagggtagttctggaaagctactttgttgagagtctcattcttccctggagttaatagagtgattcacaatctttggggttttctcctcatcaaaagcatttcttaagtgcctatctaaaagcaattaaagactgtgtctgccctttagaagctaagaatttgattcatgatgcaaattaactagataatttgcaaagtacccttgagattgaattttctctattatatatttcccatatttcaggtgaataatttaatttaaatgacaaaaccctatctagtcaactgggcataatgacattttctttaaattagactctattttgaattaaaagagttttattataaaccgtgtgtttttggtttttctaagtatatagaaagcttgtataattcagatttatcaatttcctgatttaatgtagactttgacttttttattaaaaacctttgtattaaagcaagttatgttatttttcttttatgcatttattactaacatagctttaaatctttaaatgtattgaagcannnnnnnnnnnnnnnnnnnnnnnnnnnnnnnnnnccagccacttctgaatacaatatgtagctgatttaataagctagttagtgaatggaaaataagtgtggagtattaaaaatgttctttggttggtaaggcctaagatagggtttcatttatttctatactttttctgttttttaaacacctgcatatttttatgtaaatctctaaatttaaaatattttaagtacatttatttttggtgttttattgtataaaaccttagacaatcaatcagtcagtctttactgacaggagcagcagctatctgtcttttgctgatctacaaataaatgaattgagaatttagtccatagaggtccctggctaccaaacacattctcctttgaattgttaaaattcagaacattcaaaataactgttttgctacaacccatgattattttcctgttgtgtttatttaaatttactttctctttagaagtgcacttatttctgaaaatcttaatgaaacaaacgcttagaacaatataaatatgagacacttgggactactagagatatttagattttatgaaaaaatg

SEQ ID NO: 183513 - DNA, 698 bp, Homo Sapiens
ggagggtgcagggggagatgtcatcatccgggggggcgcccccaccctccgcaccagctgcagcttcttggccaggaagctgcggggtgagcgatgggtgctcccggagctgccaccgtggttgctgaggaaggacgtgtccccgaagacatccccgccacggcccacatgcatggtgtggcggaagtccccgagtgggtggctgatcatgtctgcagtcagccgcctctttccctgtgaactggacacccagcccacaggcgagagcttgcccaggctcatggtggcggcgcctctgcccccctgggggccgggcatcagctctggctgctcacagctgctagtccatgcctaccaggggccgggggagggaggtgggctgggcttgggatggctgctcagctcctttgccctggcggaagctgtaaatggcactctcctaaggtgaggtccccaaatgcagaggctgtggggggttcatggctcgtctctcccaggggcccggctcccagcccctcagaagcagctatagatgttcaagcgcagagaaagcacccccgaggtggtcggcaactctcctgcccagaggtggagacctggctccgcgagccccgggggcgcgggacgagggcggactcgtcgtctgcagcggcggcggccgcgcgtcccggctggcagcccgggagagtcgctgccaa

SEQ ID NO: 183514 - DNA, 1914 bp, Homo Sapiens
ttggggtcagaatcgccacctgaggcctgaatatcagcgtaagatagtgtccaaagcagtcttaagaagaggtcccattaccccactctttccgccctaatggaggtctccagtttaggtaaataaaaggattgttgggaggtggagggaaagaactactatttccaacatgcattgcggaacgaaaggccttggccacactgttccttggaaactgtagtcttatggagaggaacatccaataccaaagcgggcacaattctcacggaaatccagtggatagattggagacctccgcgggcttatacatgtcaacagtaatggattggagtgttgttatgttctcctatcttgagagcagagactaggccaaaaaaagatacctacaactcctaggaagactacgattcccatccagccccacgagtctcgggcaagtagtcctctaagcctcacagcatggaaccacaggttactctaaatgtgacttttaaaaatgaaattcaaagctttctggtttctgatccagaaaatacaacttgggctgatatcgaagctatggtaaaagtttcatttgatctgaatactattcaaataaaatacctggatgaggaaaatgaagaggtatccatcaacagtcaaggagaatatgaagaagcgcttaagatggcagttaaacagggaaaccaactgcagatgcaagtccacgaagggcaccatgtcgttgatgaagccccacccccagttgtaggagcaaaacgactagctgccagggcagggaagaagccacttgcacattactcttcactggtgagagtcttgggatcagacatgaagaccccagaggatcctgcagtgcagtcgtttccacttgttccatgtgacacagaccagcctcaagacaagcccccagactggttcacaagctacctggagacgttcagagaacaagtggttaacgaaacggttgagaagcttgaacagaaattacatgaaaagcttgtcctccagaacccatccttgggttcttgtccctcagaagtctcaatgcctacttcagaagaaacattgtttttgccagaaaaccagttcagctggcatattgcttgcaacaactgccaaagaaggattgttggtgtccgctaccagtgtagcctatgcccatcctacaatatctgtgaagattgtgaagcagggccatatggccatgacactaaccacgtcctgctgaagttgcggagacctgttgtgggctcctctgaaccgttctgtcactcaaagtactctactcctcgtcttcctgctgctctggaacaagtcaggctccagaaacaggttgataagaactttcttaaagcagaaaagcaaaggttgcgagctgagaagaaacaacgtaaagcagaggtcaaggaacttaaaaagcagcttaaactccataggaaaattcacctgtggaattcaatccatggactccagagccccaagtctcctttaggccgacctgagagcttgctccagtctaataccctgatgctccctttgcagccctgtacctccgttatgccaatgctcagtgcagcatttgtggatgagaatttgcctgatgggactcaccttcagccaggaaccaagtttatcaaacactggaggatgaaaaatacaggaaatgtaaagtggagtgcagacacaaagctcaagttcatgtggggaaacctgactttggcttccacagaaaagaacgatgttgtggttctctgcctcaaggccggccatgtgggagttgtatctgtggagttcattgccccagccttggagggaacgtatacttcccattggtcgtctttctcacaaaggccagcaatttgggcctcgggtctggtgcagtatcatagtagatcctttcccctccgaaga

SEQ ID NO: 183515 - DNA, 2559 bp, Homo Sapiens
  misc_feature (2440)..(2458): n is a, c, g, or t
ttggatagatcttcagcaattccagacttcagggatccacaaaaagtgaaagagtttctacaagaaaagtatgaaaagaaaagatggtatgtcccgccagaacaagccaaagtcgtggcatcagttcatgcatctatttcagggtcctctgccagtagcacaagcagcacacctgaggtcaaaccactgaaatctcttttaggggattctgcaccaacactgcacttaaataagggcacacctagtcagtccccagttgtaggtcgttctcaagggcagcagcaggagaagaagcaatttgaccttttaagtgatctcggctcagacatctttgctgctccagctcctcagtcaacagctacagccaattttgctaactttgcacatttcaacagtcatgcagctcagaattctgcaaatgcagattgggcaaactttgatgcatttggacagtctagtggttcgagtaattttggaggtttccccacagcaagtcactctccttttcagccccaaactacaggtggaagtgctgcatcagtaaatgctaattttgctcattttgataacttccccaaatcctccagtgctgattttggaaccttcaatacttcccagagtcatcaaacagcatcagctgttagtaaagtttcaacgaacaaagctggtttacagactgcagacaaatatgcagcacttgctaatttagacaatatcttcagtgccgggcaaggtggtgatcagggaagtggctttgggaccacaggtaaagctcctgttggttctgtggtttcagttcccagtcagtcaagtgcatcttcagacaagtatgcagctctggcagaactagacagcgttttcagttctgcagccacctccagtaatgcgtatacttccacaagtaatgctagcagcaatgtttttggaacagtgccagtggttgcttctgcacagacacagcctgcttcatcaagtgtgcctgctccatttggagctacgccttccacaaatccatttgttgctgctgctggtccttctgtggcatcttctacaaacccatttcagaccaatgccagaggagcaacagcggcaacctttggcactgcatccatgagcatgcccacgggattcggcactcctgctccctacagtcttcccaccagctttagtggcagctttcagcagcctgcctttccagcccaagcagctttccctcaacagacagctttttctcaacagcccaatggttttgcagcatttggacaaacaaagccagtagtaaccccttttggtcaagttgcagctgctggagtatctagtaatccttttatgactggtgcaccaacaggacaatttccaacaggaagctcatcaaccaatcctttcttatagccttatatagacaatttactggaacgaacttttatgtggtcacattacatctctccacctcttgcactgttgtcttgtttcactgatcttagctttaaacacaagagaagtctttaaaaagcctgcattgtgtattaaacaccaggtaatatgtgcaaaactgagggctccagtaacaccttctaacctgtgaattggcagaaaagggtagcggtatcatgtatattaaaattggctaatattaagttattgcagataccacattcattatgctgcagtactgtacatatttttcttagaaattagctatttgtgcatatcagtatttgtaactttaacacattgttatgtgagaaatgttactggggaaatagatcagccacttttaaggtgctgtcatatatcttggaatgaatgacctaaaatcattttaaccattgctactggaaagtaacagagtcaaaattggaaggttttattcattcttgaatttttcctttctaaagagctcttctatttatacatgcctaaattcttttaaaatgtagagggatacctgtctgcataataaagctgatcatgttttgctacagtttgcaggtgaaaaaaaataaatattataaaatatgctattgtttttgtgttcttgctgcaatgcctttaccaaagtggccttaaatatgagtagtgaattgagaacatcttgaattcttaaaagacttcttagtgactttttataaaaaggccatgtagaaaatttattaaaactactatgactgctacattcaggaatatgccagtggtaaagcatttaaatgtagcttgtcagatttaccataatcctactaatttctttgcagcttattaattttgtgaaatttgtatatatgaagaatttgcatgtatgtgtatttacaaatttttctaagtatcttgaattctcagactgcaaaaggcctattttaactattgattttttttaaaaaaaattgtctttgaatgtattggaagtagacatgcattaactgtgacattattgcacctcagnnnnnnnnnnnnnnnnnnngggcaaactgatattatctataggatatttgtttatgtttgtttttgggggaaagaaactggaactcagtgttaccttaaagttacggaatactttgtttt

SEQ ID NO: 183516 - DNA, 1641 bp, Homo Sapiens
  misc_feature (89)..(154): n is a, c, g, or t
  misc_feature (719)..(791): n is a, c, g, or t
  misc_feature (892)..(960): n is a, c, g, or t
  misc_feature (989)..(1011): n is a, c, g, or t
ttggagtcaataaagagagtgccgtatttcgcagattggagctgagctgtggctgccagaagatagcgaacgaatggaaactgaaagtnnnnnnnnnnnnnnnnnnnnnnnnnnnnnnnnnnnnnnnnnnnnnnnnnnnnnnnnnnnnnnnnnncggtcacgagttaaacaggtgcttgcagatattgctaagcaagtggacttctggtttggggatgcaaatcttcacaaggatagatttcttcgagaacagatagaaaaatctagagatggatatgttgatatatcactacttgtgtcttttaacaaaatgaaaaaattgactactgatgggaagttaattgccagagcattgagaagttcagctgttgtagagcttgatttggaaggcaccagaatccggaggaaaaaacctctgggggaaagaccaaaggatgaggatgaacgcacagtgtatgtggagttacttcccaaaaatgttaatcacagctggattgaaagagtatttgggaaatgtggcaatgttgtttatataagtataccacattataagtctactggagatccaaagggatttgcgtttgtggaatttgaaacaaaagaacaagcagcaaaagcaattgagtttcttaacaacccaccagaagaagcactaagaaaacctggcatatttcctaaaacagtgaaaaataagcccattccagccttaagagttgtgnnnnnnnnnnnnnnnnnnnnnnnnnnnnnnnnnnnnnnnnnnnnnnnnnnnnnnnnnnnnnnnnnnnnnnnnnacatggacacaagcaacaccagcatcagtaaaatgaaaagatccagacccacatctgagggctctgacattgagtccactgaaccccaaaagcagtgctcnnnnnnnnnnnnnnnnnnnnnnnnnnnnnnnnnnnnnnnnnnnnnnnnnnnnnnnnnnnnnnnnnnnnncatggacacaagcaacaccagcatcagtnnnnnnnnnnnnnnnnnnnnnnncgggacagagttgaagcatctagcttacctgaagtcagaacagggaagaggaagagaagcagctctgaagatgcagaatccctagctccccgatcaaaagtaaagaaaattattcagaaagacatcattaaggaagcatcagaagcttccaaggaaaatagagatatagaaatctctactgaagaggaaaaggatactggagatctaaaagatagctctctcttgaaaacaaaaaggaaacataagaaaaaacataaagagagacataaaatgggagaagaagttataccattaagagtgctatcaaagagcgaatggatggatttgaaaaaagagtatttagcgctacaagaagctagcatggcttctttaaaaaaaacaatatcccaaataaaatcagagtcagagatggaaacagacagtggagtacctcaaaacactggaatgaaaaatgaaaaaacagccgacagggaagagtgtcgcacgcaggagaaagttaatgcaacaggaccacagttcgtgagtggagtgagttgtgaagatcattagcacagagcctctacctggctggaaacaagtccgggctactttggcagcaatctcagaagttctttatgttgatttgctaga

SEQ ID NO: 183517 - DNA, 1455 bp, Homo Sapiens
  misc_feature (1278)..(1303): n is a, c, g, or t
cttttaaaagccaactttgtacaaaaaagttggggtttccaaagcccccatcttacaatgtagctacaacactgcccagttatgatgaagcggagaggaccaaggctgaagctactatccctttggttcctgggagagatgaggattttgtgggtcgggatgattttgatgatgctgaccagctgaggataggaaatgatgggattttcatgttaacttttttcatggcattcctctttaactggattgggtttttcctgtctttttgcctgaccacttcagctgcaggaaggtatggggccatttcaggatttggtctctctctaattaaatggatcctgattgtcaggttttccacctatttccctggatattttgatggtcagtactggctctggtgggtgttccttgttttaggctttctcctgtttctcagaggatttatcaattatgcaaaagttcggaagatgccagaaactttctcaaatctccccaggaccagagttctctttatttattaaagatgttttctggcaaaggccttcctgcatttatgaattctctctcaagaagcaagagaacacctgcaggaagtgaatcaagatgcagaacacagaggaataatcacctgctttaaaaaaataaagtactgttgaaaagatcatttctctctatttgttcctaggtgtaaaattttaatagttaatgcagaattctgtaatcattgaatcattagtggttaatgtttgaaaaagctcttgcaatcaagtctgtgatgtattaataatgccttatatattgtttgtagtcattttaagtagcatgagccatgtccctgtagtcggtagggggcagtcttgctttattcatcctccatctcaaaatgaacttggaattaaatattgtaagatatgtataatgctggccattttaaaggggttttctcaaaagttaaacttttgttatgactgtgtttttgcacataatccatatttgctgttcaagttaatctagaaatttattcaattctgtatgaacacctggaagcaaaatcatagtgcaaaaatacatttaaggtgtggtcaaaaataagtctttaattggtaaataataagcattaattttttatagcctgtattcacaattctgcggtaccttattgtacctaagggattctaaaggtgttgtcactgtataaaacagaaagcactaggatacaaatgaagcttaattactaaaatgtaattcttgacactctttctataattagcgttcttnnnnnnnnnnnnnnnnnnnnnnnnnnttattttccttttgtctcctggtgattaggccaaagtctgggagtaaggagaggattaggtactttaggagcaaagaaagaagtagcttggacttttgagatgatccctaacatactgtactacttgcttttacaatgtgttagcagaaacc

SEQ ID NO: 183518 - DNA, 890 bp, Homo Sapiens
cccgccgctctgctcctctgaggtaatgatctctcccacgtactccatgacgaagctgttcttgcgaatcttctaccagggtgcggacgccccagccacgcccatcatccgtgcggaagatgcagaggtcatatcggatacccttctgtaccacacgatttgggcagtcatagccgcagcggcagcgggagttgcactcgtagatgggcagcccggctcgaagccgcacctggccctggtcattgtaggcaaacttgtgcagtgacgcccccgggcagcagcctccagtgggtgcccacagacagtcctggcactcgcagcccacagccacctggttgagggtgatgccctcaccaacacggtactcattgatgtacacgaaggcccgcggagggccgtccaggtccacctcattctctacagtgatgcgtcccagatggctgcgcttggcattgagctcctgctcccagcgacggagcgcccgcctctgcttggccttctgcaccaggtagttggccaagcttgggtccaggtgccggggggtctttgaccggtggtgccgccggagcagctccctttctaagtccttgtggaactgcttgaggatacgcacacacttgagattctgccgtggctcccaggtgctctctgagtctggatatccacgccatttcaccaggtaatattcctgttcgcggatcttcttgtaatcgcacaggtactcgacttcaaagtcatagaggttcctcttagagataccgagggcagggcaggagagcttggccaggcggcacaggtcctgcagctgattccaagaagacttgcaacacacgctgcagccttttaaattttccgccatctttccccacggctaaggacattcgggccaa

SEQ ID NO: 183519 - DNA, 1180 bp, Homo Sapiens
ttggagaaaacagactaggtctctttcttgttacttgaactctgcataaaatacagaagtctttcagacatattaagctccttttctcaactggcctggaaacaatttgagggcaggaattacttcctgtgcttagtatttaattataggggcagaataaataattggttctgcaaacattttgcaacagtaattctggatgatgaatgaggggctccattaacatgaaaaagtgctgggattacaggcatgagccacggcgcccggccagtaacttatttttttaatgtataccttttgttccctttgaattctaccatgtgcaagaattacctctttaacatggaacaaccaggtcaaaatgtatatacatctttaaaattgaccagtagctactttgacttgcctaaaaacgtaccagtgcatctgctcagctgcaccgttggtgggtgcctgtttccccggcccctccctttggctaacagcacatcatggaatcacttcacaccctccttgtcggtgaccaagcatggtgatggcgcagccctttcctgtttaaacggcacgggactctctttgttgcaggccagacgggtgcagggaacaactgggcgaaagggcactacacggagggcgcggagctggtggacgcagtgctggacgtggtgcggaaggagtgcgagcactgcgactgcctgcagggcttccagctcacgcactcgctgggcggcggcacgggctcaggcatgggcacgctgctcatcagcaagatccgtgaggagttcccggaccgcatcatgaacaccttcagcgtcatgccctcgcccaaggtgtcggacacggtggtggagccctacaatgccacactgtcggtgcaccagctggtggagaatacagacgagacctactgcatcgacaacgaggcgctctatgacatctgcttccgcactctgaagctgacaacgcccacctacggggacctcaaccacctggtgtccgccaccatgagtggggtcaccacctcgctgcgcttcccgggccagctcaatgctgacctgcgcaagctggcggtgaacatggtgcccttcccgcgcctgcacttcttcatgcctgggcttcgcgcccctcaccagccgcggcagccagcagtaccgggccctgaccgtgcccgagctcaccc

SEQ ID NO: 183520 - DNA, 988 bp, Homo Sapiens
  misc_feature (249)..(261): n is a, c, g, or t
  misc_feature (274)..(330): n is a, c, g, or t
atgagcaatgcttttcttataatgccaactttgtacaaaaaagttgggagcaacatgaacgacctcgtctctgagtatcagcagtaccaggatgccaccgcagaagaggaggaggatttcggtgaggaggccgaagaggaggcctaaggcagagcccccatcacctcaggcttctcagttcccttagccgtcttactcaactgcccctttcctctccctcagaatttgtgtttgctgcctctatcttgnnnnnnnnnnnnncttctgggggggnnnnnnnnnnnnnnnnnnnnnnnnnnnnnnnnnnnnnnnnnnnnnnnnnnnnnnnnntctcctctctctttccactctgggaaacctaggtttctgccattctgggtgaccctgtatttctttctggtgcccattccatttgtccagttaatacttcctcttaaaaatctccaagaagctgggtctccagatcccatttagaaccaaccaggtgctgaaaacacatgtagataatggccatcatcctaagcccaaagtagaaaatggtagaaggtagtgggtagaagtcactatataaggaaggggatgggattttccattctaaaagttttggagagggaaatccaggctattaaagtcactaaatttctaagtatgtccatttcccatctcagcttcaagggaggtgtcagcagtattatctccactttcaatctccctccaagctctactctggaggagtctgtcccactctgtcaagtggaatccttccctttccaactctacctccctcactcagctcctttcccctaagcctccagaaacgtcttcttaatccccaccttttcttactcccaaaaaagaatgaacacccctgactctggagtggtgtatactgccacatcagtgtttgagtcagtccccagaggagaggggaaccctcctccatcttttttgcaacatctcatttcttccttttgctgttgcttccccc

SEQ ID NO: 183521 - DNA, 898 bp, Homo Sapiens
ccgcggggcgggatgtcgccacacggccgttttcacgtttttggggatccactccaagaagtagctgctgttcttgttctgcacgttgagcatctgctcgtccacctccttcatggacatgcggccccggaagatggcagccaccgtcaggtagcggccgtggcgcgggtcgcaggcggccatcatgttcttggagtcgaacatctgctgggtgagctcgggcaccgtgagcgcccggtactgctggctgccccggctggtcaggggcgcgaagccgggcatgaagaagtgcaggcgagggaagggcaccatgttcaccgccagcttgcgcaggtctgcgttcagctggcccgggaagcgcaggcaggtggtgaccccgctcatggtggccgacaccaggtggttgaggtccccgtaggtgggggtggtcagcttcagggtgcggaagcagatgtcatacagggcctcgttatcaatggagtaggtttcatctgtgttttccaccagctggtggaccgagagggtggcgttgtagggctccaccaccgtgtctgacaccttgggtgagggcatgacgctgaaggtgttcatgatgcggtctgggtactcttcccggatcttgctgatgagcagggtgcccatcccggaccccgtgccgccccccagagagtgggtcagctggaagccctggagacagtcacagctctctgactccttcctcaccacatccaggaccgagtcgaccagctcggctccctctgtgtagtggcccttggcccagttattcccggctccactctggccgaacacgaagttgtctggtctgaagatctggccgaagggtccagacctgacagagtccatggtgccaggctccagccaacttttttgtacaaag

SEQ ID NO: 183522 - DNA, 1498 bp, Homo Sapiens
ttggctctcagtcctcctagtgcctggtccccgaggaagccaagacctctgccttcctggaggagacaggctatgacacatacgtccacgatgcttatggcctgttccaggagtgcagctcccgcgtcgcctcctggggctggcctctgacccccacacctttggacccccatgagcccgagcgacctttcttcgagggccacttcctccgagtgctgtttgaccgcatgtcccggattctggatcagccatacagcctgaacctgcaggtgacctcggtcctgtcccggcttgccctcttcccccacccccatattcatgagtacctgctggatccgtacatcagcctggcccccggctgcaggagcctattctccgtgttggtgagggtgatcggggacttgatgcagagaatccagagggtaccccagttcccaggcaagctgctcctggtgcgcaagcagttgacgggccaggctcctggggagcagctggaccaccagaccctcctccagggcgtggtggtgctggaggagttctgcaaggagctggctgccattgccttcgtcaagtttcccccacatgatcctcgccagaacgtctccccagccccgggagggcaggtctgagccagcaccagggcggtgggagactcctgtccacacctctgccccagagctgcctcctgcctggcactgccgccacactcccctcctgggatggggcttctgctcccgggctcactcaaggagactgcggcatgttgaccacaccagactgggtttcagggaatgggcatgccaggtgccaaggagccaaacagatggctttccaggcagcaaggtccttggggccttcttggaggagcttgggtgacagccaggtgagcacccagaccccagaccctcatgtgctgtgtgcctggccccttctgtactggccatttgtggccagggccaagcctgtgactcaactccaggggcaagatggggagtgagctgatggctccgagactggtcaggagcccaggccagtgagatggggcctggagccttgtctgtgtcacattaggtaccatgggagctgctgagacctgacattttgtcccctgcctacatggcttggcccatggagaaggagcagtgaatgggatcgtcggggaagcccctcttcctgctctgctcccctggaaactgttgcaaaactcccagccgcctcatggcaaatgcccaaagcatgttccgcacccaggcgggggcccctgctaatgagaaccttggtgcagctgcagccaggaggggagcgggcccaggagccaggctcaagtccagctggttcctctctggcgccttctgaacccgtctcagcaggtccacagcacctgggcagaggtcagagaccagggaggccgggccttgccctcccttctgcccaggcccagtgttcttgataaagacccttctggggagcaagggagctcaggggacagataagggaa

SEQ ID NO: 183523 - DNA, 1207 bp, Homo Sapiens
  misc_feature (248)..(265): n is a, c, g, or t
aaaaaagttaataatttaaattttcactgtgttcaaagaacctcatccctgtaagaagctcccgaatatgccaatagatcctgccactactgacaggagggcagagtaccaaggactctacttatataagagactacaagggaagttgtagttatatttttgttgttaaatccctgtgcatgtgagggcagaagctggtgaaaccaacaacgcagagcatgctctgtcaaacggctcttcatggtttnnnnnnnnnnnnnnnnnntcacaagtcatcttcagagacaacattaaaacataatggaattgaagcctgatacaaaaagtagagaaatatgtacaggaattcacagcccagaaggaaaggggacctcagcaggagccagtggaacccgggctattttacacagctaattttgagacaattcatatttagcacaaaagcagttatagcacaagtaacacttccctcctctggctcccaaataaaaagactcttgtcagtcttctgttaacactgtaatcattcttcaggggagcaggaatacctaagatggtcccaaacattgacacaaattttaatctcaaacagcttcacattctgaggatgacatatctgaagattgccatgatggcagcactgataactccagaaatggggactgtgacaaaccaggccataaaaatgttacgaaagagacgccagtcaacagccttcttggaccggagccagccaacagacacaacagagcccactttacaatgtgttgtactgatgggaaggccaatatttgatgcaatcaccacagtgagggcagatgccagttcaatactgaagccactagagggtgtgatcggtgtcagatccttccccatggtctggataactcttcttccccaaacccacagaccaacacagataccaacaccaccatagagtagaagccatattggtgttgccacttttgaagaaacatctcctgtgtcataaaccaaatataaagcaaccagaggcccaatggcattgctggaagaaacaaagagggcagaagtgacttttcaggcagaactagatcttggcaagacccaatctgctgaatgatctaccaggttgtctaaagtacagctttcaagctcatctggcaaaagggcctttctttctaaagacataaatggaaccccaacatacacaacagaaaaatgccaa

SEQ ID NO: 183524 - DNA, 1665 bp, Homo Sapiens
  misc_feature (318)..(329): n is a, c, g, or t
  misc_feature (385)..(454): n is a, c, g, or t
  misc_feature (1222)..(1239): n is a, c, g, or t
ttggaatattggccttcccatcagtacaacacattgtaaagtaagtgtaatgccaatgtgtgtctttcaaatggttcttctaatatgtagggtttttagttttacttctctgatactttgatttagaaagttttgtgcagttggagtcttgaagagttcataagttatttcttgtgtttattcttatttaagcaattaaatagatattctccccaaataatagaaacattgttttatatacagcttactgtagtttctggctactaacctcttcctttgttactttatcctccctcattgtagtctctttataataannnnnnnnnnnnaatctcaagagtcatttctacttggcaccattatgttttatttatttatgtatgannnnnnnnnnnnnnnnnnnnnnnnnnnnnnnnnnnnnnnnnnnnnnnnnnnnnnnnnnnnnnnnnnnnnntaaataaataaaagcagtatatattcattaaattttagtagtagctgagaaggggaaaagaaatagttcttgtgtccttttactaccgttagtatagattatgattggattttcaaattgccttcattttcccagcttaacctgttgtaaaccagctttcttggactttgtcttgtccaggggtctggggctccttgtccaaacagtctcaggtgtctgtttgccagaataccactggcacttcaataacctgtttccttggtctgcttctcttctagtgggctctgttgtgtctgttggctggctccggtccaagaagctgttgactggcgtctctttcgtaacatttttatggcctggtttggcacagtccccatttctggagttatcagtgctgccatcatggcaatcttcagatatgtcatcctcagaatgtgaagctgtttgagattaaaatttgtgtcaatgtttgggaccatcttaggtattcctgctcccctgaagaatgattacagtgttaacagaagactgacaagagtctttttatttgggagccagaggagggaagtgttacttgtgctataactgcttttgtgctaaatatgaattgtctcaaaattagctgtgtaaaatagcccgggttccactggctcctgctgaggtcccctttccttctgggctgtgaattcctgtacatatttctctactttttgtatcaggcttcaattccattatgttttaatgttgtctctgaagatgacttgtgannnnnnnnnnnnnnnnnnaaaccatgaagagccgtttgacagagcatgctctgcgttgttggtttcaccagcttctgccctcacatgcacagggatttaacaacaaaaatataactacaacttcccttgtagtctcttatataagtagagtccttggtactctgccctcctgtcagtagtggcaggatctattggcatattcgggagcttcttagagggatgaggttctttgaaacacagtgaaaatttaaattagtaacttttttgcaagcagtttattgactgttattgctaaaaaagaagtaagaaagaaaaagcctgttggcaatcttggttatttctttaagatttctggcagtgtggggatggatgaatgaagtggaatgtgaaactttggggcaagttaaatgggacagccttccatgttcatttgtctaccctctt

SEQ ID NO: 183525 - DNA, 1767 bp, Homo Sapiens
gccaactttgtacaaaaaagttggagctgtgttcgcggactcaggtggaaggaatttcttctcttcgttgacgttgctggtgttcactgtttggaattagtcaagtttcgggaatcaccgtcgctgccatcaacatgtcggtcccaagcgctctcatgaagcaaccgcccattcagtctacggctggggccgtcccagttcgcaatgagaaaggtgagatttcaatggaaaaagtgaaggtaaagcgttatgtgtccggaaaaaggccagactatgcccctatggagtcctcagatgaggaggatgaagaatttcagttcattaagaaagccaaagaacaagaagcagagcctgaggaacaggaggaggattcatccagtgacccccggctacggcgtttacagaaccgtattagtgaagatgtggaagagagattggctcgacatcgaaaaatagtggaacctgaagtggtaggagagagtgactcagaagtagaaggagatgcttggcgcatggaacgagaagacagcagtgaagaagaggaggaggaaattgatgatgaggaaatagagcggcggcgtggcatgatgcgtcagcgagcacaggagagaaaaaatgaagagatggaagtcatggaagtggaagatgagggtcgttctggagaggagtcagaatcagagtctgagtatgaagagtacacagacagtgaagatgagatggagcctcgccttaagccagtcttcattcgaaagaaggaccgagtgacagttcaagaacgtgaagccgaagcattgaaacagaaggagctggagcaggaagcaaaacgcatggctgaggaaaggcgcaagtacacactcaagattgtcgaagaggaaaccaaaaaagagctggaagagaacaagcgatccctggctgcattggatgcactcaatactgatgatgaaaatgatgaggaggaatatgaggcatggaaagttcgagagctaaaaagaatcaagagggacagagaagatcgagaagcgcttgagaaggagaaagcagaaattgaacgcatgcgaaacctgactgaggaagagaggagagctgaacttcgggcaaacggcaaagtcattaccaacaaagctgttaagggcaaatacaagttcttacagaagtattatcaccggggtgccttcttcatggatgaggatgaagaagtatacaagagagatttcagcgctcctaccctggaggatcatttcaataaaaccattcttcctaaagtcatgcaggtcaagaactttggacgctcaggtcgcaccaaatacactcaccttgtggatcaagataccacctcctttgactcagcttggggccaagagagtgcccagaacacaaagttcttcaaacaaaaggcagctggggtacgagatgtatttgagcggccatctgccaagaagcggaaaactacctagggtccaactgcttattcttccaactgtggaacacaaggggagtctcagcatctggtccttgatttggttttttcattgtttccttggcccctgtatccagatattggacttactgctatacttgtgatactggggtagcccagactttgaaggtgctttgtgaggtttggactcatgctgagaaaaccacaggaaagcactgtccaggtaggattagaggcttctcacttaaaacctattttctgaaaaatcttaggttttatcactgctatgggtttccctattaacttgggactgttctgactttcctttt

SEQ ID NO: 183526 - DNA, 1340 bp, Homo Sapiens
  misc_feature (1202)..(1211): n is a, c, g, or t
ttggggaaatttgtatgataaggcaggtaaagtgaggaaacatgcaactgaacaggaaaaaactgaagagggattaggccctaatataaaaagcattgtcaccatgttgatgctgatgctattgatgatgtttgctgtccactgtacctgggtcacaagcaatgcctactctagtccaagtgtagtcctggcctcatacaatcatgatggcaccaggaatatcttagatgattttagagaagcttacttttggctaaggcaaaatacagatgaacatgcacgagtaatgtcttggtgggattatggctatcagatagctggaatggctaatagaactacgttggtggataataacacctggaataacagccacatagcactggtgggaaaagctatgtcttctaatgaaacagcagcctataaaatcatgaggactctagatgtagattatgttttggttatttttggaggggttattggctattctggtgatgatatcaacaaatttctctggatggttaggatagctgaaggagaacatcccaaagacattcgggaaagtgactattttaccccacagggagaattccgtgtagacaaagcaggatcccctactttgttgaattgccttatgtataaaatgtcatactacagatttggagaaatgcagctggattttcgtacacccccaggttttgaccgaacacgtaatgctgagattggaaataaggacattaaattcaaacatttggaagaagcctttacatcagaacactggcttgttaggatatataaagtaaaagcacctgataacagggagacattagatcacaaacctcgagtcaccaacattttcccaaaacagaagtatttgtcaaagaagactaccaaaaggaagcgtggctacattaaaaataagctggtttttaagaaaggcaagaaaatatctaagaagactgtttaaatgcactgttctggttcctaacttgaagcagttgtccttgtgagaaccggtctttgcctttagctcatgtcgtgtttcacagcaaagagggtacagaaccatcactggtccaggttaatgtacaaaattttctggcaatgcctgattaaaaaaataaaattggcttgttgagaacagctgttttcgatttctaatgtgaagcaagacagagcactgctgtaaatgtctagcagcagannnnnnnnnnattggtacatattatccttcaaatctgagaatttggactaactgcaccaaagaaccctctaatttggtccctggcacatgcatacttgtcaatgtttttattcttttacaagacctgcattttatttga

SEQ ID NO: 183527 - DNA, 933 bp, Homo Sapiens
  misc_feature (757)..(769): n is a, c, g, or t
ttggataagcaataggaattgaattacaagttactagggttataagcaaaaggttgcttaccataatgtcattaggtcacgatttttagctcacatctggaagcagcaactacttggctcaagtacatataagagtaattagttttattctctcttttttataaaatcgggtttcagatgagatgtttatcttagactattttagggaaaaattttacatgtttgagatggtggagtaaaaagactgttaaacatttcttttaaaaaattatttttacattacaacaatatatttatgatgtgttcagatcaaaaatttaacttctgtgtcccagatctactttcaaagtgagattttcacttgtcagcttaaatttctgactagaactaacatttgtgtatttttgtgcttagtcggaatacaaatttcacagtggatttttgaagtttgtccttaaattggataaaatcaagtgattaaagttactaaagagataaaaatggtaatttccatttttaaaagtaatttggttgtgtttatagttatttgtacaagtatttatcacagactctaaattgaaaaatgtagtatgatctatatttgaccctaaaaatgttggattaatttaacaaatatggcagatttttcataactaagtcttaagtcttctaaaaggaagctgttacccttctgtttttaattacattaattgaaatgtgttttaagagatacaatttcagcatattttatatattnnnnnnnnnnnnnggattagtattgagccagtggccaaaaataatattactaccatgtagactgttatagttcaaattgtcccacttcacccagaattttagaaactagaagtctgggaggtactatatcagctgtagttgggtaattccagtgctgatagtactattcatcttttt

SEQ ID NO: 183528 - DNA, 1895 bp, Homo Sapiens
actttgtacaaaaaagttggagaggacatgctaaagatatgttacagaaatttttctgatacttcctggaataactttaagttacaccctagtagactggtcattctaataaaatccagtactataacaaacctctgtatgttgatagcacattggcccttttttagagttctttcctatgtttttcttacgtgatttcccacagttccatgagtccaacaaaggagagtgataggctccttatcttttagaagaggaaggaaaggcatgaagaagttgagggactggctgaagatcacgtacttactaagtagtacaactggagcaagatcaagtatctctgtctcccatatctgtgttctatcatttaaaatatatattggaaatccctgctgactcagattggtatgattaaaaatgagaggaaagttggcaaatagttagtagtgacaaactaatactgctggactaagattttggtagcattgttttctaaaatattttaaatggagaatgaacacttataaaatgctttggaacataatctttagcttaattttctgttaaaatttagtaccccttcatcattccaataaagataagactgatccattgtctaaggaaattatttataaataatagagattaatttatttgagatttgaaataagaatagtatgaaaatattagataccacataaattgtttgaaattactgaataaccatcttaagtatggaacatttaaatggctatattttatttgtgtacagtttttctgtgccttgttaggccagtgaagcaattattttctctaagaaaatgacaataaaatataacacacttcagattgtctgatttacagtttggaaaggacaccgcaatgttcaaataggtaggagaccatcaaaaacacaattaaagtaacatattaggagacttgaaacttcagcctaataaatccttcatggttcttagccttattattgtgatataattctagatattttcttggagggcatgtgcccaactctcccgcaccccattttgtttgtcttttaaagttcttagaataaacagttctttatataataattatattttatttaagaaaatagtttgttaggtactttttaaaagatgtaaatttttaaatttacaaatacatatgggtctttgataagcaataggaattgaattacaagttactagggttataagcaaaaggttgcttaccataatgtcattaggtcacgacttttagctcacatctggaagcagcaactacttggctcaagtacatataagagtaattagttttattctctcttttttataaaatcgggtttcagatgagatgtttatcttagactattttcttttagggaaaaattttacatgtttgagatggtggagtaaaaagactgttcaacatttcttttaaaaaattatttttacattacaacaatatatttatgatgtgttcagatcaaaaatttaacttctgtgtcccagatctactttcaaagtgagattttcacttgtcagcttaaatttctgactagaactaacgtttgtgtatttttgtgcttagtcggaatacaaatttcacagtggatttttgaagtttgtccttaaattggataaaatcaagtgattaaagttactaaagagataaaaatggtaatttccatttttaaaagtaatttggttgtgtttatagttatttgtacaagtatttatcacagactctaaattgaaaaatatagtatgatctatatttgaccctaaaaatgttgcattaatttaacaaatatggcagatttttcataactaagtcttaagtcttctaaaaggaagctgttacccttctgtttttaattacattaattgaaa

SEQ ID NO: 183529 - DNA, 1209 bp, Homo Sapiens
  misc_feature (283)..(338): n is a, c, g, or t
ttgggtaaaataaaaattaaagttattttatcatatcctttctattatgttcccatcctgtcctcatgtcccatttactttattatcaccattcatttcttcaaaattatcttttagatacgctcatacaaaaatcaatccttgttttcttgcttgtgtcttttaaccttggaaaattacatcgtgtaaattaaacagatttttctgatgatctgtgcttcttatatactattagagtgcatgatagtatctcctgaaaaggatggaaagtagaagcatttgnnnnnnnnnnnnnnnnnnnnnnnnnnnnnnnnnnnnnnnnnnnnnnnnnnnnnnnnattatatctacttttagtggagtttgagtcagaaaaaaacaagaatttgaaacaagtaaaaagatagaagagaaataaagatggtatgtgactactttcagagagagttaagtaactgtcagaataagcctggaacaaaacaggctgtaaattaataaaactacaaacacacattcaggtgaagcagaagtatagccataaaacatctagaaagagtgaatgaggcttttagcttttcttaggtcaatgtccagtgtgcttttttccatgggaataggataggtattaatacgcttttctaaactgctctcagaccttatccagaggacatggtaaagatatgttacagaaatttttctgatacttcctggaataactttaagttacaccctagtagactggtcattctaataaaatccagtactataacaaacctctgtatgttgatagcacattggccctttttagagttctttcctatgtttttcttacgtgatttcccacagttccatgagtccaacaaaggagagtgataggctccttatcttttagaagaggaaggaaaggcatgaagaagttgagggactggctgaagatcacgtacttactaagtagtacaactggagcaagatcaagtatctctgtctcccatatctgtgttctatcatttaaaatatatattggaaatccctgctgactcagattggtatgattaaaaatgagaggaaagttcaaatagttagtagtgacaaactaatactgctggactaagattttggtagcattgttttctaaaatattttaaatggagaatgaacacttataaatgctttggaacataatctttagcttaattttctgttaaaattta

SEQ ID NO: 183530 - DNA, 2216 bp, Homo Sapiens
  misc_feature (1623)..(1725): n is a, c, g, or t
  misc_feature (2027)..(2035): n is a, c, g, or t
ttggggtacacaagggaagctgacctgcaagttcaagtctactagtacgactggcgggttgacctcagtctcctggagcttccagccagagggggccgacactactgtgtcgtttttccactactcccaagggcaagtgtaccttgggaattatccaccatttaaagacagaatcagctgggctggagaccttgacaagaaagatgcatcaatcaacatagaaaatatgcagtttatacacaatggcacctatatctgtgatgtcaaaaaccctcctgacatcgttgtccagcctggacacattaggctctatgtcgtagaaaaagagaatttgcctgtgtttccagtttgggtagtggtgggcatagttactgctgtggtcctaggtctcactctgctcatcagcatgattctggctgtcctctatagaaggaaaaactctaaacgggattacactggctgcagtacatcagagagtttgtcaccagttaagcaggctcctcggaagtccccctccgacactgagggtcttgtaaagagtctgccttctggatctcaccagggcccagtcatatatgcacagttagaccactccggcggacatcacagtgacaagattaacaagtcagagtctgtggtgtatgcggatatccgaaagaattaagagaatacctagaacatatcctcagcaagaaacaaaaccaaactggactctcgtgcagaaaatgtagcccattaccacatgtagccttggagacccaggcaaggacaagtacacgtgtactcacagagggagagaaagatgtgtacaaaggatatgtataaatattctatttagtcatcctgatatgaggagccagtgttgcatgatgaaaagatggtatgattctacatatgtacccattgtcttgctgtttttgtactttcttttcaggtcatttacaattgggagatttcagaaacattcctttcaccatcatttagaaatggtttgccttaatggagacaatagcagatcctgtagtatttccagtagacatggccttttaatctaagggcttaagactgattagtcttagcatttactgtagttggaggatggagatgctatgatggaagcatacccagggtggcctttagcacagtatcagtaccatttatttgtctgccgcttttaaaaaatacccattggctatgccacttgaaaacaatttgagaagtttttttgaagtttttctcactaaaatatggggcaattgttagccttacatgttgtgtagacttactttaagtttgcacccttgaaatgtgtcatatcaatttctggattcataatagcaagattagcaaaggataaatgccgaaggtcacttcattctggacacagttggatcaatactgattaagtagaaaatccaagctttgcttgagaacttttgtaacgtggagagtaaaaagtatcggttttattctttgctgatgtcctttctgcttgaaataacagtcaccatacagctaaaggagaggagtttctttccttctaagtaggcagaaatggtatcattatgttgccgctctccaatctcccagagctcgctctctagagaatcaccttctttcgcnnnnnnnnnnnnnnnnnnnnnnnnnnnnnnnnnnnnnnnnnnnnnnnnnnnnnnnnnnnnnnnnnnnnnnnnnnnnnnnnnnnnnnnnnnnnnnnnnnnnnnncgaactatagttgcaccactgcagctggcaagaatcaccttctttataaagcgtcagtcatgcttccagcaagaggcagcatcagtcatggctttataacagcttcatggtgcctcaaagactgttgaggttaatgagagcctagattagacagtttggctgtccttccctaaaacttgttttctcctattcactactccccaccgcacttaaaatctatgagtttttactttttactgggaatggaaagtgtggtgaagatcattcaacacttatgttgtcatttctcccattttctgaannnnnnnnnaaatttccccccttttaaaattgttcgaaagcccacagttatggaaagaattactgtctagatggtctgcagaacgtgtttggggtgagtgggagtgaggggcaatgttactttttctccctgtagtttggagtccattatgagctgctgctttttcttctcatctgtcatcttctgggga

SEQ ID NO: 183531 - DNA, 1416 bp, Homo Sapiens
tttgtacaaaaaagttggccccttttaaaattccttcaaaagcccacagttatggaaagaattactgtctagatggtctgcagaacgtgtttggggtgagtgggagtgaggggcaatgttactttttctccctgtagtttggagtccattatgagctgctgctttttcttctcatcttgtcatcttctggggatgtttgaaggctgagttccaacagaattcacaaagggaataaaacaggattgagattttgaggtgtgcacaaggtggtaagataaagggcatatgagcttcaaaactaatgctgttgcatacatgaagccttttgttttttgaggagctatttttgttattcttgtaacgctccaccttacatgccacgtctgtgtgagtcaacagggatcaggtttggtcaccacacatgtctgaagctgggcagcgtctgctctgtgttctgtgtggaatggagaaaaaaacgcctgccctgctgccttccatgttcataggcccagcccaagagagtgacacacagtgctggccctgagacatttccacaaagtggtcaactctgccttgcatcctaaaactttttgggcatctattttgaaaactataggagcctttggaaggcctcttatgtttggaggggaagggtgttgagattgtcaccatccttcaagctgagactcctggtgagcctttgccaccatgaaaaccacatagctgaccagggctgtgcttgaggtacagaggacacacatcgtagacaggcctgtgtcatgtttccttacagtcgttttttacagagaaaaggggcattgttttttcactgctttctcaacagttcctgtgaataaatgaaacatttcggagctccctgagagcaagagccttcacttcttcttgcggtgccgggaccatgtgttggtgaagctggtgctgtgggggccactcactcgaatgacacctggaggcctgttcctcccttaccactcccttccccagcccgacttcttggcctcctgcccaaccagacacctcaaactctgtcagtgccctggcattctggcagagaatcctcaccagttctcaccaaccttccccccaggcaagggcagctgccagcatggtgctctgccaggacaggtttccctgaaggaagctgctcacactgagatgagcctctcagggcaggacctcttcccaagccctgcacacccacccctgcagcccttttggctccccttttccctgtgcctcagcactcctttcctggttgcagataacgaactaaggttgcctaaagggcagatctgccctctccatgtcttcgtcctggcaaacagggtcgtcttaaaattatgcgctaattctgtatgggagcactcaaaaggcattacttagagattgaaattt

SEQ ID NO: 183532 - DNA, 509 bp, Homo Sapiens
  misc_feature (145)..(195): n is a, c, g, or t
ttggctccactccttgaagaactacaggcacagtaaaaaaatatggcgtattatgtgaactaaaagagttctaaaggagttcttaaaggagtggtagaatttgggtaggaaagtgattaagtccaacttaaaaccaacagtctcnnnnnnnnnnnnnnnnnnnnnnnnnnnnnnnnnnnnnnnnnnnnnnnnnnntaagtaaatttagtttaaaatccagttttcgaattacattagccacattgtcaagtgttcaaatcacaggtggttagtggctactgtactgggcaacatacattatagaacattttcattataggaagttttattgggcagtgctgctcttaaatcctaccttccactcaactcccatacaactttcttttgtacattttgatactttctacctaatggcagctcttccaaaatagctgctttaaactctgatttaattttcaatatttggtttcatttttcaacaggccaagaggcctctggtaatgaagtgc

SEQ ID NO: 183533 - DNA, 930 bp, Homo Sapiens
ttggagtaaataagtgaaaattgttaacccatgtgcccattcctgagtagggcagactcttcacaagaggcccatgacaagaattctagggtccagattgaactttaatatagacctttgtctgtgtagaccagtttgtcttgtaaactgtcttacttatgtgtgtaaacattttacattcacatgaaaagttattttcctttatataattggtctcccaaagtgctgggattacatgcgtgagccaccacacttggcctacattttttctttatataccagaacatctataacaggcaccttatctactcattagtgaagagataattggattacacaggcaggcttgtttactacatccagaatgtagaaactgctttcttcaacatcttggttctagctagtaataacaatataattctttggcagatattcagaataacattttaaactacattttcttagaaaattgcattcttgtagtgagcagtgtatggtctcttttgttcagaatttaaaactgataaccaatgaaagccttttctcttattcctctaccgtcatttacatgataatctgaagctaatatgacaatatttaaatactaagtggtactagggaactacaagaatactgtaaagcttaagccattgttatcactgtcatttagcatttaataacaaaactatacagaattatgtgcataccaatgaatgttttgtaccatctagttaaattttttaaataaagttttatgggttaagcagaagacaactgtcatactgaattttattaaaagtatatatacttcaaattcaaagcatcccttaggacccacagaatatattaaaactaccaccctttaaattttatatttttgctttaagacagacatgcaaaggtaactgggcaagatgtgagcaaatgttt

SEQ ID NO: 183534 - DNA, 1242 bp, Homo Sapiens
  misc_feature (218)..(473): n is a, c, g, or t
  misc_feature (1060)..(1110): n is a, c, g, or t
ttggtgaaaactgtgcaagcaaaaaccgaagaaaaacacttaagtacaactgtagtgacagtgatcaaagttttcagtgcatttattgtacattttaagaaaaaggtgaaaatcatttggggagtaaaaaaatgaaaaagctgaaacgagtaattttcctcaccatcaataaaccaaaaacaggaaagataaagaatgtataaatttcacgtaaattnnnnnnnnnnnnnnnnnnnnnnnnnnnnnnnnnnnnnnnnnnnnnnnnnnnnnnnnnnnnnnnnnnnnnnnnnnnnnnnnnnnnnnnnnnnnnnnnnnnnnnnnnnnnnnnnnnnnnnnnnnnnnnnnnnnnnnnnnnnnnnnnnnnnnnnnnnnnnnnnnnnnnnnnnnnnnnnnnnnnnnnnnnnnnnnnnnnnnnnnnnnnnnnnnnnnnnnnnnnnnnnnnnnnnnnnnnnnnnnnnnnnnnnnnnnnnnnngtatactgtctagaagtctgaggctcaaagaaaagtaatccctcttctgaatccacaccccatcaattatcttactttcttctggggagatagatagatatactatctcactagcttgactaatggcaacaaagttccagtttgtgtagtctctttttattgaccacatgaatcgaaaacactcatcacaattaatggcactatcattaatgagacatgagtgactaaaaagtgatagaaaactattaacagtgcggctacatggtactgaaaatgcaggcattacaccagctgttacacaagcacaagcatgctctgtaagagctttacatttctgagattttgtatagtgattgagatgtctattttattattgatagactattactaatgtcaatattgaacactaccctggaattcctgcctggttttcctgcccaaattgtaccactccttgaagaactacaggcacagtaaaaaaaatatggcgtattatgtaaactaaaagagttctaaaggagttcttaaaggagtggtagaatttgggtaggaaagtgattaagtccaacttaaaaccaacagtctcnnnnnnnnnnnnnnnnnnnnnnnnnnnnnnnnnnnnnnnnnnnnnnnnnnntaagtaaatttagtttaaaatccagttttcgaattacattagccacattgtcaagtgttcaaatcacagtggttagtggctactgtactgagcaacatacattatagaacattttcatttataggaagtttt

SEQ ID NO: 183535 - DNA, 1852 bp, Homo Sapiens
ttggggcagcccaggctttggcgctgctgagagaggtagcgaggctggaagcgccgctggaggagctacgcgcgcttcactccgtgctgcaggcagtgccgctcaacgagcttcgccagcaagcggcggagctgcgcctcggcccgctcttctccctgcttaacgagaaccatagggaaaagactactttgtgtgtatccattctggagagattgctccaagctatggaaccggttcacgtggcccggaacctcagggttgacctgcagaggggactaattcaccctgatgattctgtaaaaatcctcactctttcccagattggaagaattgttgaaaattctgatgctgttactgagattctaaataatgctgaattactaaaacaaattgtttattgcattggtggagagaatctatctgtagcaaaagcggctatcaaatccctgtcaagaatatcactaacccaagctggactggaggctttatttgaaagcaatctgctggatgatttgaaaagtgtaatgaaaacaaatgacattgttcgatacagggtgtatgagctaattatagagatttcttccgtgtcaccagaatctttaaactactgtaccacaagtggattggtaacccagctcctgagagagctgactggtgaggatgtgttggtcagagccacctgtatagaaatggtgacatcactggcatatactcatcatgggcgacaatatcttgctcaagaaggagtaattgaccaaatttctaatataattgttggggcagattcagaccctttctctagcttctatctgccaggattcgtgaagttttttggaaacctggctgtcatggatagtcctcaacagatctgtgagcgttatcctatctttgtggaaaaagtctttgaaatgatagaaagtcaggaccccactatgattggtgtagctgtagacacagttggaatcttgggatccaatgttgaaggaaaacaggttttacagaaaacaggaactcgctttgaacgcttgcttatgagaataggacatcaatcaaagaatgccccagtggagctaaaaattagatgtttggatgcaatttcatctcttctgtacttaccacctgagcagcagactgatgaccttctgaggatgacagaatcctggttttcttctttatctcgggatccactggagctcttccgtggcattagtagtcagcccttccctgaactacactgtgctgccttaaaagtgtttacggccattgcaaaccaaccctgggctcagaaacttatgtttaacagtccaggttttgtagaatatgtggtggaccggtctgtggagcatgacaaagcttcaaaggatgccaaatatgaactagtgaaagcacttgccaattccaagacaattgcagaaatctttgggaacccaaattatttgaggctcagaacttacctgagtgaagggccatactatgtgaaacctgtttccacgacagcagtagaaggagccgaatgatttcttctagagctcatgtagaggaccacgttttgaccaaaacttctcctaaggcatttgactccatctatatttcacaaaagagacttcctttccccaagaattatcatggaatgtcagatgttactttgttaccaacactgttatatttctacattgaaatgcaaagtggaactaggagtttggaatgcattaagagcagacaagcttggtcataatagatccagtgtttttcagattcctttcactgccttaatctttgcaacagggtggaagtttttttcttccctcaaaattttcatggacatgcaatcttatctaaaagcctgcttcag

SEQ ID NO: 183536 - DNA, 1506 bp, Homo Sapiens
  misc_feature (313)..(322): n is a, c, g, or t
  misc_feature (1384)..(1406): n is a, c, g, or t
tcgggggtgcagggggaaggtcccggctcttccactggagaaaggagactcacctggcttcatagttcatgtttgactatttcctctaaaacctgtgctgagtctttgactgcatgcacgggaagcacaaacgttcggcttgtatgcaaaaaaagtacaaaaacaactagaatataaaagttttggtaatataaggccatctgttcaagtccaccttggaaacctgtaacagatatttaaatactacagtgaaaaggcatcttaatatactttttaaaaacatctgaagtaatccgctaagattaagtgtgtnnnnnnnnnnttcaattccctttgagggcactttgtcctttgaagaagggaaagtggggcggggagggcacggggcccaccggttaatgcttcagccacgggtgggcttcaatggaagccttgctgcggtccccatagtcatacaggagctcctccccagccgcgatgtctcgggaggcgatgaggatgaggtgaggtacgccgtcgatgtcgtgcagtttggtttggcagttcccacatttgctgtgattgatcagtcttcctaggcgatttgtctctctagttgcatccacgcagtaggttttgctcagatactgaaaatagtacatgtagcagcccgtggaagggtcctgtgcgtacagagcctcccgtttcttggcgtcggtgatctcgatgaggtccccgtggtattccaccacaaagtcaccccgggagaactgcttggtggcaatcacacccctgcctttgccatcgatgaggtcaatcttcatttcttcccactttcaatcaattcatctattcttttcctttcttcagactgcagctcggctttgctcttcctggagctccttcggacagggtagaaatccgtaagtttgcgattctgttgcgtttttccttgagctttttttcggggggcctgtttgcccttgatgggctttttcagggcttgcttggcgatggctgcattggtggaatcacaagatgagggtggagtttttggaggttctgctgcttcagatttttggtttggaaaaggtaccaggggacctttcctggcgtctttgatcttctgttcctcggacttcatggcgctccgtactgcgttcccagcatttcttttctcttctcgtttcctgtagattccggctaatggtttcccctggcatttgacttcgtgatgtgtaactgagttctcttcctgaagggggaaacgcattccagagcatttgttcgggctcatgtaggaatagatctttgactgcccggtaaatacgttctccccgtcggtgcggggcctccccgggcccctccgctccaccatctccgggcccggggccgtcgctgccannnnnnnnnnnnnnnnnnnnnnntccaccgcgcggggcttggacatcttcctgcctctagccatggctccactctgtcaccgcctgggatctcccgggaaacccagctttcgaaaaaagccaa

SEQ ID NO: 183537 - DNA, 1852 bp, Homo Sapiens
ttggagaagatgcccatgtggctctctcactgtgcgttgctaccttgcttctgtgagaattcaggaagcaggtgagaggagtcaagccaatattaaatatgcattcttttaaagtatgtgcaatcacttttagaatgaatttttttccttttcccatgtggcagtccttcctgcacatagttgacattcctagtaaaatatttgcttgttgaaaaaaacatgttaacagatgtgtttataccaaagagcctgttgtattgcttaccatgtccccatactatgaggagaagttttgtggtgccgctggtgacaaggaactcacagaaaggtttcttagctggtgaagaatatagagaaggaaccaaagcctgttgagtcattgaggcttttgaggtttcttttttaacagcttgtatagtcttggggcccttcaagctgtgaaattgtccttgtactctcagctcctgcatggatctgggtcaagtagaaggtactggggatggggacattcctgcccataaaggatttggggaaagaagattaatcctaaaatacaggtgtgttccatctgaattgaaaatgatatatttgagatataattttaggactggttctgtgtagatagagatggtgtcaaggaggtgcaggatggagatgggagatttcatggagcctggtcagccagctctgtaccaggttgaacaccgaggagctgtcaaagtatttggagtttcttcattgtaaggagtaagggcttccaagatggggcaggtagtccgtacagcctaccaggaacatgttgtgttttctttattttttaaaatcattatattgagttgtgttttcagcactatattggtcaagatagccaagcagtttgtataatttctgtcactagtgtcatacagttttctggtcaacatgtgtgatctttgtgtctcctttttgccaagcacattctgattttcttgttggaacacaggtctagtttctaaaggacaaattttttgttccttgtcttttttctgtaagggacaagatttgttgtttttgtaagaaatgagatgcaggaaagaaaaccaaatcccattcctgcaccccagtccaataagcagataccacttaagataggagtctaaactccacagaaaaggataataccaagagcttgtattgttaccttagtcacttgcctagcagtgtgtggctttaaaaactagagatttttcagtcttagtctgcaaactggcatttccgattttccagcataaaaatccacctgtgtctgctgaatgtgtatgtatgtgctcactgtggctttagattctgtccctggggttagccctgttggccctgacaggaagggaggaagcctggtgaatttagtgagcagctggcctgggtcacagtgacctgacctcaaaccagcttaaggctttaagtcctctctcagaacttggcatttccaacttcttcctttccgggtgagagaagaagcggagaagggttcagtgtagccactctgggctcatagggacacttggtcactccagagtttttaatagctcccaggaggtgatattattttcagtgctcagctgaaataccaaccccaggaataagaactccatttcaaacagttctggccattctgagcctgcttttgtgattgctcatccattgtcctccactagaggggctaagcttgactgcccttagccaggcaagcacagtaatgtgtgttttgttcagcattattatgcaaaaattcactagttgagatggtttgttttagataggaaatgaaattgcctctcagtgacaggagtggcccgagctgcttctattttga

SEQ ID NO: 183538 - DNA, 1621 bp, Homo Sapiens
  misc_feature (1350)..(1358): n is a, c, g, or t
ttggctcaattgctcctgtgtttgttataaagtagtgtttaaaaggcagctcaccatttgctggtaacttaatgtgagagaatccatatctgcgtgaaaacaccaagtattctttttaaatgaagcaccatgaattcttttttaaattattttttaaaagtctttctctctctgattcagcttaaatttttttatcgaaaaagccattaaggtggttattattacatggtggtggtggttttattatatgcaaaatctctgtctattatgagatactggcattgatgagctttgcctaaagattagtatgaattttcagtaatacacctctgttttgctcatctctcccttctgttttatgtgatttgtttggggagaaagctaaaaaaacctgaaaccagataagaacatttcttgtgtatagcttttatacttcaaagtagcttcctttgtatgccagcagcaaattgaatgctctcttattaagacttatataataagtgcatgtaggaattgcaaaaaatattttaaaaatttattactgaatttaaaaatattttagaagttttgtaatggtggtgttttaatattttacataattaaatatgtacatattgattagaaaaatataacaagcaatttttcctgctaacccaaaatgttatttgtaatcaaatgtgtagtgattacacttgaattgtgtacttagtgtgtatgtgatcctccagtgttatcccggagatggattgatgtctccattgtatttaaaccaaaatgaactgatacttgttggaatgtatgtgaactaattgcaattatattagagcatattactgtagtgctgaatgagcaggggcattgcctgcaaggagaggagacccttggaattgttttgcacaggtgtgtctggtgaggagtttttcagtgtgtgtctcttccttccctttcttcctccttcccttattgtagtgccttatatgataatgtagtggttaatagagtttacagtgagcttgccttaggatggaccagcaagcccccgtggaccctaagttgttcaccgggatttatcagaacaggattagtagctgtattgtgtaatgcattgttctcagtttccctgccaacattgaaaaataaaaacagcagcttttctcctttaccaccacctctacccctttccattttggattctcggctgagttctcacagaagcattttccccatgtggctctctcactgtgcgttgctaccttgcttctgtgagaattcaggaagcaggtgagaggagtcaagccaatattaaatatgcattcttttaaagtatgtgcaatcacttttagaatgaannnnnnnnnccttttcccatgtggcagtccttcctgcacatagttgacattcctagtaaaatatttgcttgttgaaaaaaacatgttaacagatgtgtttataccaaagagcctgttgtattgcttaccatgtccccatactatgaggagaagttttgtggtgccgctggtgacaaggaactcacagaaaggtttcttagctggtgaagaatatagagaaggaaccaaagcctgttgagtcattgaggcttttgaggtttcttttttaacag

SEQ ID NO: 183539 - DNA, 1836 bp, Homo Sapiens
  misc_feature (122)..(205): n is a, c, g, or t
ttggggccgagcgagccggagctgaggattggggagcggcgacgccgcccagccgtcgtttttgatctgctgcagccgccggcggggcgacccagcccgaccccctcccctccccctcagcnnnnnnnnnnnnnnnnnnnnnnnnnnnnnnnnnnnnnnnnnnnnnnnnnnnnnnnnnnnnnnnnnnnnnnnnnnnnnnnnnnnntgaggtgtcccccctgccgggtggaaccggaggcggcggcggcgctggcggcggccgtggtggcggaggcgacggtggagacggctgccctagtgggagaggcggcggcggcggccgaggaggaggagggggaagcggcggcggcaaaggaaaatgcttggacagaagagatgagtactatttccactaaggcctagaattgcctactgtacaaatagtcctgatcaggcaatatacgaatggcccaaggaagccaccaaattgattttcaggttttacatgacctgcgacaaaaattccctgaagtacctgaagttgttgtatccaggtgcatgttacagaataataataacctggatgcctgctgtgctgttctctctcaggagagtacaagatatctttatggtgaaggagacttgaatttttcagatgattctggaatttctggtctacgcaatcacatgacttctctcaacttggacttgcaatcacagaacatttaccaccatggaagagaaggaagtaggatgaatggaagtaggactctaacgcacagcattagtgatggacaacttcaaggtggccagtccaatagtgaactatttcagcaggagccacagacagcaccagctcaagttcctcaaggctttaatgtttttggaatgtccagttcctctggtgcttcaaattcagcaccacatcttggatttcacttaggcagcaaaggaacatctagcctttctcaacaaactcccagatttaatcccattatggtaactttagccccaaatatccagactggtcgtaatactcctacatctttgcacatacatggtgtacctccacctgtacttaacagtccacagggaaattctatctatattaggccttacattacaactcctggtggtacaactcgacagacacaacagcattctggctgggtatctcagtttaatcccatgaaccctcagcaagtttatcagccttcacagcctggtccctggactacttgtcctgcatctaatcctctgtcacatacctcatctcaacagccaaatcagcaaggccaccagacctctcatgtctacatgccaatcagttcacctactacttcacaaccaccaaccattcattcatctggtagctcacagtcttctgcccatagccaatataacattcagaatatttcaacaggacctcgaaaaaaccagattgaaatcaaacttgaacccccacaaagaaataattcttcaaaactgcgttcttctggacctcgaacctccagcacttcctcttcagtcaatagccagaccttaaacagaaatcagcccactgtttacatagctgcctgccccccaaatacggatgagctgatgtcccgtagtcaacctaaggtctatatttcagcgaatgctgccacaagagatgaacaggtcatgcgaaatcggcccacactcttcatatccacaaactctggagcatctgctgcctccaggaacatgtctgggcaagtgagcatgggtcctgccattattcatcaccatcctcccaaaagtcgagcaataggcaataactctgcaaactctcctcgagtggtagtcactcatcccaatacaaaatacactttc

SEQ ID NO: 183540 - DNA, 1346 bp, Homo Sapiens
ttggcaaggaaggcagcggcagctccactcagccagtacccagatacgctgggaaccttccccagccatggcttccctggggcagatcctcttctggagcataattagcatcatcattattctggctggagcaattgcactcatcattggctttggtatttcagggagacactccatcacagtcactactgtcgcctcagctgggaacattggggaggatggaatcctgagctgcacttttgaacctgacatcaaactttctgatatcgtgatacaatggctgaaggaaggtgttttaggcttggtccatgagttcaaagaaggcaaagatgagctgtcggagcaggatgaaatgttcagaggccggacagcagtgtttgctgatcaagtgatagttggcaatgcctctttgcggctgaaaaacgtgcaactcacagatgctggcacctacaaatgttatatcatcacttctaaaggcaaggggaatgctaaccttgagtataaaactggagccttcagcatgccggaagtgaatgtggactataatgccagctcagagaccttgcggtgtgaggctccccgatggttcccccagcccacagtggtctgggcatcccaagttgaccagggagccaacttctcggaagtctccaataccagctttgagctgaactctgagaatgtgaccatgaaggttgtgtctgtgctctacaatgttacgatcaacaacacatactcctgtatgattgaaaatgacattgccaaagcaacaggggatatcaaagtgacagaatcggagatcaaaaggcggagtcacctacagctgctaaactcaaaggcttctctgtgtgtctcttctttctttgccatcagctgggcacttctgcctctcagcccttacctgatgctaaaataatgtgccttggccacaaaaaagcatgcaaagtcattgttacaacagggatctacagaactatttcaccaccagatatgacctagttttatatttctgggaggaaatgaattcatatctagaagtctggagtgagcaacaagagcaagaaacaaaaagaagccaaaagcagaaggctccaatatgaacaagataaatctatcttcaaagacatattagaagttgggaaaataattcatgtgaactagacaagtgtgttaagagtgataagtaaaatgcacgtggagacaagtgcatccccagatctcagggacctccccctgcctgtcacctggggagtgagaggacaggatagtgcatgttctttgtctctgaatttttagttatatgtgctgtatgttgctctgaggaagcccctggaaagtctatccca

SEQ ID NO: 183541 - DNA, 1317 bp, Homo Sapiens
ttggaatgaatttcctcagctaccagaaggcttagaaaagaagcctattgttcttaaattcagtgccatgttagatggtatagccattggagcagcacttttaccatctctgaaagcagaatacaagatgggaagaatgagaagtcatggaatgacaggtgcacagacaagatttacatttgagctgccaaatcacagattgcgttttacttcaaaagtttctgccacagatatgtcaaccattcctccttctgccagtcttaaccttccccctgttaccatgtcagggaaatatataatggaagaacatgatagttattcggatcaggtgtggagtatagatgaactgccttctaaacaaggttactatttacagggaaattatctgcgttgtgtggcagaagttggttcctttgaacataatcttacaactgatcttctaaaccacttggtatttgtacagaaagtgttcatgaaggaagttaatgaagtaatacaaaaagtttctggtggggagcagcctattcctctctggaacgaacatgatggaacagcagatggagataaacctaaaattctcctctattccctaaacttgcagttcaagggtattcaagtaacggccactactccatcaatgagagctgtaagatttgaaactggattgattgaactggaactttctaaccgacttcaaaccaaagcttcaccaggaagtagcagctatctgaaactgtttggcaaatgccaggtggatttaaatctggcattaggacaaattgtcaaacatcaggtttatgaggaagctggttctgattttcatcaagttgcctattttaaaaccagaattggattaagaaatgccctccgagaagaaatcagtggttcttcagatagggaagctgtgcttattactttgaatagaccaattgtttatgcacagcctgtggcctttgatagagctgtgctgttttggctgaattataaggctgcctatgacaactggaatgaacaacgaatggctttacataaggatattcatatggctacaaaggaagtagtagatatgctacctggtatccagcaaacatcagcccaggcctttgggactctttttctccagctcactgtcaatgatctgggaatttgcctacctatcacaaatactgcacagtctaatcatactggagaccttgacactggttctgctttggtattaaccattgaaagtactctcatcactgcatgctcttcagagtctctggttagcaaagggcatttcaaaaacttttgtatccgttttgctgatggatttga

SEQ ID NO: 183542 - DNA, 2530 bp, Homo Sapiens
  misc_feature (563)..(591): n is a, c, g, or t
  misc_feature (861)..(891): n is a, c, g, or t
ttccaccatacacaaagacgaccctgggcgcccctccaccacctgcccctgagggagaggaaaggtgaagtattcctgccacctctccctccaagggaagggggagtggggggccatggcacagacagcctaccccagctgctcctcatctgtgctgggggaggcccctcccctcaccggccccgaagctgagttgtttggggagaagacaaatggctgatgggcaagggggcaaagtcaggacatctttggtgcaaagactccccctgacccaccaggccacacaatggaaatctgagggaagacttcaaaagtggccctgcctttgcccacaaggggtagctggctgatgccccagaacccaggacaaacacaggaaatgcaaaagctctgccaacagaagctgcccaggctcacctacatgagctgggcggtggcccatggagaaatggctaaaaatttaaggaaaataaacaaaaatgggttaataatggcaagaaggggaagtagagaggtcattcagtagatgagtgcctcagaggacctaggaccagcactaagtnnnnnnnnnnnnnnnnnnnnnnnnnnnnntccagtcttcctgatcgcagtgccagtgcccggtcactcctctctgcctcccggaacccagctaatagagacaggccacagagggcctgtttcagaatctgggtgggcttcccaggcactttggcaggctcagtatgggcagggcagacccaagaagggagaaggttcctaagccccagcagggccgtctccctctgcagccctgcctgcccctggcccctcaaatgcacgatcccaggcacagatctgcgcactcatacacacgtgtgnnnnnnnnnnnnnnnnnnnnnnnnnnnnnnntcactcctatttgtctggcacactggagatgtctgagggctccgagagaggaagtgcgtggcatcctcctccaaggtggccttgagctcccagaacgcgtgagccagcggggacaaccccaggctgttgtggagaaacagggagggcagatgggacaacacagggacaatccctatgacagtttccacaaataccctctaacaaaccacaagcctttgcagtatccagagaggaaggcgtctggtggagaggagtggggcaaggacaacaaaagaggtttcgtaaaaactctaagtcaaattactgataaaattgcaaaatgagcacaggttcaagagcaccttgctcacttctctccacagcctcccaacctcccagcctctcccactctggggtggccagaaccaaggcagaattcagtcactgatgcagttccaggctccatgcagctgaggaggagaggaggcagatgtggacagttctgtctcttcgtttaaaaaatatattcctgtagagagttattgcttgtcctcccgtgggcaggagggcgcggtggctcagtgggccagagccgcagcctccagggcccgagctttcttccgcctcttcagcagcagagggttggatgcatcttcaatcttttttatcttgatctgctcgtagtcaacgcgcattgtggccaaggcactggtcatctcctccttgacatcctcccaccgctccttgtcctccttcaggacccggctggtgtgcagtggggtttgagggacctttgttgattgcatgatccaagggtggttcataaactcggtgatggtcattctctgggtgggctctgttttcagcagattccgaatgagcatcttcacttcctctgatacttctgaccattctgggttgggaaattcatactggcccattcggatgcgagtcttcatgcccggagagatggcaaggccgtggttggagtagaaggggggatacccacacagcaggatgtacatgatgacacccagggaccacatgtcacaggacttgtcatacttctctggacccagcacttctggagccacatagtacggtgtataacaaggagtggtcaaagagttgtggctggtggtttccttggcaaagccaaagtcagtgagtttcaggatggcgttgggccttttggaggtgtataagagattctcaggcttgacatcccgatgggcaatgttgattgaatgcagatactggatggcctcaccgatgctcttcatgatttcggatgcttctctttctgtgaatgcctggtctcctcgatcctggattcggctaaagagttctccaccgtccaaacattccatgacaatcagcaggcacttcctccctgcgtacagattctcgtacacatccacgatccgtacgatgtgcgggcactgggaggcccgccagtgcagctccacctccctgcgggccttggggcagtcctgaagcattttgagggcgaatttctcctgggtcctcttgttgaagatctgcaaaactttgccgttgatgcccagccccaggacctggctggtgaccttgtagtcatcgatgatggcgttcttcttgatctgcaggccggacttgacgtggaactgcgggaacccaa

SEQ ID NO: 183543 - DNA, 1796 bp, Homo Sapiens
  misc_feature (208)..(217): n is a, c, g, or t
ttgggttggatataatcagagaactgaaaagtaatttatcagtaatttttaagagtccatgttttgtgacaaccatctctaatagccaactctttattaaacacactcctaaaaataaggaaccatgacattgtagatatttaatattgtacagtatagaaacctccatttttgccttcgaatgcatatttaagagttaacagaatgnnnnnnnnnngtcttgttggataatagtgtttgactagcgttttaagaacttgagagtaaaagcaacaataagattttttcacctcttcctgcttccacccccaaactgagaacatcactcaattgtttggaagaaactgtaggtctatataaattttatttataatgtatgtgtaatatacataatcataatacagttctcagatgcagggaagaagtttggcatttaatcattgaggctttaggtttttgatgtgatcagactgggccatgtcaaacccggaattttcaccaacagttcactcaccctcctggtacattgccattccaaggaattctgagagtaggcaaacaaattttgccttcatggtacagttctcagtttttcttataggagaaatatggtatatgtttataagaatcttttatgagattatagatttcaatgctgtggatagtgtcttgcacccaaacaagaaagtccataatggaatgatcttccctcagcttcctatcgatttagttacctcttgaaagcacaaaaattaaaacattgccatatgttgaatttttaaaaagcacttggagtgagcgaacatttcctgataaatgccttttagagataggttcttgatattcagacatctgcagaaatgttctggttcccaaagtcatttcacttcgaaataaaacacagctccttcaaacagcactttttccacataaatctagttgcctctccctgtggacattcagaactgatagaacaaacactactcttttgaatttgatggttcgtgtcctttaaagtgtttgaggacctatgcagagcctgtaacacttgggtagtacctgctaggacaatttcttggcaattgtcttactactagggatcagtaagatttagattctgagcccataatggcaacagccccctcacctatgggaagctgacttccctcagtcgggcacttctcatgggggctgaacatggttcctgccattctgttacccactctcccaggtgagccctggattggctcccagaaggcctttgtaaaatcagtagccatcctgcaggcaggtgggagcaacaggggcttcagtagcttcattttcctgtcttgcagacagagacccttggctaccactgtgctgctaataggataagtactctgttgccagattaccatgccttttatacaaaaccaaattaacttacctaatacctgacacctctttgggctctgaactgctttctctcatcaagcatgctagcactctagacagaattctagaaatttggcagacagtggaagcctttaattgaacttactccttcgttgactgaaaggagttttaaattctgagctcctgagatactgactagcaaccatggaatgaatgtgtgaccagaaagtggctttgacaccaagtgctactgtccctttgtaattggcttctaacagattcaaccagaaataattgataatgtgaatttttgttaattgttcacttgtagaaaatagaacatgtatcaccctttgttaggtagacatgaacttttcctgcacaaagccttgctttta

SEQ ID NO: 183544 - DNA, 1587 bp, Homo Sapiens
  misc_feature (1365)..(1380): n is a, c, g, or t
ttggcactaatgagctctccagaaaattgatgcagttgcagcatgagaaagccgaactagaacagcatcttgaacaagagcaggaatttcaggtcaacaaactgatgaagaaaattaaaaaactggagaatgacaccatttctaagcaacttacattagaacagttgagacgggagaagattgaccttgaaaatacattggaacaagaacaagaagcactagttaatcgcctctggaaaaggatggataagcttgaagctgaaaagcgaatcctgcaggaaaaattagaccagcccgtctctgctccaccatcgcctagagatatctccatggagattgattctccagaaaatatgatgcgtcacatcaggtttttaaagaatgaagtggaacggctgaagaagcaactgagagctgctcagttacagcattcagagaaaatggcacagtatctggaggaggaacgtcacatgagagaagagaacttgaggctccagaggaagctgcagagggagatggagagaagagaagccctctgtcgacagctctccgagagtgagtccagcttagaaatggacgacgaaaggtattttaatgagatgtctgcacaaggattaagacctcgcactgtgtccagcccgatcccttacacaccttctccgagttcaagcaggcctatatcacctggtctatcatatgcaagtcacacggttggtttcacgccaccaacttcactgactagagctggaatgtcttattacaattccccgggtcttcacgtgcagcacatgggaacatcccatggtatcacaaggccttcaccacggagaagcaacagtcctgacaaattcaaacggcccacgccgcctccatctcccaacacacagaccccagtccagccacctccacctccacctccgccacccatgcagcccacggtcccctcagcagccacctcgcagcctactccttcgcaacattcggcgcacacctcctcccagccttaatgcatgagcttagtctgaatttcaagttgggactcatccaatggagccgtctactcaacgccaaaggcttccttctctggcatatttggatatgacttatttgcactgaggttatctaggcttcactatccattgtgttgtaaatgtttgtcagaaatgcagccagtgttgtgggtctacaacactaaccagacgactttttccatcagtgttttacttgaatcttcatgtacgtccattccctggctggaaccttcgctgtttggtatttggtatttcagcagcagtgtgcaatttttgcttggcccagagcttcattctcctggcttttacgtttgtaaaagaaaaagggatatcnnnnnnnnnnnnnnnnccatgaatctgcagaaaattactgagctgttgttaccctcctctcattataatagtgtttaccaaacataccaataattcagcactacattcagacctttgaaaatctggctttcagtgtagaacagaaagttagatgaatcagtgcccaagacatattttctgtttacagaactttctacagatacattttttacaggttattttc

SEQ ID NO: 183545 - DNA, 1491 bp, Homo Sapiens
  misc_feature (1149)..(1159): n is a, c, g, or t
actttgtacaaaaaagttggattataatagtgtttaccaaacataccaataattcagcactacaattcagacctttgaaaatctggctttcagtgtagaacagaaagttagatgaatcagtgcccaagacatattttctgtttaacagaactttctacagatacattttttacaggttattttcattgtgttattgacatccatgtctctcgtaaaacagatggcccaaagtaatgaatcatgtggctgtaccttctccacataaatgggatggataattatcgtatattaagatgtgattctcttttttatccttaatgttaatctacttaacctggccccctctaacatgagtcgataaatgttgtcctactcaccggtggtttcaatggctaattagaatgtgttatttgatttctgctgcagaaggcagtgtgattgtaacaaaaacaatgcggcttccccctttcgtacttcatttgtgttctcttaaaatagagtttgaacaaatattttaaaggtgcaaaataccattagaaaatactatttgaaatggacattatcgcattatcttggcataatggccagaaaatattgtattgcttggcagaaaagaaaataaggtctaaaggaaagtagcacattagcattgatggctgttcatttcacccagtataagcaagtgcagtgtacaaagaagtatattctgaatacattatttccattcatttagcacaaataaatcatttggtttcactttgcagtggaacactgagtcactcttttcttaacacgtgcaacatcttaatttttgtttttcagcagttgctgttttgtactttggtagtgaagtgatttttaccacctgtgtttgcatatttatatatgctgtggatgaaaataacttactagagaatgtatattttatgacaagaatgtgtatctgttggatataatcagagaactgaaaagtaatttatcagtaatttttaagagtccatgttttgtgacaaccatctctaatagccaactctttattaaacacactcctaaaaataaggaaccatgacattgtagatatttaatattgtacagtatagaaacctccatttttgccttcgaatgcatatttaagagttaacagaatgnnnnnnnnnnngtcttgttggataatagtgtttgactagcgttttaagaacttgagagtaaaagcaacaataagattttttcacctcttcctgcttccacccccaaactgagaacatcactcaattgtttggaagaaactgtaggtctatataaattttatttataatgtatgtgtaatatacataatcataatacagttctcagatgcagggaagaagtttggcatttaatcattgaggctttaggtttttgatgtgatcagactgggccatgtcaaacccggaattttcaccaacagttcactcaccctcttggtacattgccattccaaggaagttctga

SEQ ID NO: 183546 - DNA, 1930 bp, Homo Sapiens
  misc_feature (1210)..(1277): n is a, c, g, or t
  misc_feature (1419)..(1439): n is a, c, g, or t
ctttgtacaaaaaagttggcttcgaaataaaacacagctccttcaaacagcactttttccacataaatctagttgcctctccctgtggacattcagaactgatagaacaaacactactcttttgaatttgatggttcgtgtcctttaaagtgtttgaggacctatgcagagcctgtaacacttgggtagtacctgctaggacaatttcttggcaattgtcttactactagggatcagtaagatttagattctgagcccataatggcaacagccccctcacctatgggaagctgacttccctcagtcgggcacttctcatgggggctgaacatggttcctgccattctgttacccactctcccaggtgagccctggattggctcccagaaggcctttgtaaaatcagtagccatcctgcaggcaggtgggagcaacaggggcttcagtagcttcattttcctgtcttgcagacagagacccttggctaccactgtgctgctaataggataagtactctgttgccagattaccatgccttttatacaaaaccaaattaacttacctaatacctgacacctctttgggctctgaactgctttctctcatcaagcatgctagcactctagacagaattctagaaatttggcagatagtggaagcctttaattgaacttactccttcgttgactgaaaggagttttaaattctgagctcctgagatactgactagcaaccatggaatgaatgtgtgaccagaaagtggctttgacaccaagtgctactgtccctttgtaattggcttctaacagattcaaccagaaataattgataatgtgaatttttgttaattgttcacttgtaggaaaatagaacatgtatcaccctttgttaggtagacatgaacttttcctgcacaaagccttgcttttagagaatgcccaataaggcaagaaaaagcatagtaacttgtgctttgagagctcaatatttgtatcttatcagtacagaagaaatatttctgtgtaacttgatcttctgtctagtacttgtcttataggtaaccaacactgaaaactttgtagtgatgactaccaaagaaatacatagtaaaacaaccttttatttccaaattgttaaagagccagccattgatgctgctacatgagttccatgctcaagagccattgtaagagattaaggggtttctagnnnnnnnnnnnnnnnnnnnnnnnnnnnnnnnnnnnnnnnnnnnnnnnnnnnnnnnnnnnnnnnnnnnngattaaaacatacacacagctgttagcataaagtcgtggggggcattttctggaatgctcagcagttctgattaactgccaagcccaggttgcctctcatgaggcaactgaaaaaatcctgtgtcttgatagcatgggtgcnnnnnnnnnnnnnnnnnnnnnctgcattcatgccttaactcgggttactgcacaactttagttcttgacttagtctgcaccgtcatctagattgtattgtacatctcggtctgaacttcatcctggcaaaaacaaagttgcaggcacaacagtttaagaatgcattcctccagaagagtatctggtcaggttgaccctgagccttctttggacttgatttggaacttagcctggaaagcgaaagtggactgtccaacagaaagatgtcaacaaggaaaagaggagagccaagcgctagcatgccttttgcctctgcatatctgtgcacactgtatgttgttcatgatagcttgtctacaacttgactaggttggagttctggtaatagtgggaatcttgacattcttggtcagagtttagagagatgtaagacttttcaattaatgtcttatttactccttaatgttgattagtctttgatacatgtgctgaatcagaaccctaaataaaga

SEQ ID NO: 183547 - DNA, 1219 bp, Homo Sapiens
gaagcagggccacgttgcattgcagttgcacagtattgtaaggatcaagcagcgatgtcctaaccgtaaacgaagaggaaggtgaaatgaaggcaaagagaatcaaccacttcccaaaacttggccacaaaccgttacagaataagtcctgcaaagtggatcaaagtgacccactgctacctcaggcccagatggtgtgacctgcgtggaaatcatataatgtccctaacattattgcaatagagccactaacgggccattttctaaactacactgttgacatcgttaaaacctaagaggccagtgcccccaagtgagcagctgcatccgctgagagtaagcggcgtgggctgcaacccgcagatgcgtacagaactgaaaatgccaaatatgtacacaaaattgttgacaaaagggttttcttctaaaatcaagatttaactatcaaaaataaatttctacatttaaatgtatatatcaacataattggtctgtaataattatcttaaatagttttcacactttcccagttcgagagcaggacgccggcttctcagctgtgtgagtctggcttcggattctcttcaattcctcgtgcaaagagtcgaaccagctggcagtggactctgacctcgatggcagggctgtgcaggacctccccgtcgcagttccaggagctgttggagacggtgcagcagcaggaggggtggctgctgcaaatgtgcccaaagcgcttcttccccccctccttgaggtcgctgtcctcatcctccatgtgcttcgacgtaaactggaatttcttgacgcgataaacttcaacaaaagtgaagtcaaactggccctgctggttggtgtgcctgatgagaaatctcagaaaattgaacctggagcatttccggatgaggatgaggtcagaagacccgtctcccaagtgggcagccggggagaggcccctggggctccggcgacaagcacaggacatgtttgtggcattgatggccagaaacttcccacagacgacttgccactcctccacgtcctccgcagcttccaaaccatacagtgctttcttctgctcctcctccagctgctgcttgctttgcctgcaaacaaagcatcctgcccggcagggcttcctatcccttggagatcccaccgtgtgttgtgcagggaggaaggacactgtcccttcatagcagtggtgggagaggaaggccaa

SEQ ID NO: 183548 - DNA, 2162 bp, Homo Sapiens
ttggatttaatagttgcatatcatccaatctagtatacagatggggagtctgtagtccagagaagagaggtagcctccttcaggtcacacagcaaattggacacagagcagagtctatgcctactgccactgtgctattcacatgatgaccaactccaggcccctttctttcctcagaaacaggcagtgtgggaacctctttgaggttgggtgaggggtatcaccaggggctgaggagattacagtctcacaggctgggccagatgccctaggcaaggtgagcccagggtgctgctttccagcagtcagggtttcttgctggcaaagaactgcaccaccctcccctaggcttcctggacgtgtcgggaatttctctcttggacaacagcaatgccagtgtgtggcccagcctgccctcttccacagaactgaccaccacagctgtctcaacctcagggccagaggacatctgctccagcagcagttctcatgagcggggtggtgaggctacatggtctgggtcagagtttgaggtctccttcctggacagcccaggtgcccaagcccaggcggaccacctgcctcagctgactcttcctgacagtctcacctctgcagcctcaccagaagatgggctgtccgccgagctgcttgaagctcaggctgaggaggaaccagcaagcacagagggcctagatactgggacggaggctgaggggctggacagccaggcccagatctctaccacagaataacaccctgggctgtgacaaggcccatgatgacatttcatgaggcccagatgtgggcaggcagcccgggctgcactatgcggtcaggattccttgctgctttggtgggacatgaggcctcagtgggtggtgagagggggccatgggccttgtgggaggatatcttttggccgtgtaccctcaggtccagtgcttggtcctgctctggtcactggggcttcccaggaggcagcagggtctggtcataatccagtgtgaagatgaggtgaggaaggaaggggttgctgtccagtgttggcctggtcgctttgattcttcctgcacagctcagcccaccccatctgtactggaagggaccctggagccctgggaccaccccctttcaagtcccaaacactgagtcctctgtcatgtgtccttgtccctaggctacaatgctacacttggctcaggctgatcaccatgctagtcacaggagggagagagaggcagtgtacttgcccccatctcctggagggaggtgcgttggaaattctaggcccttcagcagagacccatttgtgcccagaccacaatatttcttcttcctcagggactacatgccacagacctgtatccccagtggcaactcctgttagctcccaaacttaaacagtgatctcttctaaatatacaaggcatctacccagccccaatagtgaataaaagtcacaaatttaagttcaacaccctaagcaatttctcaaagccagtctacctgactaggtctatccacgcacggttcccaaccccaagggggaattaggggattagattaagagtaggtaaagacccttttgttctttcctgttgtaggggaggaagctgttctccccaccccaggtgcctttggaggttaaggctaggttaggccctgcactccacctggggacggcccctcatcacctgaagtcctctgctgtgttgactggaccctcagttcccacactgctaattactatgaaagctgctctggcctcgtcttctagcttgtgcctagttgaaagtctcacctttacaggatcatttgtaatgctggtgtacatgcagggaactcacaagctgtgtcaggtatgcaggacaaggaatgtctgctctggggggcacaggccaactatatggagggagggtcccaaattagcaaacccttcatttaaagcaaacccttgtcaagcctaccagagcagctgatacgtgtgcataacagtgaggcattgtgtcctggatcgtctgggagcccagtgtccagtctgctggaatgcagaagtagaacagaatcgccacaggactgttctggggccagcttcccttaactctgtagcctggcagtctgacccaaattgccctcaccaaagggttctgggttcttcc

SEQ ID NO: 183549 - DNA, 1279 bp, Homo Sapiens
ttctggtgaggctgcagaggtgagactgtcaggaagagtcagctgaggcaggtggtccgcctgggcttgggcacctgggctgtccaggaaggagacctcaaactctgacccagaccatgtagcctcaccaccccgctcatgagaactgctgctggagcagatgtcctctggcccctgaggttgagacagctgtggtggtcagttctgtggaagagggcaggctgggccacacactggcattgctgttgtccaagagagaaattcccgacacgtccaggaagcctgggtccataactcgctgcactggaggtgggggctgaagaggagtctccatgaaatggggaagtccatcagggtctggagcactgtggctgggactcccaggcccaggaaggggatcctccatggaggagccaggtgcctgcagcagggcctccatgtagtcactctgcctggaacctgtctccagggaaggagagtcctcgggggtgggtccaggtggtagagcatcaggtggtggggcaccaagtggtagagcagaaggtggtggggtgccaggtggcttcttgtggtagctggggggctgagttgggatccggtgtagatacccatagccaatgccacatcccagactgccctctccaccccaggctgcgttgggagttacagtcacctcccggcaggagtctgacttggagttatacaccatcagcttcaagggcttcccctcatgagactcgatgagcgtaaagaagtcctcggactcctggagaatctggtccgaaccaaccacatagtctgtgtaggggcgcaggccggcaagggcagcaggtgaagatggttccacatccagcacatgccacacctgctcactggccctgcggaagctgcagaagcgcacactggcacccagtaggccctggccgccccacatgttgctgggcaccacctccacctcgcgcaccctcatggtcttcatattgaacacctccagcttcacgggcttctccacattggctttcagtagtgccttcagggtgtcattctccttgttcagcctcgagtgcccaatggtgatgatgaagtcaaagtagggctccaggcccgcctgctgggctggggagttctcctgcaccccgtggaggtggaagccctcggcgccgcctgcgggctgctcagcgctgacgcccaggcccatggcagcggctccgctcggcacccaggtccagtcccgctgcgcctacccggaccgacccggcgccgagtagcaccgacccaa

SEQ ID NO: 183550 - DNA, 1301 bp, Homo Sapiens
ttgggacctttactgaatccacacatgttgaaattaaaaacttctcgacagaaaagttgttacaacgaatttaagagattctccctcaatatgtttctgcatttgcaaatactgatggaggatatttgttcattggtttaaatgaagataaagaaataattggctttaaagcagagatgagtgacctcgatgacttagaaagagaaatcgaaaagtccattaggaagatgcctgtgcatcacttctgtatggagaagaagaagataaattattcatgcaaattccttggagtatatgataaaggaagtctttgtggatatgtctgtgcactcagagtggagcgcttctgctgtgcagtgtttgctaaagagcctgattcctggcatgtgaaagataaccgtgtgatgcagttgaccaggaaggaatggatccagttcatggtggaggctgaaccaaaattttccagttcatatgaagaggtgatctctcaaataaatacgtcattacctgctccccacagttggcctcttttggaatggcaacggcagagacatcactgtccagggctatcaggaaggataacgtatactccagaaaacctttgcagaaaactgttcttacaacatgaaggacttaagcaattaatatgtgaagaaatggactctgtcagaaagggctcactgatcttctctaggagctggtctgtggatctgggcttgcaagagaaccacaaagtcctctgtgatgctcttctgatttcccaggacagtcctccagtcctatacaccttccacatggtacaggatgaggagtttaaaggctattctacacaaactgccctaaccttaaagcagaagctggcaaaaattggtggttacactaaaaaagtgtgtgtcatgacaaagatcttctacttgagccctgaaggcatgacaagctgccagtatgatttaaggtcgcaagtaatttaccctgaatcctactattttacaagaaggaaatacttgctgaaagccctttttaaagccttaaagagactcaagtctctgagagaccagttttcctttgcagagaatctataccagataatcggtatagattgctttcagaagaatgataaaaagatgtttaaatcttgtcgaggctcacctgatggaaaatggactgggctactgagatatttttcattatatatttgataacattctctaattctgtgaaatatttctttgaaaactttgcaagttaagcaacttaatgtgatgttggataattgggttttgtctattttcacttctccc

SEQ ID NO: 183551 - DNA, 1848 bp, Homo Sapiens
  misc_feature (1575)..(1605): n is a, c, g, or t
actttgtacaaaaaagttggcctacccagaggagaaggtagatttggagtaagccgccgtcgacataattcctctgatggtttttttaacaatggtcccctacgaactgcaggagattcttggcaccagccctccctgttccgccatgattctgtggactctggtgtctctaagggagcatatgctggaatcacagggaacccatctggttggcatagctcttcccgaggtcatgatggcatgagccaacgtagtggaggtggcacagggaaccatcgccattggaatggcagcttccactcccggaaagggtgtgcttttcaggaaaagccacctatggagattagggaagaaaagaaagaagacaaggtggaaaagttgcagtttgaagaggaggactttccttccttgaatccagaagctggcaaacagcatcagccatgcagacctattgggacaccttctggagtatgggaaaacccgcctagtgccaagcaaccctccaagatgctagttatcaaaaaagtttccaaagaggatcctgctgctgccttctctgctgcattcacctcaccaggatctcaccatgcaaatgggaacaaattgtcatccgtggttccaagtgtctataagaacctggttcctaagcctgtaccacctccttccaagcctaatgcatggaaagctaacaggatggagcacaagtcaggatccctttcctctagccgggagtctgcttttaccagtccaatctctgttaccaaaccagtggtactggctagtggtgcagctctgagttctcccaaagagagtccctccagcaccacccctccaattgagatcagctcctctcgtctgaccaagttgacccgccgaaccaccgacaggaagagtgagttcctgaaactctgaaggatgaccggaatggagacttctcagagaatagagactgtgacaagctggaagatttggaggacaacagcacacctgaaccaaaggaaaatggggaggaaggctgtcatcaaaatggtcttgccctccctgtagtggaagaaggggaggttctctcacactctctagaagcagagcacaggttattgaaagctatgggttggcaggaatatcctgaaaatgatgagaattgccttcccctcacagaggatgagctcaaggagttccacatgaagacagagcagctgagaagaaatggctttggaaagaatggcttcttgcagagccgcagttccagcctgttctccccttggagaagcacttgcaaagcagagtttgaggactcagacaccgaaaccagtagcagtgaaacatcagatgacgatgcctggaagtaggcatataaatgctcacagttaaatctgacccagtaaactctgtgtgtttagggagtatacaaaagaaatcgttcttttccttttcttatgttgttgaatacttcattcacaagggaaataatcatatcccaaagagagagcaattggcttgttttgcttttgttattgttcttccctgttatctgctttatagagagaagtttgtgtggtgggacagattttttannnnnnnnnnnnnnnnnnnnnnnnnnnnnnnccagtatatatggggcgatgcacaggtaggagctggcagtgcagggaagaggagacactggtctgcagcaacagcttctactaccagcccttggggcactcacccctgtgatcaagcaatcattgtcaatgacaaagtgactattgaagttataattgtattaaattaatgctaataatttgggatattttattttattttggctgctcgggtaactttagcccttaaccaagcatatgtggg

SEQ ID NO: 183552 - DNA, 1587 bp, Homo Sapiens
  misc_feature (1356)..(1385): n is a, c, g, or t
ttggctgctaacatctttggacttcctggctgatttataaatttagtatccagttcctcatatgctgcatttttttgtacagttcctgagtagtctcacttttgagagtatctattaagtgcataccagggaatgtttaatccctctgtctcaactgtcagctgttttgttgactaaggcctttgtataaactatgcttcatgttacacaacaggtttgacattctgttgtctctccactcttgtacttcacagaaaacccgcctagtgccaagcaaccctccaagatgctagttatcaaaaaagtttccaaagaggatcctgctgctgccttctctgctgcattcacctcaccaggatctcaccatgcaaatgggaacaaattgtcatccgtggttccaagtgtctataagaacctggttcctaagcctgtaccacctccttccaagcctaatgcatggaaagctaacaggatggagcacaagtcaggatccctttcctctagccgggagtctgcttttaccagtccaatctctgttaccaaaccagtggtactggctagtggtgcagctctgagttctcccaaagagagtccctccagcaccacccctccaattgagatcagctcctctcgtctgaccaagttgacccgccgaaccaccgacaggaagagtgagttcctgaaaactctgaaggatgaccggaatggagacttctcagagaatagagactgtgacaagctggaagatttggaggacaacagcacacctgaaccaaaggaaaatggggaggaaggctgtcatcaaaatggtcttgccctccctgtagtggaagaaggggaggttctctcacactctctagaagcagagcacaggttattgaaagctatgggttggcaggaatatcctgaaaatgatgagaattgccttcccctcacagaggatgagctcaaagagttccacatgaagacagagcagctgagaagaaatggctttggaaagaatggcttcttgcagagccgcagttccagtctgttctccccttggagaagcacttgcaaagcagagtttgaggactcagacaccgaaaccagtagcagtgaaacatcagatgacgatgcctggaagtaggcatataaatgctcacagttaaatctgacccagtaaactctgtgtgtttagggagtatacaaaagaaatcgttcttttccttttcttatgttgttgaatacttcattcacaagggaaataatcatatcccaaagagagagcaattggcttgttttgcttttgttattgttcttccctgttatctgctttatagagagaagtttgtgtggtgggacagattttttaannnnnnnnnnnnnnnnnnnnnnnnnnnnnnccagtatatatggggcgatgcacaggtaggagctggcagtgcagggaagaggagacactggtctgcagcaacagcttctactaccagcccttggggcactcacccctgtgatcaagcaatcattgtcaatgacaaagtgactattgaagttataattgtattaaattaatgctaataatttggataattttattttattttt

SEQ ID NO: 183553 - DNA, 1305 bp, Homo Sapiens
aaaagttctgtaattactactgacctcccaaggtgatatttcaaccgttgccttcacccttattccagaaatactaaaactttagaattatttttgaggcaatcatcttgattttcctctcctacaaggtaaatatttttaagtgtaaagttttggagcttatatttatgaatatttgcaaggcttttttcccctccgcctcctttcatgcaaacaattgaagtggctagcttttctcctctcctggaataaaggaagtgaattagcaattgaatatataacctaggacttctctaaaattaggcacctgtgggtacccttagggtccatatgcttacaatatgagtttctatcaccattattacttgttttttgaaggcctgatgcaaagcctattaagatattgaaaaggactaatagctatttatccatttgcctctccatacttcatcatcttagtcacctactgccaccttcgaaaaacacggagagcacctacccagaggagaaggtagatttggagtaagccgccgtcgacataattcctctgatggtttttttaacaatggtcccctacgaactgcaggagattcttggcaccagccctccctgttccgccatgattctgtggactctggtgtctctaagggagcatatgctggaatcacagggaacccatctggttggcatagctcttcccgaggtcatgatggcatgagccaacgtagtggaggtggcacagggaaccatcgccattggaatggcagcttccactcccggaaagggtgtgcttttcaggaaaagccacctatggagattagggaagaaaagaaagaagacaaggtggaaaagttgcagtttgaagaggaggactttccttccttgaatccagaagctggcaaacagcatcagccatgcagacctattgggacaccttctggagtatgggaaaacccgcctagtgccaagcaaccctccaagatgctagttatcaaaaaagtttccaaagaggatcctgctgctgccttctctgctgcattcacctcaccaggatctcaccatgcaaatgggaacaaattgtcatccgtggttccaagtgtctataagaacctggttcctaagcctgtaccacctccttccagcctaatgcatggaaagctaacagggatggagcacaagtcagatccctttcctctagccgggagtctgcttttaccagtccaatctctgttaccaaaccagtgggtactggctagtggtgcagctctgagttctcccaaagagagtccctccagcaccacccct

SEQ ID NO: 183554 - DNA, 1126 bp, Homo Sapiens
  misc_feature (520)..(594): n is a, c, g, or t
  misc_feature (956)..(977): n is a, c, g, or t
gctccatagagacaccagaatctacaggattcatggcggaaacagggagggtggttccaagaatctcctgcagttcgtaggggaccatttgtaaaaaaaccatcagaggaattatgtcgacggcggcttactccaaatctaccttctcctctgggtaggtgctctccgtgttttttgaaggtggcagtaggtgacttagctgactgtggtgttgagaaatttagccaagcaggaacaaaatcatgctgcgccatttaggtccagtgtctcctttcagtaaggtgaggcatccaacctcatggccaggatcccagagtgtaacctctgtggtcccgtttctgaactcgagtcggccagctggatctcccacaaggtttccttgttaaaagggtgcttaagtaacctggccggcagcacgacttatgatgaagcacgaagaagccaggttctgtgtcgatcactctctcagtcccctcaactgctcatcttaaactatttggttcctgacacgtttccaaannnnnnnnnnnnnnnnnnnnnnnnnnnnnnnnnnnnnnnnnnnnnnnnnnnnnnnnnnnnnnnnnnnnnnnnnnnggaaagagctgtatctatgttcacctcattcaacttccttgagttatggcactatgatgttgcttaattaggtaagacatggatatttgcaccgagtgcaaatactgttcataacaaggtcatagctagaaagacagatgggctcaagtgtggacaaataatgtcatcaaggtaatagatcaaaaatattaaagccctataaaagatctgagcagtcaactccaaaacatccacatgacaaagcccttaaaatacaaatctcattactcttactcatgcaactgctaaaaaatagtgtgcagatatgtatttatatttgccttaaccttcaaaatctagggacataaatcttgtctttgttnnnnnnnnnnnnnnnnnnnnnntagacaggaatttgctacacttttccctccacgaacagcagctttcaaggcaaatttcttggtataaagctactaaatgtatattctatgtctttggcctttactatttataaattcagagcaaagttaaaacattagaacgatgccaa

SEQ ID NO: 183555 - DNA, 1662 bp, Homo Sapiens
  misc_feature (482)..(503): n is a, c, g, or t
  misc_feature (904)..(939): n is a, c, g, or t
ttggctttgttatggttgtggactagccgcctctgccgggtcgacaagctggggacgcgtcctcagacgcagcgtctagtccctggccatagctccgccgctgcccgagtgatagattcgtgtggcctttcaaatgattgtgaagtggtggaaatggatccaaaataataagtgacttctctaccaaagcatagaagattcttcatatctccttccagtggctcaatttagattttgggaaggagcagaacaagtgaaacacagaaaactgaagagaagaaatcctcattttggacctatatttctccttgactatttcttaatatccatcctacccatcgttctaatgttttaactttgctctgaatttataaatagtaaaggccaaagacatagaatatacatttagtagctttataccaagaaatttgccttgaaagctgctgttcgtggagggaaaagtgtagcaaattcctgtctannnnnnnnnnnnnnnnnnnnnnaacaaagacaagatttatgtccctagattttgaaggttaaggcaaatataaatacatatctgcacactattttttagcagttgcatgagtaagagtaatgagatttgtattttaaggactttgtcatgtggatgttttggagttgactgctcagatcttttatagggctttaatatttttgatctattaccttgatgacattatttgtccacacttgagcccatctgtctttctagctatgaccttgttatgaacagtatttgcactcggtgcaaatatccatgtcttacctaattaagcaacatcatagtgccataactcaaggaagttgaatgaggtgaacatagatacagctctttccccttccccccctttttaaatgtaacaaatactttttatgnnnnnnnnnnnnnnnnnnnnnnnnnnnnnnnnnnnntttggaaacgtgtcaggaaccaaatagtttaagatgagcagttgaggggactgagagagtgatcgacacagaacctggcttcttcgtgcttcatcataagtcgtgctgccggccaggttacttaagcacccttttaacaaggaaaccttgtgggagatccagctggccgactcgagttcagaaacgggaccacagaggttacactctgggatcctggccatgaggttggatgcctcaccttactgaaaggagacactggacctaaatggcgcagcatgattttgttcctgcttggctaaatttctcaacaccacagtcagctaagtcacctactgccaccttcgaaaaacacggagagcacctacccagaggagaaggtagatttggagtaagccgccgtcgacataattcctctgatggtttttttaacaatggtcccctacgaactgcaggagattcttggcaccagccctccctgttccgccatgattctgtggactctggtgtctctaaggagcatatgctggaatcacagggaacccatctggttggcatagctcttcccgaggtcatgatggcatgagccaacgtagtggaggtggcacagggaaccatcgccattggaatggcagcttccactcccgggaaaggtgtgcttttcaggaaaagccactatggagattaggaagaaaagaaagaagaacaagtgaaaagttgcagttt

SEQ ID NO: 183556 - DNA, 1809 bp, Homo Sapiens
  misc_feature (1709)..(1717): n is a, c, g, or t
ttgggttcttgctgcctcttccggctgcggggcgagtagtcgtccgacgtctggccgtgagacgtttcgggagccggagtctctccaccgcagacatgacgaagggccttgttttaggaatctattccaaagaaaaagaagatgatgtgccacagttcacaagtgcaggagagaattttgataaattgttagctggaaagctgagagagactttgaacatatctggaccacctctgaaggcagggaagactcgaaccttttatggtctgcatcaggacttccccagcgtggtgctagttggcctcggcaaaaaggcagctggaatcgacgaacaggaaaactggcatgaaggcaaagaaaacatcagagctgctgttgcagcggggtgcaggcagattcaagacctggagctctcgtctgtggaggtggatccctgtggagacgctcaggctgctgcggagggagcggtgcttggtctctatgaatacgatgacctaaagcaaaaaaagaagatggctgtgtcggcaaagctctatggaagtggggatcaggaggcctggcagaaaggagtcctgtttgcttctgggcagaacttggcacgccaattgatggagacgccagccaatgagatgacgccaaccagatttgccgaaattattgagaagaatctcaaaagtgctagtagtaaaaccgaggtccatatcagacccaagtcttggattgaggaacaggcaatgggatcattcctcagtgtggccaaaggatctgacgagcccccagtcttcttggaaattcactacaaaggcagccccaatgcaaacgaaccacccctggtgtttgttgggaaaggaattacctttgacagtggtggtatctccatcaaggcttctgcaaatatggacctcatgagggctgacatgggaggagctgcaactatatgctcagccatcgtgtctgctgcaaagcttaatttgcccattaatattataggtctggcccctctttgtgaaaatatgcccagcggcaaggccaacaagccgggggatgttgttagagccaaaaacgggaagaccatccaggttgataacactgatgctgaggggaggctcatactggctgatgcgctctgttacgcacacacgtttaacccgaaggtcatcctcaatgccgccaccttaacaggtgccatggatgtagctttgggatcaggtgccactggggtctttaccaattcatcctggctctggaacaaactcttcgaggccagcattgaaacaggggaccgtgtctggaggatgcctctcttcgaacattatacaagacaggttgtagattgccagcttgctgatgttaacaacattggaaaatacagatctgcaggagcatgtacagctgcagcattcctgaaagaattcgtaactcatcctaagtgggcacatttagacatagcaggcgtgatgaccaacaaagatgaagttccctatctacggaaaggcatgactgggaggcccacaaggactctcattgagttcttacttcgtttcagtcaagacaatgcttagttcagatactcaaaaatgtcttcactctgtcttaaattggacagttgaacttaaaaagtttttgaataaatggatgaaaatcttttaacggagacaaaggatggtatttaaaaatgtagaacacaatgaaatttggtatgccttgannnnnnnnncatttcacacagagatttataagggtaaggttaatatcttacttgataaggatttttaagatactctataatggattaaaatttttagaact

SEQ ID NO: 183557 - DNA, 1765 bp, Homo Sapiens
aattgatgagcaatgctttctttataatagccaactttgtacaaaaaagttggctaaatgtgtcatggagatgatgtggaagtggattatagaagttatgaggtaactgtggagaattttttacgggtattaactgggaggatcccacctagtactcctcggtcaaaacgtcttctttctgatgacagaagcaatattctaatttatatgacagggcatggtggaaatggtttcttaaaatttcaagattctgaagaaattaccaacatagaactcgcggatgcttttgaacaaatgtggcagaaaagacgctacaatgagctactgtttattattgatacttgccaaggagcatccatgtatgtgcgattttattctcctaacataatggctctagctagtagtcaagtgggagaagattcactctcgcatcaacctgatcctgcaattggagtccatcttatggatagatacacattttatgtcttggaatttttggaagaaattaacccagctagccaaactaatatgaatgacctttttcaggtatgtcccaaaagtctgtgtgtgtctactcctggacatcgcactgatctttttcagagggatcctaaaaatgtactgataactgatttctttggaagtgtacggaaagtggaaattacaacagagactattaaattgcaacaggattcagaaatcatggaaagcagctataaggaagaccagatggatgagaaactaatggaacctctgaaatatgctgaacaacttcctgtagctcagataatacaccagaaaccgaagctgaaagactggcatcctcctgggggctttattctgggattatgggcacttattatcatggttttcttcaaaacttatggaattaagcatatgaagttcattttttagacttgatgatgaatgaagaatgcatggaggactgcaaacttggataataatttatgtcattatatatttttaaaaatgtgtttctcttgtatgaattggaaataagtataaggaaactaaatttgaatcaactattaattttataacttaaagaaaaataattgttaatgcaactgcttaatggcactaaatatattccagttttgtattttgtgtattataaaagcgaatgagacagagatcagaatacattgactgtttttgaaaatagtaatttccccttatccccttttcatttggaaaagaaacaattgtgaagacattaaattctcactaacagaagtaactttggttaattattttttgtatatcctcccaatcttttgacttatgcacatattttttcccaatatggagatcatatggaatgtactattttgtaatgtcttttttcattttacaatgtattatcaaccttttccctctcaaaaatacattgtgaatgactgcatagtattcactttatgaatatttaattcatttcacagtcttctattgttggaccacttacattgtaccaaatgttttcctttggtttattctttaatgtattaatattttactgctggtcactcatggaatcctgcagctttaattaaaagcaaagatgaaaaattggttttttaatctatggcactgacaatctccaggaccttatatgtttgttgtcagtttatttgggaaattttagacctttgataatttcacgtactgactgctcaagagaaacataccccattgtttttcatttgtaagcgttctgtgatcttctacaagtggtcacgtcctc

SEQ ID NO: 183558 - DNA, 1213 bp, Homo Sapiens
ctttgtacaaaaaagttggacatggccgtcctctcgaaaagcctcagccgggctgcgactgtcttggcagctgtgttgctcttgtccttcggcagcgtggccgctagtcatatcgaggatcaagcagaacaattctttagaagtggccatacaaacaactgggctgttctggtgtgtacatcccgattctggtttaattatcgacatgttgcaaataccctttctgtttatagaagtgtcaagaggctaggtattcctgacagtcacattgtcctaatgcttgcagatgatatggcctgtaatcctagaaatcccaaaccagctacagtgtttagtcacaagaatatggaactaaatgtgtatggagatgatgtggaagtggattatagaagttatgaggtaactgtggagaattttttacgggtattaactgggaggatcccacctagtactcctcggtcaaaacgtcttctttctgatgacagaagcaatattctaatttatatgacagggcatggtggaaatggtttcttaaaatttcaagattctgaagaaattaccaacatagaactcgcggatgcttttgaacaaatgtggcagaaaagacgctacaatgagctactgtttattattgatacttgccaaggagcatccatgtatgaacgattttattctcctaacataatggctctagctagtagtcaagtgggagaagattcactctcgcatcaacctgatcctgcaattggagtccatcttatggatagatacacattttatgtcttggaatttttggaagaaattaacccagctagccaaactaatatgaatgacctttttcaggtatgtcccaaaagtctgtgtgtgtctactcctggacatcgcactgatctttttcagagggatcctaaaaatgtactgataactgatttctttggaagtgtacggaaagtggaaattacaacagagactattaaattgcaacaggattcagaaatcatggaaagcagaaaccgaagctgaaagactggcatcctcctgggggctttattctgggattatgggcacttattatcatggttttcttcaaaacttattttatttaagcatatgaagttcattttttagacttttatgatcaatgaacaatgcatggaggactgcaaacttggataataatttatgtcattatatatttttaaaaatgtgtttc

SEQ ID NO: 183559 - DNA, 1200 bp, Homo Sapiens
gccaactttgtacaaaaaagttggctgaagccggtaaacatggccgtcaccgacagcctcagccgggctgcgactgtcttggcagctgtgttgctcttgtccttcggcagcgtggccgctagtcatatcgaggatcaagcagaacaattctttagaagtggccatacaaacaactgggctgttctggtgtgtacatcccgattctggtttaattatcgacatgttgcaaataccctttctgtttatagaagtgtcaagaggctaggtattcctgacagtcacattgtcctaatgcttgcagatgatatggcctgtaatcctagaaatcccaaaccagctacagtgtttagtcacaagaatatggaactaaatgtgtatggagatgatgtggaagtggattatagaagttatgaggtaactgtggagaattttttacgggtattaactgggaggatcccacctagtactcctcggtcaaaacgtcttctttctgatgacagaagcaatattctaatttatatgacagggcatggtggaaatggtttcttaaaatttcaagattctgaagaaattaccaacatagaactcgcggatgcttttgaacaaatgtggcagaaaagacgctacaatgagctactgtttattattgatacttgccaaggagcatccatgtatgaacgattttattctcctaacataatggctctagctagtagtcaagtgggagaagattcactctcgcatcaacctgatcctgcaattggagtccatcttatggatagatacacattttatgtcttggaatttttggaagaaattaacccagctagccaaactaatatgaatgacctttttcaggtatgtcccaaaagtctgtgtgtgtctactcctggacatcgcactgatctttttcaaagggatcctaaaaatgtactgataactgatttctttggaagtgtacggaaagtggaaattacaacagagactattaaattgcaacaggattcagaaatcatggaaagcagctataaggaagaccagatggatgagaaactaatggaacctctgaaatatgctgaacaacttcctgtagctcagataatacaccagaaaccgaagctgaaagactggcatcctcctggggggcttaattctggattatgggcacttattatcatgggtttcctccaaaccttatgg

SEQ ID NO: 183560 - DNA, 1370 bp, Homo Sapiens
ttggctttgaagaaaaatgtgcttcttgaatcaactgcagtctctcctctgcataagagctcttaagggtactagcaggatagaagcaaatgaaactgaaagctcatctgcagctcagaaaagcaaagacatggaattttaaagagtgaaggtagcatggtgtcggccatgggtgaacaagacacagccagacaatgtggaccaatttcttcaaactacggcttttctgctgtctgcttgcagtgttgatggtggtggtgctggtcatcaatgttactcaggtagagtacttggaccatgagactgtttcagccactttcatcgacagcagtggacagtttgtttcctcccaggtgacaggaattagccgaaatccctactgtggctatgatcagcagaccctgtccagccaggagcgcatggaggaggactccttgctggctgccttgcaccggcaggttcctgatgtgggcccagtcccctttgtgaagagcactgacccttcttccagctactttgtcatcttgaactctgctgccttctttaaggtgggaagccagcttgaggtgctggttcatgtgcaggattttcaaagaaagcccaagaagtatggtggagactacctgcaggccagaattcactccctcaagctgcaggctggggctgtgggcagggtggtggattaccagaatgggttttacaaggttttctttactttgctatggccaggcaaagttaaagtatccgtatctctggtccaccccagtgaagggatcagagttcttcagcgcttacaggaagataaaccagacagggtctatttcaagagtctcttccgttcaggaagaatttctgaaactactgagtgcaacgtgtgtcttcctgggaatctgcccctgtgtaactttacagacctctacactggggagccctggttctgcttcaaaccaaagaagctcccttgcagcagcagaattacccatttcaaaggtggatacctgaaaggtctcctaaccgctgcagagagtgctttcttccagagtggtgtcaatatcaaaatgccagtcaactccagtggacctgattgggtaactgtgattcccaggagaataaaagaaactaacagtctagaactatctcaaggctcaggaacttttccttctgggtattattataaagaccagtggaggcccagaaagtttaagatgcgtcagtttaatgaccctgacaacattacagagtgcttacaaagaaaagtggtgcatttatttggtgactcaacaatcagcaatggtttgaataccttactacatttgttccagatttagtggagtttaacttgggtagtcccaagaatgtgggtcccttcc

SEQ ID NO: 183561 - DNA, 1644 bp, Homo Sapiens
  misc_feature (771)..(788): n is a, c, g, or t
  misc_feature (1257)..(1269): n is a, c, g, or t
gggatcaaaaggaaaacaatagaacatgcatagtttttataaagaaggcttaggaaagagtaaaggaagtaaaggaaaagaggctcagacctcagaaataaactcctacatccctcagtagagagagctgaaagccatatgtaataggcactgaaagcctatgttttggcatgaatttactacaggcaaagccaccatcatatatctatatgtaccgaggaaggctagactgttaagtgtcacgtatatacggtctcaatggagcctcaggaagctattaaacaacctcaaatcacaaaatcagaaaagtgttgaacatttagaggaagaatagaaaggaaaaaaaagcctccaagttgtgtattatttgtcagtaaagcaaaacaaatgtgtaagcccacttatatttaataatgtctcactgaaattaaagtaataggggagagtctgaagtttccacagataaagagagtgctgtactcaaatttactacaaaattaataatagtaaatgtaaaatatgtatttatacagccttttgcagacttatgaactatctcaaattcacgaatcctattttttaaatacagttttaagtttcaaccacttgtatcaccagaattttgagacttaactcccatggttaagagatttccaagctgtgttcacacctgtagtcccagctacactgaaagctaaggcgggaggaccacatgagcccaggagttccagactagccttgctctatttaaagagcaagactccactgccnnnnnnnnnnnnnnnnnncaaagaagagaattccataaattacttggcttcttatattccatctcttcagtgaaacagtacatcacttaaggctaaaactatgtcttttatcactgtaagtccccagtactgcttacaccctacacagagtagatgctcaataaatgtttgatgatttggcaattaatgggataggagggaatattaatatgtgtcaataaattactctgaatattataaataggcttatgagtatggaaaagacccaccctcaaggaatttgtgatcttttctcttacatcatactgctgttttcaatatgccataatttttcttttcttcagggtggggtcagggaaacaacacaaaatagctgtggatgctgtttaacaatcagcatttcataagcagttaagaatttctgtactttcacaaaaatgaaaaaatctctctaaagattatgtgagcccaatctatgcccaaatcnnnnnnnnnnnnnaatatagagaactgattatgttcacttgtaacctgtcattccaaaattcttcaggatgtttaatgttcaagtgtccatattcccagtcccactggatgcctggcaggatgcaaccatctgaatgagtggaagtataatgtttgcaccaggtattatattaggagccttgaacccagaatatgtctgattaagtcttttagcccaataatttgccactgctgccaagtctggtaattttgaaggagaaagttcaaccataacggggtgatacagggcacccccgtactcaaaaaactttcaaagtgctttctaaacaagtttctctttctccttgaatacaacgtcagtcacaactgatggcagtacaatcgccaa

SEQ ID NO: 183562 - DNA, 1282 bp, Homo Sapiens
aattgatgagcaatgctttctttataaaagccaactttgtacaaaaaagttggggaattggaaaagatgtttattctgcagcaaaaaagctgaagatggatcgagtaaagcaggtttgtggtgattatttactgtctagaatggatgttaccagctgcatctcttaccgaaattttgcaagttgtatgggagactcccgtttgttgaataaggttgatgcttatattcaggagcatttgttacaaatttctgaagaggaggagtttcttaagcttccaaggctaaagttggaggtaatgcttgaagataatgtttgcttgcccagcaatggcaaattatatacaaaggtaatcaactgggtgcagcgtagcatctgggagaatggagacagtctggaagagctgatggaagaggttcaaaccttgtactactcagctgatcacaagctgcttgatgggaacctactagatggacaggctgaggtgtttggcagtgatgatgaccacattcagtttgtgcagaaaaagccaccacgtgagaatggccataagcagataagtagcagttcaactggatgtctctcttctccaaatgctacagtacaaagccctaagcatgagtggaaaatcgttgcttcagaaaagacttcaaataacacttacttgtgcctggctgtgctggatggtatattctgtgtcatttttcttcatgggagaaacagcccacagagctcaccaacaagtactccaaaactaagtaagagtttaagctttgagatgcaacaagatgagctaatcgaaaagcccatgtctcctatgcagtacgcacgatctggtctgggaacagcagagatgaatggcaaactcatagctgcaggtggctataacagagaggaatgtcttcgaacagtcgaatgctataatccacatacagatcactggtcctttcttgctcccatgagaacaccaagagcccgatttcaaatggctgtactcatgggccagctctatgtggtaggtggatcaaatggccactcagatgacctgagttgtggagagatgtatgattcaaacatagatgactggattcctgttccagaattgagaactaaccgttgtaatgcaggagtgtgtgctctgaatggaaagttatacatcgttggtggctctgatccatatggtcaaaaaggactgaaaaattgtgatgtatttgatcctgtaacaaagttgtggacaagctgtgcccctcttaacattcggagacaccagtctgcagtctgtga

SEQ ID NO: 183563 - DNA, 1652 bp, Homo Sapiens
ttggcggcggcagcgcacgtggtgacgtgcgagggggtgcggcgcgagcggtcggcggcggcggaggcagtgtctcccggtcgcgcgtggaggtcggtcgctcagagctgctgggcgcagtttctccgcctgctgcttcggcgcggctgtatcggcgagcgagcgagttcccgcgagttctcggtggcgctcccccttcctttcagtctccacggactggcccctcgtccttctacttgaccgctcccgtcttccgccgccttctggcgctttccgttgggccgattcccgcccgcttcctcctgcttcccatcgaagctctagaaatgaatgtttccatctcttcagagatgaaccagattatgatgcatcattatcacagaagaaattcgtgtctatagcttttaaggacttgattacatcattttcaagcctgatagttttggaatcaccattagagcttaagacacacctgccttcatttcaaccacctgtcttcataccctgacgaagtgcaccttttaacactcctttgtccttggattacttaagagttcccagaaatacatttgccaccaacagagtagccaaatttataaggaaaaatgattcccaatggatatttgatgtttgaggatgaaaattttattgagtcttctgttgccaaattaaatgccctgaggaaaagtggccagttctgtgatgttcgacttcaggtctgtggccatgaaatgttagcacacagagcagtgctagcttgctgcagtccctatttatttgaaatctttaatagtgatagtgatcctcatggaatttctcacgttaaatttgatgatctcaatccagaagctgttgaagtcttgttgaattatgcctacactgctcagttgaaagcagataaggaattggtaaaagatgtttattctgcagcaaaaaagctgaagatggatcgagtaaagcaggtttgtggtgattatttactgtctagaatggatgttaccagctgcatctcttaccgaaattttgcaagttgtatgggagactcccgtttgttgaataaggttgatgcttatattcaggagcatttgttacaaatttctgaagaggaggagtttcttaagcttccaaggctaaagttggaggtaatgcttgaagataatgtttgcttgcccagcaatggcaaattatatacaaaggtaatcaactgggtgcagcgtagcatctgggagaatggagacagtctggaagagctgatggaagaggttcaaaccttgtactactcagctgatcacaagctgcttgatgggaacctactagatggacaggctgaggtgtttggcagtgatgatgaccacattcagtttgtgcagaaaaagccaccacgtgagaatggccataagcagataaatagcagtttcaactggatgtctctcttctccaaatgctacagtacaaagccctaagcatgagtggaaaatcgttgcttcaaaaaagacttcaaataacacttacttgtgcctggctgtgctggatgggatattctgtgtcatttttcttcatgggagaaacagcccacagagctcaccaacaagtactccaaaactaagtaagagtttaagctttgagatgcaacaagatgagctaatcgaaaa

SEQ ID NO: 183564 - DNA, 1039 bp, Homo Sapiens
tttgtacaaaaaagttggatattctgtgctcatttttcttcatgggagaaacagcccacagagctcaccaacaagtactccaaaactaagtaagagtttaagctttgagatgcaacaagatgagctaatcgaaaagcccatgtctcctatgcagtacgcacgatctggtctgggaacagcagagatgaatggcaaactcatagctgcaggtggctataacagagaggaatgtcttcgaacagtcgaatgctataatccacatacagatcactggtcctttcttgctcccatgagaacaccaagagcccgatttcaaatggctgtactcatgggccagctctatgtggtaggtggatcaaatggccactcagatgacctgagttgtggagagatgtatgattcaaacatagatgactggattcctgttccagaattgagaactaaccgttgtaatgcaggagtgtgtgctctgaatggaaagttatacatcgttggtggctctgatccatatggtcaaaaaggactgaaaaattgtgatgtatttgatcctgtaacaaagttgtggacaagctgtgcccctcttaacattcggagacaccagtctgcagtctgtgagcttggtggttatttgtacataatcggaggtgcagaatcttggaattgtctgaacacagtagaacgatacaatcctgaaaataatacctggactttaattgcacccatgaatgtggctaggcgaggagctggagtggctgttcttaatggaaaactgtttgtatgtggtggctttgatggttctcatgccatcagttgtgtggaaatgtatgatccaactagaaatgaatggaagatgatgggaaatatgacttcaccaaggagcaatgctgggattgcaactgtagggaacaccatttatgcagtgggaggattcgatggcaatgaatttctgaatacggtggaagtctataaccttgagtcaatgatggagcccctatacaaagattttccagttttaacaaatttaagaccctctcaaact

SEQ ID NO: 183565 - DNA, 1667 bp, Homo Sapiens
tgtacaaaaaagttggctggattcctgcttccaaaaattgagaactaaccgttgtaatgcaggagtgtgtgctctgaatggaaagttatacatcgttggtggctctgatccatatggtcaaaaaggactgaaaaattgtgatgtatttgatcctgtaacaaagttgtggacaagctgtgcccctcttaacattcggagacaccagtctgcagtctgtgagcttggtggttatttgtacataatcggaggtgcagaatcttggaattgtctgaacacagtagaacgatacaatcctgaaaataatacctggactttaattgcacccatgaatgtggctaggcgaggagctggagtggctgttcttaatggaaaactgtttgtatgtggtggctttgatggttctcatgccatcagttgtgtggaaatgtatgatccaactagaaatgaatggaagatgatgggaaatatgacttcaccaaggagcaatgctgggattgcaactgtagggaacaccatttatgcagtgggaggattcgatggcaatgaatttctgaatacggtggaagtctataaccttgagtcaaatgaatggagcccctatacaaagattttccagttttaacaaatttaagaccctctcaaactaacaggcttagtgatgtaattatggttagtagaggtacacttgtgaataaagagggtgggtgggtatagatgttgctaacagcaacacaaagcttttgcatattgcatactattaaacatgctgtacatactttttgggtttatttggaaaggaatgcaaagatgaaggtctgttttgtgtacttttaagactttggttattttactttttggaaaagaataaaccaagaattgattgggcacatcatttcaagaagtcccctctcctccacatttgttttgccaatttgcacattaaatgactcttccctcaaatgtgtactatggggtaaaaggggtagggtttaaagatgtagacagttgggttttttaagggccctttttcaataactggaacactctataacaaaggatacttatttaaatagatgacattgactatttttgtttttattaaaaggaagcttacatgcctaccaatatttaatcttttatgattgcctttttataactttttatattctcagcagagtgctttaccaattgaagtaaaatgtggcaggctggagttattgaagcagagtggcagtcttcagtttgcagagtaggggtctgtcttttaaactctgagtgcaaacttcagagttcttgccttggctgcagtttttttccttcaagaatgcagtactaacatttatttgagtggagttactgaacagtaacatagctgtgatttttggtatttgaaacactggttttaaatattttgacttgttgagggtatgttttatatagcaagacattatatagcagtaaaaaatggtgttttatcttctatataattcctgtttttattattaacaaacagtcctaaatagcagccctcaattgtgaaaaaatttactttaaactacattaggtttgtgaatgcaggttttatcagaactatgtttttgttcagtttatctgttcatatggataaatattgggttgggatgacttggtgtctaatgtgtagtgct

SEQ ID NO: 183566 - DNA, 1516 bp, Homo Sapiens
  misc_feature (281)..(327): n is a, c, g, or t
  misc_feature (369)..(424): n is a, c, g, or t
  misc_feature (956)..(972): n is a, c, g, or t
ctttgtacaaaaaagttggctgtgatcaccttaaaaaaacgatgatgagcagtacgcttgggagtcctcagcagggggatcattcacagtgaggacagacacaggtgaacctatgggtcgtggaacaaaagttatcctacacctgaaagaagaccaaactgagtacttggaggaacgaagaataaaggagattgtgaagaaacattctcagtttattggatatcccattactctttttgtggagaaggaacgtgataaagaagtaagcgatgatgaggctnnnnnnnnnnnnnnnnnnnnnnnnnnnnnnnnnnnnnnnnnnnnnnngtcggaagacaaacctgaaattgaagatgttggttctgatgnnnnnnnnnnnnnnnnnnnnnnnnnnnnnnnnnnnnnnnnnnnnnnnnnnnnnnnntacatcgatcaagaagagctcaacaaaacaaagcccatctggaccagaaatcccgacgatattactaatgaggagtacggagaattctataagagcttgaccaatgactgggaagatcacttggcagtgaagcatttttcagttgaaggacagttggaattcagagcccttctatttgtcccacgacgtgctccttttgatctgtttgaaaacagaaagaaaaagaacaatatcaaattgtatgtacgcagagttttcatcatggataactgtgaggagctaatccctgaatatctgaacttcattagaggggtggtagactcggaggatctccctctaaacatatcccgtgagatgttgcaacaaagcaaaattttgaaagttatcaggaagaatttggtcaaaaaatgcttagaactctttactgaactggcggaagataaagagaactacaagaaattctatgagcagttctctaaaaacataaaggttggtgtaaataaccattagttttccaattggcctctttagnnnnnnnnnnnnnnnnnaattcagaaagtctttgtaaagaacatactttgtttcagcttggaatacacgaagactctcaaaatcggaagaagctttcagagctgttaaggtactacacatctgcctctggtgatgagatggtttctctcaaggactactgcaccagaatgaaggagaaccagaaacatatctattatatcacaggtaagagaacactatgttacagtcatacacgtcgttcttacaaccttgtaggctctgtgggtgtgttttctactcaggtagcactgttacaactggtattgatctaggcaagataattaacatgaactaggtcattttctgtcttaggttctgcctaggtatctggctagcaagaaaagtcagagctagatgaaaccattcttaactgttaaaaggtctaaaagtaactttgtaatacctcaggtgagaccaaggaccaggtagctaactcagcctttgtggaacgtcttcggaaacatggcttagaagtgatctatatgattgagcccattgatgagtactgtgtccaacagctga

SEQ ID NO: 183567 - DNA, 3968 bp, Homo Sapiens
  misc_feature (73)..(86): n is a, c, g, or t
  misc_feature (91)..(100): n is a, c, g, or t
  misc_feature (3133)..(3141): n is a, c, g, or t
  misc_feature (3624)..(3635): n is a, c, g, or t
  misc_feature (3739)..(3755): n is a, c, g, or t
ttggcgcaagcgagcctatgctgcagggtcacttttggctggtcagagaaggaataatgatatcaccttcttnnnnnnnnnnnnnnaatcnnnnnnnnnnccctttacaaattttcccctttccctttacctcctttccctcccatcttctttcattaacccctcctaaggcatgttatttgaaagcaattgagacgcaaccgaactttgcagtagcttggagtaatcttggctgtgttttcaatgcacaaggggaaatttggcttgcaattcatcactttgaaaaggctgtcacccttgacccaaactttctggatgcttatatcaatttaggaaatgtcttgaaagaggcacgcatttttgacagagctgtggcagcttatcttcgtgccctaagtttgagtccaaatcacgcagtggtgcacggcaacctggcttgtgtatactatgagcaaggcctgatagatctggcaatagacacctacaggcgggctatcgaactacaaccacatttccctgatgcttactgcaacctagccaatgctctcaaagagaagggcagtgttgctgaagcagaagattgttataatacagctctccgtctgtgtcccacccatgcagactctctgaataacctagccaatatcaaacgagaacagggaaacattgaagaggcagttcgcttgtatcgtaaagcattagaagtcttcccagagtttgctgctgcccattcaaatttagcaagtgtactgcagcagcagggaaaactgcaggaagctctgatgcattataaggaggctattcgaatcagtcctacctttgctgatgcctactctaatatgggaaacactctaaaggagatgcaggatgttcagggagccttgcagtgttatacgcgtgccatccaaattaatcctgcatttgcagatgcacatagcaatctggcttccattcataaggattcagggaatattccagaagccatagcttcttaccgcacggctctgaaacttaagcctgattttcctgatgcttattgtaacttggctcattgcctgcagattgtctgtgattggacagactatgatgagcgaatgaagaagttggtcagtattgtggctgaccagttagagaagaataggttgccttctgtgcatcctcatcatagtatgctatatcctctttctcatggcttcaggaaggctattgctgagaggcacggcaacctgtgcttagataagattaatgttcttcataaaccaccatatgaacatccaaaagacttgaagctcagtgatggtcggctgcgtgtaggatatgtgagttccgactttgggaatcatcctacttctcaccttatgcagtctattccaggcatgcacaatcctgataaatttgaggtgttctgttatgccctgagcccagacgatggcacaaacttccgagtgaaggtgatggcagaagccaatcatttcattgatctttctcagattccatgcaatggaaaagcagctgatcgcatccatcaggatggaattcatatccttgtaaatatgaatggctatactaagggcgctcgaaatgagctttttgctctcaggccagctcctattcaggcaatgtggctgggataccctgggacgagtggtgcgcttttcatggattatattatcactgatcaggaaacttcgccagctgaagttgctgagcagtattccgagaaattggcttatatgccccacactttttttattggtgatcatgctaatatgttccctcacctgaagaaaaaagcagtcatcgattttaagtccaatgggcacatttatgacaatcggatagttctgaatggcatcgacctcaaagcatttcttgatagtctaccagatgtgaaaattgtcaagatgaagtgtcctgatggaggagacaatgcagatagcagtaacacagctcttaatatgcctgttattcctatgaatactattgcagaagcagttattgaaatgattaaccgaggacagattcaaataacaattaatggattcagtattagcaatggactggcaactactcagatcaacaataaggctgcaactggagaggaggttccccgtaccattattgtaaccacccgttctcagtacgggttaccagaagatgccatcgtatactgtaactttaatcagttgtataaaattgacccttctactttgcagatgtgggcaaacattctgaagcgtgttcccaatagtgtactctggctgttgcgttttccagcagtaggagaacctaatattcaacagtatgcacaaaacatgggcctgccccagaaccgtatcattttttcacctgttgctcctaaagaggaacacgtcaggagaggccagctggctgatgtctgcttggacactccactctgtaatgggcacaccacagggatggatgtcctctgggcagggacccccatggtgactatgccaggagagactcttgcttctcgagttgcagcatcccagctcacttgcttaggttgtcttgagcttattgctaaaaacagacaagaatatgaagacatagctgtgaagctgggaactgatctagaatacctgaagaaagttcgtggcaaagtctggaagcaaagaatatctagccctctgttcaacaccaaacaatacacaatggaactagagcggctctatctacagatgtgggagcattatgcagctggcaacaaacctgaccacatgattaagcctgttgaagtcactgagtcagcataaataaagactgcacaggagaattacccctatacctgagcctcaaccttctgggggaaagggaactagataacatacttcttacttgtctgtacagtaccttgttgcagatgggtgatatataatggtaatagaatagcacagccagacttgcttcctgcatggtagggagagacacaaaagatgggaaactgcttttccacaaggaatctccgtagaattttgcggcgaccagatggtgcataggtctggaaggtctgatctcccttggtcttccatgggatggttagtgtggaggggagatatagattgtccggccgctttgtgattccatggattgattcagtcttctggannnnnnnnnctttatattttgggtactggagcttttaaaaatgtttggtttcaggtatttttattcatgtgaagtgtatatgattctcttgagataaggttttaagctaaaatgttactccctgttttagtttctgaactctgacagattgacagggactttgctggtgtagtctttttataggttttataaaccacttgagcctatatcagtcgttttagtgtctgacctaatatttggagctatcagtgctttgttgatttagatgatgactcaagattttttctggtccatttcccatttccttttcttccctgacccccataccctcacccttaaaattctcctgtaactcaactaacaaaatcaagcctgattcaaaacatcctagggtgttttaaacacaccatctggtgccaaatgaagatttttaggagtgattactaattatcaagggcacagttgtggtactgtcattgataataatatagnnnnnnnnnnnncctaattttgacctgtttcaccagtgttttacccttgactgccccttctatgctgcttccaaaagtgatagtgtgtgtaagatttttaccttcctttctaaagnnnnnnnnnnnnnnnnnaagtgagtcctgttcttcctatttctttcagcagaaatgaaatcccaggtaagtataagtattcaagtatttgatcagtaagtcacagttatctccagtgcattaaataaccttcatcaagaaataggttataggtaaaatctctgaaggatcatctatgtattcaagtaattattttttagataataactgtcttctggacttggtcttgaa

SEQ ID NO: 183568 - DNA, 989 bp, Homo Sapiens
  misc_feature (97)..(97): n is a, c, g, or t
  misc_feature (818)..(833): n is a, c, g, or t
tttcaagtgctactagagggcgcaacttgaggccgagttttcctacccccactgtttcccaaagtgtgttctatgaggtgttaagaggtatggctgnaaaaaaaaggagttcatgatcaaataaattcggaaaataggtttctttactggacttccctaagcctttaatagtgtaacagggttccctgaacttagttgaccatggaactcttctttcattgggcattttattagaatactatgaaacacattttgggaaatgctgctcttcaacaatgttcctcactaacatcaaaactatgctactgaggagaaaaatgtctttctgccaagtaggatatcataaagccaggctttaagttacattctcacaatgccccgtctcccaaggaggactgaagctgaaacctcacatgacaggattgcacctaggttgaggtccctgtaatgcgagcgcaaacatcgcttgcgcaacctaacagcatcgcactgcgcaatcgctgcgaactgctgcgctacatagaacacccctagacgcagcaaacggccaaccagatccattaatctactagacaggcccatggagaatatttgtttaatgagattagttggactcgaggtatgttaaaacccaattttatccaaaaaggctacagaataggactgagggagccagtcaatcagattactcatctagtcaaccgttcacaggggttcattcgcacgcaatgcgcattaacgctgcgcagcctttgcgctactgcagggtcacagcgcatcatcagaagagcagaatgctgcaatccaaacaaagaagnnnnnnnnnnnnnnnntgaacaacaagaagagttagaagcttttactaagtaaattatctctaataatttttaatatcaattaacttttacttatctttgacagaattgtggctatagtataaaacattctcttacataacttgcttgtaaataaaattattttaagcccaa

SEQ ID NO: 183569 - DNA, 1202 bp, Homo Sapiens
  misc_feature (273)..(288): n is a, c, g, or t
gcccaaccagatccattaatctactagacaggcccatggagaatatttgtttaatgagattagttggactcgaggtatgttaaaacccaattttatccaaaaaggctacagaataggactgagggagccagtcaatcagattactcatctagtcaaccgttcacaggggttcattcgcacgcaatgcgcattaacgctgcgcagcctttgcgctactgcagggtcacagcgcatcatcagaagagcagaatgctgcaatccaaacaaagaagnnnnnnnnnnnnnnnntgaacaacaagaagagttagaagcttttactaagtaaattatctctaataatttttaatatcaattaacttttacttatctttgacagaattgtggctatagtataaaacattctcttacataacttgcttgtaaataaaattattttaagctgtttctgaagccaaaagacagaagattcaggcatggaggcaaattgttttgctgtggcagttacaaacccgttaccatatttctcatcatgtgacttttcggtgcgttccttgctggaagaggaggaggaggttgtgtgtctgccctagatccaggcctcgagctcccttcagcgaggcaccttacgcatggaataggaggtttcacccacctgaaaccttctaaatacaatatcaatggtgaaaaaccaaaaacaagagagaaaataaaaacaagatcattagtaaaagttcaacaaagcaattgaaattctttggatgtctattacatatgggaatgaggacagtctcaagtctgtaatatgggaaacatgcagaagggagagggttaatcagggctattgcatacagcagggatttttgctggaagaaaggctcttcattttctacaaagacaacttaattttgcttccatctactaggaatatgctggcttgaattttcaaatgcactgattacaaaagaaatacattgcatttcactcaagagtattttcttgtttactaagttctcacaaaaaaacagaataacatttttcaaactaggtgtctccagagctctgaaataaagaagtcagcaacctaaggcaggcgcaatgtctcagcctaaaccgatctctaaagctgcagtgaagtgcaattcatgttagctgtccgcttggtggggtgacaattaataggagcttatcaaatatttgtccaa

SEQ ID NO: 183570 - DNA, 1396 bp, Homo Sapiens
  misc_feature (178)..(186): n is a, c, g, or t
  misc_feature (538)..(596): n is a, c, g, or t
ttggcattgttgaagagcagcatttcccaaaatgtgtttcatagtattctaataaaatgcccaatgaaagaagagttccatggtcaactaagttcagggaaccctgttacactattaaaggcttagggaagtccagtaaagaaacctattttccgaatttatttgatcatgaactccnnnnnnnnncagccatacctcttaacacctcatagaacacactttgggaaacagtgggggtaggaaaactcggcctcaagttgcgccctctaggtagcacttgaaaacatgacaagggcccgtagttgtttggataagagaactccagcatagagccttatagcaactgacttcccagttaagtcccagtgtaagggttggtctttggttggcagaactgaacatggtggtttgcacttgggttctggtggcgcaggcgcaggagcagccagctgtggcagcgcattagttttggcgcaagcgagcctatgctgcagggtcacttttggctggtcagagaaggaataatgatatcaccttnnnnnnnnnnnnnnnnnnnnnnnnnnnnnnnnnnnnnnnnnnnnnnnnnnnnnnnnnnnacctcctttccctcccatcttctttcattaacccctcctaaggcatgttatttgaaagcaattgagacgcaaccgaactttgcagtagcttggagtaatcttggctgtgttttcaatgcacaaggggaaatttggcttgcaattcatcactttgaaaaggctgtcacccttgacccaaactttctggatgcttatatcaatttaggaaatgtcttgaaagaggcacgcatttttgacaggttgctgaagcagaagattgttataatacagctctccgtctgtgtcccacccatgcagactctctgaataacctagccaatatcaaacgagaacagggaaacattgaagaggcagttcgcttgtatcgtaaagcattagaagtcttcccagagtttgctgctgcccattcaaatttagcaagtgtactgcagcagcagggaaaactgcaggaagctctgatgcattataaggaggctattcgaatcagtcctacctttgctgatgcctactctaatatgggaaacactctaaaggagatgcaggatgttcagggagccttgcagtgttatacgcgtgccatccaaattaatcctgcatttgcagatgcacatagcaatctggcttccattcataaggattcagggaatattccagaagccatagcttcttaccgcacggctctgaaacttaagccctgattttcctgatgcttattgtaacttggctcattgcctgcagattgtctgtgattggacagactatgatgagcgaatgaagaagttggtcagtattgtggctga

SEQ ID NO: 183571 - DNA, 2030 bp, Homo Sapiens
  misc_feature (687)..(695): n is a, c, g, or t
  misc_feature (1178)..(1192): n is a, c, g, or t
  misc_feature (1296)..(1315): n is a, c, g, or t
tttgtacaaaaaagttggcatggtgaccatgccaggagagactcttgcttctcgagttgcagcatcccagctcacttgcttaggttgtcttgagcttattgctaaaaacagacaagaatatgaagacatagctgtgaagctgggaactgatctagaatacctgaagaaagttcgtggcaaagtctggaagcaaagaatatctagccctctgttcaacaccaaacaatacacaatggaactagagcggctctatctacagatgtgggagcattatgcagctggcaacaaacctgaccacatgattaagcctgttgaagtcactgattctgcataaataaagactgcacaggagaattacccctatacctgagcctcaaccttctgggggaaagggaactagataacatacttcttacttgtctgtacagtaccttgttgcagatgggtgatatataatggtaatagaatagcacagccagacttgcttcctgcatggtagggagagacacaaaagatgggaaactgcttttccacaaggaatctccgtagaattttgcggcgaccagatggtgcataggtctggaaggtctgatctcccttggtcttccatgggatggttagtgtggaggggagatatagattgtccggccgctttgtgattccatggattgattcagtcttctggannnnnnnnnctttatattttgggtactggagcttttaaaaatgtttggtttcaggtatttttattcatgtgaagtgtatatgattctcttgagataaggttttaagctaaaatgttactccctgttttagtttctgaactctgacagattgacagggactttgctggtgtagtctttttataggttttataaaccacttgagcctataccagtcgttttagtgtctgacctaatatttggagctatcagtgctttgttgatttagatgatgactcaagattttttctggtccatttcccatttccttttcttccctgacccccataccctcacccttaaaattctcctgtaactcaactaacaaaatcaagcctgattcaaaacatcctagggtgttttaaacacaccatctggtgccaaatgaagatttttaggagtgattactaattatcaagggcacagttgtggtactgtcattgataataatatagnnnnnnnnnnnnnnncctaattttgacctgtttcaccagtgttttacccttgactgccccttctatgctgcttccaaaagtgatagtgtgtgtaagatttttaccttcctttctaaagnnnnnnnnnnnnnnnnnnnnaagtgagtcctgttcttcctatttctttcagcaaaaatgaaatcccaggtaagtataagtattcaagtatttgatcagtaagtcacagttatctccagtgcattaaataaccttcatcaagaaataggttataggtaaaatctctgaaggatcatctatgtattcaagtaattattttttaaataataactgtcttctggacttggtcttgaagtctgtacagattcagcctcagtagtagcgaactgcactgctgtttggtttggagtacaaattaaacttatagtcctcctggaacttgagttattaaaatcataggaataaaattatgggatctcaacaaagggtcgagggtttgaggcttaaacaagcccacatatgaatatatgttttgtctcgctatactgcacttacgctatccagttgcaggtaattttttgtctgctagtagtgttctagattatgtctttccaaagcgctgaggctgtgcacctattctgtatttgcagctgatgcctgaatgtatcctagctgacaaattattgattaataaaaacttgaatttccgggaagattcttactgttaaccaattttgagcaaggagtctcaaagggtaattctggaaccaaatttacttgttaatgaacagtgtaccttataacagtgtaaaatcacggaatatccgtgaaaggatttcttaatttattttttacc

SEQ ID NO: 183572 - DNA, 817 bp, Homo Sapiens
gtacaaaaaagttggataaaattatggcgccatacaatacaaaacaaagggtcgagggtttgaggcttaaacaagccaacatatgaatatatgttttgtctcgctatactgcacttacgctatccagttgcaggtaattttttgtctgctagtagtgttctagattatgtctttccaaagcgctgaggctgtgcacctattctgtagttgcagctgatgcctgaatgtatcctagctgacaaattattgattaataagaacttgaatttctggaagattcttactgttaaccaaattttgagcaaggagtctcaaaggtaattctgaaccagaattacatgtttaatgaacagtgtaccttttaacagtgtaaatcacggaatatccgtgaagggatttcttaatttattttttaccggttgattgaaatatcagttaaaggttgccagcatggttgcagataaactgatgtttgaaattcgctgaaatacttaatgtggaataggataatatacttccaatgccctcaaggctgtgaccttacagccattttacatagcacatcattcctcctatagggatgaactttttcctggcacgaaaagtagccgctctggttgaagctttgcttattgtaacaggcttttatttccaggtaatatgtcttggaagacttaattctgattagagatatagatattactggaaactaattgttttttttctattgtactctgctttatcaaagaagtaaaacatttaaatcgtactacagaaattaatatgttgtcttgggatccttaataaatgaatgatt

SEQ ID NO: 183573 - DNA, 1961 bp, Homo Sapiens
  misc_feature (250)..(272): n is a, c, g, or t
  misc_feature (1348)..(1360): n is a, c, g, or t
  misc_feature (1399)..(1433): n is a, c, g, or t
  misc_feature (1606)..(1614): n is a, c, g, or t
acaaaaaagttgggtcctagtagacattttctttttctttttatccttagcagactaacacaggatcttagacattttgaaaggtgaaattactttggaggggggaaggtcatgggacttatattacatttatcttatttggatatgtttgcttttgttttaaggaacaagatcactcaaggtgaaggataatctactaataccagcactttgaatgaaaatttgtttctctgccacaaactgaacatcnnnnnnnnnnnnnnnnnnnnnnnggtgggggagttgaaacctaattttgtggcgtaacagctatgcagcttgaaatccaagtagcactaaattttattatttcgtatttgtacaataagcttcccaggaaacgtgtcaacatttttggtgaaaaacttgaaagacttcttaagaaaaaatatgaagggcactggtatcctgaaaagccatacaaaggatcggggtttaaatgtatacacataggggaaaaagtggacccagtgattgaacaagcatccaaagaaagtggtttggacattgatgatgttcgtggcaatctgccacaggatcttagtgtttggatcgacccatttgaggtttcttaccaaattggtgaaaagggaccagtgaaggtgctttacgtggatgataataatgaaaatggatgtgagttggataaggagatcaaaaacagctttaacccagaggcccaggtttttatgcccataagtgacccagcctcatcagtgtccagctctccatcgcctccttttggtcactctgctgctgtaagccctaccttcatgccccggtccactcagcctttaacctttaccactgccacttttgctgccaccaagttcggctctaccaaaatgaaaaatagtggccgtagcaacaaggttgcacgtacttctcccatcaacctcggcttgaatgtgaatgacctcttgaagcagaaagccatctcttcctcaatgcactctctgtatgggcttggcttgggtagccagcagcagccacagcaacagcagcagccagcccatccgccaccgccaccaccactaccacagcagcaacaacagaagaaaacctctgctctttctcctaatgccaaggaatttatttttcctaatatgcagggtcaaggtagtagtaccaatggaatgttcccaggtgacagcccccttaacctcagtcctctccagtacagtaatgcctttgatgtgtttgcagcctatggaggcctcaatgagaagtcttttgtagatggcttgaattttagcttaaataacatgcagtattctaaccagcaattccagcctgttatggctaactnnnnnnnnnnnnntgtatcgtacaagttaaaatgcacgggcccaagggggannnnnnnnnnnnnnnnnnnnnnnnnnnnnnnnnnnaagcttatagtaaggatacattcaagcttggttaaaaaaataataataaaacatgcatcatttttcatttgccaaccaagcacaaagttattttatactgactgtatattttaaagtatactctcagatatggcctcttacagtatttaagatatagcaaggacatggctgannnnnnnnnataaaaattggcactaataagtgggtttattggtcttttctaattgtataatttaatttagtacaaagtttgtaaaatatcagaggatatatatatattgtttctacgacatggtattgcatttatatctttttactacagtgatctgtgacagcagcagcttcatgttgtattttttttactgaaattgtaaaatatccatcttaaagacatcaactattctaaaaattgtgtacaggatattcctttagtggtggaattaaaatgtacgaatacttgctttttcaaaaaaatgtattttctgttaaaagtttaaagatttttgctatatattatgggaagaaaaa

SEQ ID NO: 183574 - DNA, 1367 bp, Homo Sapiens
  misc_feature (377)..(440): n is a, c, g, or t
  misc_feature (703)..(715): n is a, c, g, or t
  misc_feature (754)..(789): n is a, c, g, or t
  misc_feature (962)..(970): n is a, c, g, or t
ttggcgtggatgataataatgaaaatggatgtgagttggataaggagatcaaaaacagctttaacccagaggcccaggtttttatgcccataagtgacccagcctcatcattgtccagctctccatcgcctccttttggtcactctgctgctgtaaaccctaccttcatgccccggtccactcagcctttaacctttaccactgccacttttgctgccaccaagttcggctctaccaaaatgaagaatagtggccgtaccaacaaggttgcacgtacttctcccatcaacctcggcttgaatgtgaatgacctcttgaagcataaagccatctcttcctcaatgcactctctgtatgggcttggcttgggtagccannnnnnnnnnnnnnnnnnnnnnnnnnnnnnnnnnnnnnnnnnnnnnnnnnnnnnnnnnnnnnnncaacaacagcagaaaacctctgctctttctcctaatgccaaggaatttatttttcctaatatgcagggtcaaggtagtagtaccaatggaatgttcccaggtgacagcccccttaacctcagtcctctccagtacagtaatgcctttgatgtgtttgcagcctatggaggcctcaatgagaagtcttttgtagatggcttgaattttagcttaaataacatgcagtattctaaccagcaattccagcctgttatggctaactnnnnnnnnnnnnntgtatcgtacaagttaaaatgcacgggcccaagggggannnnnnnnnnnnnnnnnnnnnnnnnnnnnnnnnnnnaagcttatagtaaggatacattcaagcttggttaaaaaaataataataaaacatgcatcatttttcatttgccaaccaagcacaaagttattttatactgactgtatattttaaagtatactctcagatatggcctcttacagtatttaagatatagcaaggacatggctgannnnnnnnnataaaaattggcactaataagtgggtttattggtcttttctaattgtataatttaatttagtacaaagtttgtaaaatatcagaggatatatatatattgtttctacgacatggtattgcatttatatctttttactacagtgatctgtgacagcagcagcttcatgttgtattttttttactgaaattgtaaaatatccatcttaaagacatcaactattctaaaaattgtgtacaggatattcctttagtggtggaattaaatgtacgaatacttgctttttcaaaaaaatgtattttctgttaaaagtttaaagatttttgctatatattatggaagaaaaaatgtaatcgttaatattaattttgtacctatattgtgcaatacttggaaaaa

SEQ ID NO: 183575 - DNA, 1649 bp, Homo Sapiens
  misc_feature (97)..(131): n is a, c, g, or t
  misc_feature (170)..(182): n is a, c, g, or t
  misc_feature (433)..(513): n is a, c, g, or t
  misc_feature (1258)..(1274): n is a, c, g, or t
taaaataactttgtgcttggttggcaaatgaaaaatgatgcatgtttttattattatttttttaaccaagcttgaatgtatccttactataagcttnnnnnnnnnnnnnnnnnnnnnnnnnnnnnnnnnnntcccccttgggcccgtgcattttaacttgtacgatacannnnnnnnnnnnnagttagccataacaggctggaattgctggttagaatactgcatgttatttaagctaaaattcaagccatctacaaaagacttctcattgaggcctccataggctgcaaacacatcaaaggcattactgtactggagaggactgaggttaagggggctgtcacctgggaacattccattggtactactaccttgaccctgcatattaggaaaaataaattccttggcattaggagaaagagcagaggttttnnnnnnnnnnnnnnnnnnnnnnnnnnnnnnnnnnnnnnnnnnnnnnnnnnnnnnnnnnnnnnnnnnnnnnnnnnnnnnnnnacccaagccaagcccatacagagagtgcattgaggaagagatggctttctgcttcaagaggtcattcacattcaagccgaggttgatgggagaagtacgtgcaaccttgttgctacggccactattcttcattttggtagagccgaacttggtggcagcaaaagtggcagtggtaaaggttaaaggctgagtggaccggggcatgaaggtagggcttacagcagcagagtgaccaaaaggaggcgatggagagctggacactgatgaggctgggtcacttatgggcataaaaacctgggcctctgggttaaagctgtttttgatctccttatccaactcacatccattttcattattatcatccacgtaaagcaccttcactggtcccttttcaccaatttggtaagaaacctcaaatgggtcgatccaaacactaagatcctgtggcagattgccacgaacatcatcaatgtccaaaccactctctttggatgcttgttcaatcactgggtccactttctcccctatgtgtatacatctaaaccccgatcctttgtatggcttttcaggataccagtgcccttcatatttcttcttaagaagtctttcaagttcttcaccaaaaatgttgacacgtctcctgggaagcttattgtacaaatacgaaataataaaatttagtgctacttggatttcaagctgcatagctgctacgccacaaaattaggtttcaactcccccaccnnnnnnnnnnnnnnnnngatgttcagtttgtggcagagaaacaaattttcattcaaagtgctggtattagtagattatccttcaccttgagtgatcttgttcgggctgcttcggggcggcttggaccacagacccgcggctgggcggggagcagcgcggcagggcgggggcgcgggagggtcgggagcggcgagctcgccgagtgcaagacgttgccgctgcggggctgaggacagaggacagaggcctcgggcaggccttgggagatcgccgttagtggctcggggtggcgggcacgggggtcagacgagcgcgctcacttctccacacagcccggtgcccggcccagcgtccccgtagtgcgcccgctacacgccgggccagagctccaa

SEQ ID NO: 183576 - DNA, 1455 bp, Homo Sapiens
  misc_feature (368)..(437): n is a, c, g, or t
  misc_feature (699)..(711): n is a, c, g, or t
  misc_feature (750)..(787): n is a, c, g, or t
  misc_feature (960)..(968): n is a, c, g, or t
ttgggatgataataatgaaaatggatgtgagttggataaggagatcaaaaacagctttaacccagaggcccaggtttttatgcccataagtgacccagcctcatcagtgtccagctctccatcgcctccttttggtcactctgctgctgtaagccctaccttcatgccccggtccactcagcctttaacctttaccactgccacttttgctgccaccaagttcggctctaccaaaatgaagaatagtggccgtagcaacaaggttgcacgtacttctcccatcaacctcggcttgaatgtgaatgacctcttgaagcagaaagccatctcttcctcaatgcactctctgtatgggcttggcttgggtnnnnnnnnnnnnnnnnnnnnnnnnnnnnnnnnnnnnnnnnnnnnnnnnnnnnnnnnnnnnnnnnnnnnnnaacaacagcagaaaacctctgctctttctcctaatgccaaggaatttatttttcctaatatgcagggtcaaggtagtagtaccaatggaatgttcccaggtgacagcccccttaacctcagtcctctccagtacagtaatgcctttgatgtgtttgcagcctatggaggcctcaatgagaagtcttttgtagatggcttgaattttagcttaaataacatgcagtattctaaccagcaattccagcctgttatggctaactnnnnnnnnnnnnntgtatcgtacaagttaaaatgcacgggcccaagggggannnnnnnnnnnnnnnnnnnnnnnnnnnnnnnnnnnnnnaagcttatagtaaggatacattcaagcttggttaaaaaaataataataaaacatgcatcatttttcatttgccaaccaagcacaaagttattttatactgactgtatattttaaagtatactctcagatatggcctcttacagtatttaagatatagcaaggacatggctgannnnnnnnnataaaaattggcactaataagtgggtttattggtcttttctaattgtataatttaatttagtacaaagtttgtaaaatatcagaggatatatatatattgtttctacgacatggtattgcatttatatctttttactacagtgatctgtgacagcagcagcttcatgttgtattttttttactgaaattgtaaaatatccatcttaaagacatcaactattctaaaaattgtgtacaggatattcctttagtggtggaattaaaatgtacgaatacttgctttttcaaaaaaatgtattttctgttaaaagtttaaagatttttgctatatattatggaagaaaaatgtaatcgtaaatattaattttgtacctatattgtgcaatacttgaaaaaaacggtataaaagtattttgagtcagtgtcttacatgttaagagggactgaaatagtttatattaagtttgtattaaaattctttaaaatt

SEQ ID NO: 183577 - DNA, 1283 bp, Homo Sapiens
  misc_feature (488)..(496): n is a, c, g, or t
  misc_feature (669)..(703): n is a, c, g, or t
  misc_feature (742)..(754): n is a, c, g, or t
  misc_feature (1007)..(1085): n is a, c, g, or t
aattttaaagaattttaatacaaacttaatataaactatttcagtcccccttaacatgtaaaacactgactcaaaatacttttataccgtttttttcaagtattgcacaatataggtacaaaattaatatttacaattacttttttcttccataaaataaagcaaaaatctttaaacttttaacaaaaaatacatttttttgaaaaagcaagtattcgtacattttaattccaccactaaaggaatatcctgtacacaatttttaaaatagttgatgtctttaaaatggatattttacaatttcagtaaaaaaaatacaacatgaagctgctgctgtcacagatcactgtagtaaaaaaatataaatgcaataccatgtcgtaaaaacaatatatatatatcctctgatattttacaaactttgtactaaattaaattatacaattagaaaagaccaataaacccacttattagtgccaatttttatnnnnnnnnntcagccatgtccttgctatatcttaaatactgtaagaggccatatctgagagtatactttaaaatatacagtcagtataaaataactttgtgcttggttggcaaatgaaaaatgatgcatgttttattattatttttttaaccaagcttgaatgtatccttactataagcttnnnnnnnnnnnnnnnnnnnnnnnnnnnnnnnnnnntcccccttgggcccgtgcattttaacttgtacgatacannnnnnnnnnnnnagttagccataacaggctggaattgctggttagaatactgcatgttatttaagctaaaattcaagccatctacaaaagatttctcattgaggcctccataggctgcaaacacatcaaaggcattactgtactggagaggactgaggttaagggggctgtcacctgggaacattccattggtactactaccttgaccctgcatattaggaaaaataaattccttggcattaggagaaagagcagaggttttctnnnnnnnnnnnnnnnnnnnnnnnnnnnnnnnnnnnnnnnnnnnnnnnnnnnnnnnnnnnnnnnnnnnnnnnnnnnnnnnacccaagccaagcccatacagagagtgcattgaggaagagatggctttctgcttcaagaggtcattcacattcaagccgaggttgatgggagaagtacgtgcaaccttgttgctacggccactattcttcattttggtagagccgaacttggtggcagcaaaagtggcagtggtaaaggccaacttttttgtacaaag

SEQ ID NO: 183578 - DNA, 1335 bp, Homo Sapiens
  misc_feature (381)..(461): n is a, c, g, or t
  misc_feature (712)..(724): n is a, c, g, or t
  misc_feature (763)..(797): n is a, c, g, or t
  misc_feature (970)..(978): n is a, c, g, or t
  misc_feature (1151)..(1159): n is a, c, g, or t
acaaaaaagttggcgtggatgataataatgaaaatggatgtgagttggataaggagatcaaaaacagctttaacccagaggcccaggtttttatgcccataagtgacccagcctcatcagtgtccagctctccatcgcctccttttggtcactctgctgctgtaagccctaccttcatgccccggtccactcagcctttaacctttaccactgccacttttgctgccaccaagttcggctctaccaaaatgaagaatagtggccgtagcaacaaggttgcacgtacttctcccatcaacctcggcttgaatgtgaatgacctcttgaagcagaaagccatctcttcctcaatgcactctctgtatgggcttggcttgggtnnnnnnnnnnnnnnnnnnnnnnnnnnnnnnnnnnnnnnnnnnnnnnnnnnnnnnnnnnnnnnnnnnnnnnnnnnnnnnnnnaaaacctctgctctttctcctaatgccaaggaatttatttttcctaatatgcagggtcaaggtagtagtaccaatggaatgttcccaggtgacagcccccttaacctcagtcctctccagtacagtaatgcctttgatgtgtttgcagcctatggaggcctcaatgagaagtcttttgtagatggcttgaattttagcttaaataacatgcagtattctaaccagcaattccagcctgttatggctaactnnnnnnnnnnnnntgtatcgtacaagttaaaatgcacgggcccaagggggannnnnnnnnnnnnnnnnnnnnnnnnnnnnnnnnnnaagcttatagtaaggatacattcaagcttggttaaaaaaataataataaaacatgcatcatttttcatttgccaaccaagcacaaagttattttatactgactgtatattttaaagtatactctcagatatggcctcttacagtatttaagatatagcaaggacatggctgannnnnnnnnataaaaattggcactaataagtgggtttattggtcttttctaattgtataatttaatttagtacaaagtttgtaaaatatcagaggatatatatatattgtttctacgacatggtattgcatttatatctttttactacagtgatctgtgacagcagcagcttcatgttgtannnnnnnnnactgaaattgtaaaatatccatcttaaagacatcaactattctaaaaattgtgtacaggatatttcctttagtggtggaattaaaatgtacgaatacttgcttttttcaaaaaaatgtattttctgttaaaagtttaaagatttttgctatatattatgggaagaaaaatgtaatc

SEQ ID NO: 183579 - DNA, 2198 bp, Homo Sapiens
ttggagcgggagtcgcggaacagcaggcccgagcccaccgcgccgggccccggacgccgcgcggaaaagatgaatttacaaccaattttctggattggactgatcagttcagtttgctgtgtgtttgctcaaacagatgaaaatagatgtttaaaagcaaatgccaaatcatgtggagaatgtatacaagcagggccaaattgtgggtggtgcacaaattcaacatttttacaggaaggaatgcctacttctgcacgatgtgatgatttagaagccttaaaaaagaagggttgccctccagatgacatagaaaatcccagaggctccaaagatataaagaaaaataaaaatgtaaccaaccgtagcaaaggaacagcagagaagctcaagccagaggatattactcagatccaaccacagcagttggttttgcgattaagatcaggggagccacagacatttacattaaaattcaagagagctgaagactatcccattgacctctactaccttatggacctgtcttactcaatgaaagacgatttggagaatgtaaaaagtcttggaacagatctgatgaatgaaatgaggaggattacttcggacttcagaattggatttggctcatttgtggaaaagactgtgatgccttacattagcacaacaccagctaagctcaggaacccttgcacaagtgaacagaactgcaccagcccatttagctacaaaaatgtgctcagtcttactaataaaggagaagtatttaatgaacttgttggaaaacagcgcatatctggaaatttggattctccagaaggtggtttcgatgccatcatgcaagttgcagtttgtggatcactgattggctggaggaatgttacacggctgctggtgttttccacagatgccgggtttcactttgctggagatgggaaacttggtggcattgttttaccaaatgatggacaatgtcacctggaaaataatatgtacacaatgagccattattatgattatccttctattgctcaccttgtccagaaactgagtgaaaataatattcagacaatttttgcagttactgaagaatttcagcctgtttacaaggagctgaaaaacttgatccctaagtcagcagtaggaacattatctgcaaattctagcaatgtaattcagttgatcattgatgcatacaattccctttcctcagaagtcattttggaaaacggcaaattgtcagaaggagtaacaataagttacaaatcttactgcaagaacggggtgaatggaacaggggaaaatggaagaaaatgttccaatatttccattggagatgaggttcaatttgaaattagcataacttcaaataagtgtccaaaaaaggattctgacagctttaaaattaggcctctgggctttacggaggaagtagaggttattcttcagtacatctgtgaatgtgaatgccaaagcgaaggcatccctgaaagtcccaagtgtcatgaaggaaatgggacatttgagtgtggcgcgtgcaggtgcaatgaagggcgtgttggtagacattgtgaatgcagcacagatgaagttaacagtgaagacatggatgcttactgcaggaaagaaaacagttcagaaatctgcagtaacaatggagagtgcgtctgcggacagtgtgtttgtaggaagagggataatacaaatgaaatttattctggcaaattctgcgagtgtgataatttcaactgtgatagatccaatggcttaatttgtggaggaaatggtgtttgcaagtgtcgtgtgtgtgagtgcaaccccaactacactggcagtgcatgtgactgttctttggatactagtacttgtgaagccagcaacggacagatctgcaatggccggggcatctgcgagtgtggtgtctgtaagtgtacagatccgaagtttcaagggcaaacgtgtgagatgtgtcagacctgccttggtgtctgtgctgagcataaagaatgtgttcagtgcagagccttcaataaaggagaaaagaaagacacatgcacacaggaatgttcctattttaacattaccaaggtagaaagtcgggacaaattaccccagccggtccaacctgatcctgtgtcccattgtaaggagaagatgttgacgactgttggttctattttacgtattcagtgaatgggaac

SEQ ID NO: 183580 - DNA, 1332 bp, Homo Sapiens
  misc_feature (1132)..(1171): n is a, c, g, or t
ctttgtacaaaaaagttggtgtaaggagaccgatgttgacgactgttggttctattttacgtattcagtgaatgggaacaacgaggtcatggttcatgttgtggagaatccagagtgtcccactggtccagacatcattccaattgtagctggtgtggttgctggaattgttcttattggccttgcattactgctgatatggaagcttttaatgataattcatgacagaagggagtttgctaaatttgaaaaggagaaaatgaatgccaaatgggacacgggtgaaaatcctatttataagagtgccgtaacaactgtggtcaatccttaattatgagggaaaatgagtactgcccgtgcaaatcccacaacactgaatgcaaagtagcaatttccatagtcacagttaggtagctttagggcaatattgccatggttttactcatgtgcaggttttgaaaatgtacaatatgtataatttttaaaatgttttattattttgaaaataatgttgtaattcatgccagggactgacaaaagacttgagacaggatggttattcttgtcagctaaggtcacattgtgcctttttgaccttttcttcctggactattgaaatcaagcttattggattaagtgatatttctatagcgattgaaagggcaatagttaaagtaatgagcatgatgagagtttctgttaatcatgtattaaaactgatttttagctttacaaatatgtcagtttgcagttatgcagaatccaaagtaaatgtcctgctagctagttaaggattgttttaaatctgttattttgctatttgcctgttagacatgactgatgacatatctgaaagacaagtatgttgagagttgctggtgtaaattacttttgaaatagttgatctacaaaggccatgggaaaaattcagagagttaggaaggaaaaaccaatagctttaaaacctgtgtgccattttaagagttacttaatgtttggtaacttttatgccttcactttacaaattcaagccttagataaaagaaccgagcaattttctgctaaaaagtccttgatttagcactatttacatacaggccatactttacaaagtatttgctgaatggggacnnnnnnnnnnnnnnnnnnnnnnnnnnnnnnnnnnnnnnnnatgtctggtgctttctatcacctcttctaatcttttaatgtatttgtttgcaattttggggtaagactttttttatgagtactttttctttgaagttttagcggtcaatttgcctttttaatgaacatgtgaagttatactgtggctatgcaacagctctc

SEQ ID NO: 183581 - DNA, 1788 bp, Homo Sapiens
  misc_feature (1568)..(1607): n is a, c, g, or t
tataaaagccaactttgtacaaaaaagttggctggcaaattctgcgagtgtgataatttcaactgtgatagatccaatggcttaatttgtggaggaaatggtgtttgcaagtgtcgtgtgtgtgagtgcaaccccaactacactggcagtgcatgtgactgttctttggatactagtacttgtgaagccagcaacggacagatctgcaatggccggggcatctgcgagtgtggtgtctgtaagtgtacagatccgaagtttcaagggcaaacgtgtgagatgtgtcagacctgccttggtgtctgtgctgagcataaagaatgtgttcagtgcagagccttcaataaaggagaaaagaaagacacatgcacacaggaatgttcctattttaacattaccaaggtagaaagtcgggacaaattaccccagccggtccaacctgatcctgtgtcccattgtaaggagaaggatgttgacgactgttggttctattttacgtattcagtgaatgggaacaacgaggtcatggttcatgttgtggagaatccagagtgtcccactggtccagacatcattccaattgtagctggtgtggttgctggaattgttcttattggccttgcattactgctgatatggaagcttttaatgataattcatgacagaagggagtttgctaaatttgaaaaggagaaaatgaatgccaaatgggacacgggtgaaaatcctatttataagagtgccgtaacaactgtggtcaatccgaagtatgagggaaaatgagtactgcccgtgcaaatcccacaacactgaatgcaaagtagcaatttccatagtcacagttaggtagctttagggcaatattgccatggttttactcatgtgcaggttttgaaaatgtacaatatgtataatttttaaaatgttttattattttgaaaataatgttgtaattcatgccagggactgacaaaagacttgagacaggatggttattcttgtcagctaaggtcacattgtgcctttttgaccttttcttcctggactattgaaatcaagcttattggattaagtgatatttctatagcgattgaaagggcaatagttaaagtaatgagcatgatgagagtttctgttaatcatgtattaaaactgatttttagctttacaaatatgtcagtttgcagttatgcagaatccaaagtaaatgtcctgctagctagttaaggattgttttaaatctgttattttgctatttgcctgttagacatgactgatgacatatctgaaagacaagtatgttgagagttgctggtgtaaaatacgtttgaaatagttgatctacaaaggccatgggaaaaattcagagagttaggaaggaaaaaccaatagctttaaaacctgtgtgccattttaagagttacttaatgtttggtaacttttatgccttcactttacaaattcaagccttagataaaagaaccgagcaattttctgctaaaaagtccttgatttagcactatttacatacaggccatactttacaaagtatttgctgaatggggacnnnnnnnnnnnnnnnnnnnnnnnnnnnnnnnnnnnnnnnnatgtctggtgctttctatcacctcttctaatcttttaatgtatttgtttgcaattttggggtaagactttttttatgagtactttttctttgaagttttagcggtcaatttgcctttttaatgaacatgtgaagttatactgtggctatgcaacagctctcacctacgcgagtcttacttt

SEQ ID NO: 183582 - DNA, 1587 bp, Homo Sapiens
actttgtacaaaaaagttgggccatggctgccattacctgaccagcgccacagccggtctctctgcaggcgccgggagaagtgaccagagcaatttctgcttttcacagggcgggtttctcaacggtgacttgtgggcagtgccttctgctgagcgagtcatggcccgaaggcagaactaactgtgcctgcagtcttcactctcaggatgcagccgaggtgggcccaaggggccacgatgtggcttggagtcctgctgacccttctgctctgttcaagccttgagggtcaagaaaactctttcacaatcaacagtgttgacatgaagagcctgccggactggacggtgcaaaatgggaagaacctgaccctgcagtgcttcgcggatgtcagcaccacctctcacgtcaagcctcagcaccagatgctgttctataaggatgacgtgctgttttacaacatctcctccatgaagagcacagagagttattttattcctgaagtccggatctatgactcagggacatataaatgtactgtgattgtgaacaacaaagagaaaaccactgcagagtaccagctgttggtggaaggagtgcccagtcccagggtgacactggacaagaaagaggccatccaaggtgggatcgtgagggtcaactgttctgtcccagaggaaaaggccccaatacacttcacaattgaaaaacttgaactaaatgaaaaaatggtcaagctgaaaagagagaagaattctcgagaccagaattttgtgatactggaattccccgttgaggaacaggaccgcgttttatccttccgatgtcaagctaggatcatttctgggatccatatgcagacctcagaatctaccaagagtgaactggtcaccgtgacggaatccttctctacacccaagttccacatcagccccaccggaatgatcatggaaggagctcagctccacattaagtgcaccattcaagtgactcacctggcccaggagtttccagaaatcataattcagaaggacaaggcgattgtggcccacaacagacatggcaacaaggctgtgtactcagtcatggccatggtggagcacagtggcaactacacgtgcaaagtggagtccagccgcatatccaaggtcagcagcatcgtggtcaacataacagaactattttccaagcccgaactggaatcttccttcacacatctggaccaaggtgaaagactgaacctgtcctgctccatcccaggagcacctccagccaacttcaccatccagaaggaagatacgattgtgtcacagactcaagatttcaccaagatagcctcaaagtcggacagtgggacgtatatctgcactgcaggtattgacaaagtggtcaagaaaagcaacacagtccagatagtcgtatgtgaaatgctctcccagcccaggatttcttatgatgcccagtttgaggtcataaaaggacagaccatcgaagtccgttgcgaatcgatcagtggaactttgcctatttcttaccaacttttaaaaacaagtaaagttttggagaatagtaccaagaactcaaatgat

SEQ ID NO: 183583 - DNA, 2063 bp, Homo Sapiens
  misc_feature (1820)..(1845): n is a, c, g, or t
tttgtacaaaaaagttggcctccacatacaacttggaaaagaagaggaggatgatgactggggagaagatacaactgaggaagctcaaaggcgtcgaatggatgaaatcagtgaccatgcaaaagttctgacactcagtgatgatttggaaagaacaattgaggagagggtcaatatcctctttgattttgttaagaaaaagaaagaagagggtgttattgattcatctgacaaagaaatcgttgctgaagcagaaagactgggtaaaagccatgggccctcttgttctaactgaagttctttttaatgagaagattagagaacagattaagaaatacaggcgccatttcctacgattttgtcacaacaacaaaaaagcccaacggtaccttcttcatggtttggagtgtgtggtagcaatgcatcaagctcagcttatctccaagattccacatatcttgaaggagatgtacgatgcagaccttttagaagaagaggtcatcatcagctggtcggaaaaggcctctaagaaatatgtctccaaagaacttgccaaagagattcgtgtcaaagcagaaccatttataaaatggttgaaggaggcagaggaagaatcttctggtggcgaagaagaagatgaagatgagaacattgaggtggtgtattcgaaggctgccagtgtaccgaaagttgagactgtaaagtcagacaacaaggatgacgacatcgatattgatgccatttaaagggatggatgcaacctagcttaacagtataatgctgcaaattttcctccattatcagccagaagtgcaacatgtatgtgcaaaagctaaaatggcttaacatcatgctacactttacactaaaaatctattactgtgagtggtctgttattaagcccaatgagacatctagggagtccatacacatcagtgagcagatgtagtttgcttatttatagcatgtttctttttgaaaaactagtggtggacacatttggatcacatttatacagttataaaaataaaggtttgattttggtcgttcttcagatgtttggctctgaatgacttaagctgaagtaactggctccttactttaaatgttctgccatcatttcacctgatgagcattcttggagcctgccagatattgttaggtcctggggctgcaaagaggtcctcaacaggatgtaaagcaaacttaattgtaattaatttattcagcccattaagaaagtactaaagttttatctctgtagttcctcaaattggcatctggtaatgtacattgtgaggtagactgataatgaaatgacagtgcaacatcttaaccaagaagtaaatatgacctcagtgtcctataaataatgtaagagcaggatttgaaacttggagagctgttttctcatttcatgtacacttgccccaaattgtctttgaagtcgtgtgcattgcacgttggatgagccagggaaattattacattaacaagcattttgtgtgtacgtagtagttactttgtactgagagaacttgctttggggtgcaattaataaactgattttatttgggagaaacaaggaagggtgcacttaactagcaacctaagcatgatttttcagcttttgcccttagggtttaaattacaattccaaaatgttagacatactgtattttttcgttcagtgtggctttaattttcccctcttgcagtttgttctgtaatgccttttacatttggacacatagtttatgctttttagattttggttgctttcttgccaaaataagtgttaactgtgtttcaaacttgannnnnnnnnnnnnnnnnnnnnnnnnncttccagaatgtcttatttaaaaagaaagctaaaagcatacttctaagtcagagcctctattttggtgtaagacttgggatattttttacttcacattgaatatagccaggcacccaagaagtctgatggccacctgagtgcaggtgacaaggacctgacagagcccatgcatggctttagatttggacacacaagagttgataacttcctcatgaac

SEQ ID NO: 183584 - DNA, 1591 bp, Homo Sapiens
ttggcttttctctcctgtagtctaaggttgtgggtgacagagagaacggcagtgacaacctcccttcctcagcggggagtggtgacaagcccctgtcggatcccgcacctttctaagcctgtggttgcttcacccgctgcagagcacacgcaacccagcctcagcatcacagccgcagctctgttcagcggagcagccagccagggcggatgagcagagccggccctgaggacagtcctgcccatccacgcggagatgtggctgccgcgtttgcatgaatttgaagaacacaggcttgtacacagatgttttacactcacgtttgtagatgaaacagatcactgtgctgtccttcctaggggtgcaggaagtggacagggcggagggtttgaaagaatattgagccaaagcccaggctccctttgggaatcatgttagcccatcagaatgttgaaggattgaagagttctaagcataaaataagtggcattttctgacttcttcctcctcctccttccctgactcacagaaggaatgcaatcacccagcaagtcctacctgttacgcaattttttatctcaaaatgccgaacgagaaaactgtccattttctgagacccccagaaaggaaactgaccctcagcagctgcctgattgttacgcgaatctagctttaacggaagcaaattcattattttttaaatgcagtggacttttcaaaaagtttaaattaggcaaagcagctttagcctcatagaatattatttctttggactcaagctgaaatacaagccttacattgccttatgctttatttctttctaatttttatatgtatatagatgagggttccttaatggttgtgagcattgtgtggaattttacacctggcctgcgtggcagcctcttccagttgaggtgttttatgtcacgcacactccatcccagtgtacaaaacctgcttctcttctcaaccgtggcagctcccgctggctcctatgccctgccctaaagggctcttgagcctctgggaatgggaggggccaagagaaggaaaaccctgtctttagcaccctttaaaagaactgtgccccccttctcagtgctgcctttgcatgggcctggcccggctcgcattcgtcagtgactccaaccctcctgcttgctgtacttgggatgaaacgaccccacaggtcaggtggagggtggggcgtgggcatcagccaggattgccgttacagtctttttctcaggagctacaaagatctcttcctgttactaaatggtcgcaccccagcagcctctctcgcacaccggggccctgcatgtcagatggcgtggtctgcagggggagctctgtgccttagtggctcttggcaggacactgagggcctgcctgtggtgtgcccggctctgccactcccgggaggggaagggctgctcaactcaaggtgtcctgttcggtaaagcaagtgtcctctgacagccgtgtccccggacagttcagacacccttggggatggcactccacacacaacagagatgcaggggccagggaagcccagcgctcggtgcccttcgtccagggttaa

SEQ ID NO: 183585 - DNA, 2883 bp, Homo Sapiens
  misc_feature (2528)..(2536): n is a, c, g, or t
ttgggaagctttcagatttgatggtggtgttgaagccatcgctacaagacaaaatgaaaaatactacatcttacggccagaagttatggagacttacatgtatatgtggagactgactcatgatccaaagtacaggaaatgggcctgggaagccgtagaggccttggaaaaccattgcagagtgaatggaggctattcaggcctaagggatgtttaccttcttcatgagagttatgatgatgtgcagcagagtttcttcctggcagagacattgaaatatttgtacctaatattttctgacgacgatcttcttccactggagcattggatcttcaatagcgaggcacatcttctccctatcctccctaaagataaaaaggaagttgaaatcagagaggaataaaaagacattttatattttattctgctccattcccttcactgtataccttaataattccttttctggtaatcaggcacatgatgaactttgattagtaggtctgtgattaagttcttaaattgttttgcagtcttttatgtttattatcataggtataggtggacctaaattccttatcatatcctttattaattcagccagtgtatccaccagttttttgtttatgtttttaagtaacctattatctctggatttcatgaaggtgtaatatcgtttttgttaaactgaatagaattgtatagcgatgacctcttaattataatttgatttgactgcaaaactttttcctcctctaagaggagatgatgtctgctttaagctgtaatgttttgccatgttgcaaaaagccataataataagtataaaaaagctttttcctttacaatttcatgttaatctggtttgtctgtccaccagagacagatcttctgtgacagcctccttatgcaggtctatcattatttgatagaatgtcttctaaaatacttcactcacattgtaattcaaattagaaagtcattccaaaaggatcatgtcatgttgacctcatttcatcggaactgcagtatatttttgttggttaattatattagtgttttctattttgtaaatgtgtcctttaattttactttaaatggcctgtgtcatttctggattatatactagttaatttcttccattccccactacacagagaggtgagctttcaaattttgcagagctctgctatcactgaattacatttatctgaagaaaatagtacaacttaatggattagcttttgggtttaactgaatatatgaagaaattgggtctgtctaaagagagggtatttcatatggcttttagttcacttgtttgtatttcatcttgatttttttctttggaaaataaagcattctatttggttcagatttctcagatttgaaaaaggctctatctcagatgtagtaaattatttcctttcagtttgtgaaagcaggatttgactctgaaagaagctttgccaattttacttattcgtgatcaatcaaggaaaatctaataaattttaggccaaataagaatatagcatatttagtatggttatagtcaacacagagatcacaacttagaagaaatataaagaaatggccactccccatcccccacagtcctggagtaaatcaaaatcaatatatgattcttttaaacattaagtttgaaataggaatggttttctcaagaatagatttggtgtgataccttgtgtttgcttacattggcccactatatatacatatatatttatgtagatatacttccatgaaagggctaatacgatgcatatactgaagggcaaggactttgaccatgtcaattttcagccgagaatggtcagaaagatcagtacaaccccatggattaggctgaaacatatgaaattgctgcatttgtagtttaaaaactgtcagcagtttcatatggttccacctaatattattgaagacaattattttcttagctatcaataggcttaatagttttagttattttagcttttgaaagtgttttaaaagatttcctttatcggacaggaccatctttatgacctgctttctgtttttcaatatcatacattggtgtatgtcaaagaataaattagtaaaattagtaaatgaaaaagactcttccgtacatcattatttccatgctaatgtgtgtctgtgatccagaataacttctcccactcatatcttcagttcacctaatgaaatgaatggatagcaagagccctttgttcccaggactttaaggcaaaatattaaaaattattgccaaaattaagaatataatgtttgtataaatgtccttgaatttgccatttaaattaactcattttcttttcactttgatttgaaagctgataagtatttctgcagcagatagaatattaaaatcaggttgtgtgtacacactgcactatgaggtaccttggtgtcctggtgtgaatagacaagaagctgtactatatgttgctctctcagtggcaacaatgaagtttttgcaattctagaacttggannnnnnnnnaacaaaagtcccaaaacaccaaaaatgtaaacaagataagagattaatattgtagtgatgtaatttaattaaagttatattttgggttaattttaacaactgaagtcttattgttgaaacttattttcaacaaaactgtgcagttaaatttgtatacgtattcacatactgaaagatgaaccgttaaaatagcacttaattttgtgtttcttcaatatgtcttgatatactttgtgcaattaatattacacatgtaagttgtatggcagtttacagaactcaatgacttgtcatgaggttttcatatgagctacacatttgtgtacattgatggtttttaattttta

SEQ ID NO: 183586 - DNA, 2222 bp, Homo Sapiens
atcaagcgtttccagatcatgaatgaaatcgtctatgaaaaaatcatggaacatgctggaaaaaatcaggtgctggtgtttgtccactcccggaaggagactggaaagacagccagggccatccgggacatgtgcctagaaaaggacactctgggtctgtttctgagggagggctcagcctccacagaagtcctgcgaacagaagctgagcagtgcaagaacctagagctgaaggatcttctgccttatggctttgctattcatcacgcaggcatgaccagggttgaccgaacactcgtggaggatctttttgctgataaacatattcaggttttagtttccacagcaactctagcttggggtgtgaatctccctgcacatacagtcatcatcaaaggcacccaggtgtacagtccagagaaggggcgttggacagaactgggagcactggacattctgcagatgctgggacgtgccggaagaccccagtatgacaccaagggtgaaggcatactcatcacatctcatggggagctacagtactacctgtccctcctcaatcaacaacttcctattgaaagccagatggtttcaaagcttcctgacatgctcaatgcagaaatcgtgctaggaaatgtccagaatgccaaggatgcggtgaactggctgggctatgcctacctctatatccgaatgctgcgatccccaaccctctatggcatctctcatgatgacctcaagggagatcccctgctggaccagcgccgactagatctggttcatacagctgccctgatgctggacaagaacaatctggtcaagtacgacaagaagacgggcaacttccaggtgacagaactgggccgtatagccagccactactacatcaccaatgatacagtgcagacttacaaccagctgctgaagcccaccctgagtgagattgagcttttcagggtcttctcattgtcctctgagttcaagaacatcacagtgagagaggaggagaagctggagctgcagaagttgctggagagggtgcctatccctgtaaaggagagcattgaggaacccagtgctaagatcaacgttcttctgcaagccttcatctcacagctgaaattggagggctttgcactgatggctgacatggtgtatgtcacacagtcggctggccggttgatgcgagcgatatttgaaattgtcctgaaccgaggttgggcacagcttacagacaagaccctgaacctctgcaagatgatcgacaaacgcatgtggcagtccatgtgtcctctgcgccagttccggaaactccctgaggaagtagtgaagaagattgagaagaagaatttcccctttgagcgtctgtacgacctgaatcataatgagattggggagcttatccgcatgccaaagatggggaagaccatccacaaatatgtccatctgtttcccaagttggagttgtcagtgcacctgcagcctatcacacgctccaccctgaaggtggagctgaccatcacgccagacttccagtgggatgaaaaggtgcatggttcatccgaggctttttggattctggtggaggatgtggacagcgaggtgattctgcaccatgagtattttctcctcaaggccaagtacgcccaggacgagcacctcattacattcttcgtgcctgtctttgaaccgctgccccctcagtacttcatccgagtggtgtctgaccgctggctctcttgtgagacccagctgcctgtctccttccggcacctgatcttgccggagaagtacccccctccaaccgaacttttggacctgcagcccttgcccgtgtctgctctgagaaacagtgcctttgagagtctttaccaagataaatttcctttcttcaatcccatccagacccaggtgtttaacactgtatacaacagtgacgacaacgtgtttgtgggggcccccacgggcagcgggaagactatttgtgcagagtttgccatcctgcgaatgctgctgcagagctcggaggggcgctgtgtgtacatcacccccatggaggccctggcagagcaatatacatggactggtacgagaagttccaggacaggctcaacaagaaagtggtactcctgacaggcgagaccagcacagacctgaagctgctgggcaaagggaacattatcatcagcacccctgagaagtgggacatactttcccggcga

SEQ ID NO: 183587 - DNA, 2552 bp, Homo Sapiens
gctgccccatcgcatcgcatagaggctgctatgggattagaacgtagcttgagatctgcaggtcaacaggtctgtttggcatctcaggttttcctcacataagtgaaagatgcctggtatggcctagtgttgttctgcctccctcctctgcccgccaggtatacatggactggtacgagaagttccaggacaggctcaacaagaaggtggtactcctgacaggcgagaccagcacagacctgaagctgctgggcaaagggaacattggatcatcagcacccctgagaagtgggacatactttcccggcgatggaagcagcgcaagaacgtgcagaacatcaacctcttcgtggtggatgaggtccaccttatcgggggcgagaatgggcctgtcttagaagtgatctgctcccgaatgcgctacatctcctcccagattgagcggcccattcgcattgtggcactcagctcttcgctctccaatgccaaggatgtggcccactggctgggctgcagtgccacctccaccttcaacttccatcccaatgtgcgtcccgtccccttggagctgcacatccagggcttcaacatcagccatacacaaacccgcctgctctccatggccaagcctgtgtaccatgctatcaccaagcactcgcccaagaagcctgtcattgtctttgtgccgtctcgcaagcagacccgcctcactgccattgacatcctcaccacctgtgcagcagacatccaacggcagaggttcttgcactgcaccgagaaggatctgattccgtacctggagaagctaagtgacagcacgctcaaggaaacgctgctaaatggggtgggctacctgcatgaggggctcagccccatggagcgacgcctggtggagcagctcttcagctcaggggctatccaggtggtggtggcttctcggagtctctgctggggcatgaacgtggctgcccacctggtaatcatcatggatacccagtactacaatggcaagatccacgcctatgtggattaccccatctatgacgtgcttcagatggtgggccacgccaaccgccctttgcaggacgatgaggggcgctgtgtcatcatgtgtcagggctccaagaaggatttcttcaagaagttcttatatgagccattgccagtagaatctcacctggaccactgtatgcatgaccacttcaatgctgagatcgtcaccaagaccattgagaacaagcaggatgctgtggactacctcacctggacctttctgtaccgccgcatgacacagaaccccaattactacaacctgcagggcatctcccatcgtcacttgtcggaccacttgtcagagctggtggagcagaccctgagtgacctggagcagtccaagtgcatcagcatcgaggacgagatggacgtggcgcctctgaacctaggcatgatcgccgcctactattacatcaactacaccaccattgagctcttcagcatgtccctcaatgccaagaccaaggtgcgagggcttatcgagatcatctccaatgcagcagagtatgagaacattcccatccggcaccatgaagacaatctcctgaggcagttggctcagaaggtcccccacaagctgaataaccctaagttcaatgatccgcacgtcaagaccaacctgctcctgcaggctcacttgtctcgcatgcagctgagtgctgagttgcagtcagatacggaggaaatccttagtaaggcaatccggctcatccaggcctgcgtggatgtcctttccagcaatgggtggctcagccctgctctggcagctatggaactggcccagatggtcacccaagccatgtggtccaaggactcatacctgaagcagctgccacacttcacctctgagcatatcaaacgttgcacagacaagggagtggagagtgttttcgacatcatggagatggaggatgaagaacggaacgcgttgcttcagctgactgacagccagattgcagatgtggctcgcttttgtaaccgctaccctaatatcgaactatcttatgaggtggtagataaggacagcatccgcagtggcgggccagttgtggtgctggtgcagctggagcgagaggaggaagtcacaggccctgtcattgcgcctctcttcccgcagaaacgtgaagagggctggtgggtggtgattggagatgccaagtccaatagcctcatctccatcaagaggctgaccttgcagcaaaaggccaaggtgaagttggactttgtggccccagccactggtgcccacaactacactctgtacttcatgagtgacgcttacatgggatgtgaccaggagtacaaattcagcgtggatgtgaaagaagctgagacagacagtgattcagattgagtcctgaggcatttacttttgggtaaaggagagttgagcctgaattaggaatgtgtacattgtacgaatcctggttgtggggaccaggtctgtgggcctcaagtctggccagccagggctggtgctgtcccgcctacctccactt

SEQ ID NO: 183588 - DNA, 1256 bp, Homo Sapiens
ttggcgatatttgaaattgtcctgaaccgaggttgggcacagcttacagacaagaccctgaacctctgcaagatgatcgacaaacgcatgtggcagtccatgtgtcctctgcaccatgagtattttctcctcaaggccaagtacgcccaggacgagcacctcattacattcttcgtgcctgtctttgaaccgctgccccctcagtacttcatccgagtggtgtctgaccgctggctctcttgtgagacccagctgcctgtctccttccggcacctgatcttgccggagaagtacccccctccaaccgaacttttggacctgcagcccttgcccgtgtctgctctgagaaacagtgcctttgagagtctttaccaagataaatttcctttcttcaatcccatccagacccaggtgtttaacactgtatacaacagtgacgacaacgtgtttgtgggggcccccacgggcagcgggaagactatttgtgcagagtttgccatcctgcgaatgctgctgcagagctcggaggggcgctgtgtgtacatcacccccatggaggccctggcagagcaggtatacatggactggtacgagaagttccaggacaggctcaacaagaaggtggtactcctgacaggcgagaccagcacagacctgaagctgctgggcaaagggaacattatcatcagcacccctgagaagtgggacatactttcccggcgatggaagcagcgcaagaacgtgcagaacatcaacctcttcgtggtggatgaggtccaccttatcgggggcgagaatgggcctgtcttagaagtgatctgctcccgaatgcgctacatctcctcccagattgagcggcccattcgcattgtggcactcagctcttcgctctccaatgccaaggatgtggcccactggctgggctgcagtgccacctccaccttcaacttccatcccaatgtgcgtcccgtccccttggagctgcacatccagggcttcaacatcagccatacacaaacccgcctgctctccatggccaagcctgtgtaccatgctatcaccaagcactcgcccaagaagcctgtcattgtctttgtgccgtctcgcaagcagacccgcctcactgccattgacatcctcaccacctgtgcagcagacatccaacggcagaggttcttgcactgcaccgagaaggatctgattccgtacctggagaagctaagtgacagcacgctcaagaaacgctgctaaatggg

SEQ ID NO: 183589 - DNA, 1993 bp, Homo Sapiens
ttggtttaaatcgcgccggccggctgcacgagccacacggtctttgagctgagtcgaggtggaccctttgaacgcagtcgccctacagccgctgattccccccgcatcgcctcccgtggaagcccaggcccgcttcgcagctttctccctttgtctcataaccatgtccaccaacgagaatgctaatacaccagctgcccgtcttcacagattcaagaacaagggaaaagacagtacagaaatgaggcgtcgcagaatagaggtcaatgtggagctgaggaaagctaagaaggatgaccagatgctgaagaggagaaatgtaagctcatttcctgatgatgctacttctccgctgcaggaaaaccgcaacaaccagggcactgtaaattggtctgttgatgacattgtcaaaggcataaatagcagcaatgtggaaaatcagctccaagctactcaagctgccaggaaactactttccagagaaaaacagccccccatagacaacataatccgggctggtttgattccgaaatttgtgtccttcttgggcagaactgattgtagtcccattcagtttgaatctgcttgggcactcactaacattgcttctgggacatcagaacaaaccaaggctgtggtagatggaggtgccatcccagcattcatttctctgttggcatctccccatgctcacatcagtgaacaagctgtctgggctctaggaaacattgcaggtgatggctcagtgttccgagacttggttattaagtacggtgcagttgacccactgttggctctccttgcagttcctgatatgtcatctttagcatgtggctacttacgtaatcttacctggacactttctaatctttgccgcaacaagaatcctgcacccccgatagatgctgttgagcagattcttcctaccttagttcggctcctgcatcatgatgatccagaagtgttagcagatacctgctgggctatttcctaccttactgatggtccaaatgaacgaattggcatggtggtgaaaacaggagttgtgccccaacttgtgaagcttctaggagcttctgaattgccaattgtgactcctgccctaagagccatagggaatattgtcactggtacagatgaacagactcaggttgtgattgatgcaggagcactcgccgtctttcccagcctgctcaccaaccccaaaactaacattcagaaggaagctacgtggacaatgtcaaacatcacagccggccgccaggaccagatacagcaagttgtgaatcatggattagtcccattccttgtcagtgttctctctaaggcagattttaagacacaaaaggaagctgtgtgggccgtgaccaactataccagtggtggaacagttgaacagattgtgtaccttgttcactgtggcataatagaaccgttgatgaacctcttaactgcaaaagataccaagattattctggttatcctggatgccatttcaaatatctttcaggctgctgagaaactaggtgaaactgagaaacttagtataatgattgaagaatgtggaggcttagacaaaattgaagctctacaaaaccatgaaaatgagtctgtgtataaggcttcgttaagcttaattgagaagtatttctctgtagaggaagaggaagatcaaaacgttgtaccagaaactacctctgaaggctacactttccaagttcaggatggggctcctgggacctttaacttttagatcatgtagctgagacataaatttgttgtgtactacgtttggtattttgtcttattgtttctctactaagaactctttcttaaatgtggtttgttactgtagcactttttacactgaaactatacttgaacagttccaactgtacatacatactgtatgaagcttgtcctctgactaggtttctaatttctatgtggaatttcctatcttgcagcatcctgtaaataaacattcaagtcc

SEQ ID NO: 183590 - DNA, 1456 bp, Homo Sapiens
gagtgttttatgtttcagacaaggaaatagtgtccacaaattacctcactcttagcactggggaaaaggtagaaaggttaagcccagtatacatttaaataattttttcttggacatacctggttctctgcttccactcatattaggccagtgtccagaaaatcacatttcctttgcaaggtgttttctctgagagaataattgagcagacaaactgttgatatccttgtgtgtcctcgatcacattaattttcagctaggagtgagagccatcatggttaccagagtggtgtgtttcctgcagtgcccctatcttgcttgcaccagtagagctgggccctccatcaaaccatgatctgtagctataaagctgataatgaaagcaattgtgttctctttttccatctaattttttctcttaaggaaatcttattccaaggattagagcccagattatcttgtaaaaaggtaatgatttgtgtttgtttggggagataatttggttttcctctgcaggcaccatcatgggagcagcattgctggaggactggtgaagggggctttgtctgttgctgcctctgcatacaaggccctgtttgctgggccaccagtcactgcacagccaataatttctgaagatcagacagcagccctgatggcccgtctctttgaaatgggattctgtgacaggcagctgaacctacggctgctgaagaaacacaattacaatatcctgcaggttgtgacagaacttcttcagttaaacaacaacgactggtacagccaacgctattgaggagtgaccttgtattaaataactgcctgctgctcagagatgatctttattctgtcattggggtatgggatagaagcccttgcttatttttaatctgatgaatctgtatagagcccatcgttgagttaccaagacaatacctgctacagtattttggggagcaaactaaagaccagaagttaaattttcactttagacattggatgaatagtatgaagacagtttttcagttgatttggataaaactattttagtgcattgacaagtgtaacttcaacttcatatagaaccatttttctttctgcttttattgaaactgagtatttttctttggctaatgtggattttttatggggatatctgttaattttcaggttttgaaagacattaacctcggaagttgtttttaagaattattctcataattcttattctcataatttctgtaatccacctcaagcttcatagttatttggcattgaaataacacccagagcatgatagaaatgttgttactcttcctctctcaaggagaaagtaattttcctgcaatacttaataattggcaccgttgctttctaaagactccatggtgcattcaagagtatccaacttcaagggaatctctgcatttcaatgaaaggaggaagagtgtgctga

SEQ ID NO: 183591 - DNA, 1475 bp, Homo Sapiens
ttatagccaactttgtacaaaaaagttggctcagagatgatctttattctgtcattggggtatgggatagaagcccttgcttatttttaatctgatgaatctgtatagagcccatcgttgagttaccaagacaatacctgctacagtattttggggagcaaactaaagaccagaacttaaattttcactttagacattggatgaatagtatgaagacagtttttcagttgatttggataaaactattttagtgcattgacaagtgtaacttcaacttcatatagaaccatttttctttctgcttttattgaaactgagtatttttctttggctaatgtggattttttatggggatatctgttaattttcaggttttgaaagacattaacctcggaagttgtttttaagaattattctcataattcttattctcataatttctgtaatccacctcaagcttcatagttatttggcattgaaataacacccagagcatgatagaaatgttgttactcttcctctctcaaggagaaagtaattttcctgcaatacttaataattggcaccgttgctttctaaagactccatggtgcattcaagagtatccaacttcaagggaatctccgcatttcaatgaaaggaggaagagtgtgctgataaacctaccagcacctattgagcaatgtctattatagtaattttgcatacatttttatttaagggaaaaaatataggtattgtgaaatattttgctaatcttatagaaaaggaaaaaatcccgttatttaaagggaaaagtaaatttaacagttgccttttttcttaatgtcagggcagatcttattttacagtacagtgggggaaatagaaacatgtgaaaggcaaaaggcaggctcctaaattaatgtcagtgaagttcagggtgggcaaatgagtgtgtgtgaggtataggaaatgctgatgacttctttaatgcttgaagtccgttcacaggtatctagccctagaatgcctagaacaggaagaggcagctggtgttctgcaaaacttggacaggggcaaagttgctgaaaaagttttggtttaacccgaagataagtggaaaagagcttgtccatgaacccaggttctcactctgtttacagaagtgtgttgagtacagttggtgaaggaagaggtaacaaaaaatgctaaatattttatccatgaaaatgacttccagaaaaggaagaatatgaaccccagaccgaaggggaaaagatagttaatagtattatctaacctggttggtatttgtaatgaatggtgattttaattagtcattagccataatgatgtttatttacagtataactcctgaatgctacttaaataaaccaggattcaaactgcaagccagccaggccgttcattatttaaaacgttttaatccggggcttccgggtagaaaggtggagcggcagggtgtaatttgg

SEQ ID NO: 183592 - DNA, 2175 bp, Homo Sapiens
  misc_feature (1583)..(1591): n is a, c, g, or t
  misc_feature (2075)..(2089): n is a, c, g, or t
gcctgaccgcatggctgattcaactccagtgtcaatcaacttctttttcctcctcttcctcatttaaataagtttaaagctcctcctccccccggcccaccaaatctgaactttataaattgggctttgcgcgccccagcccggagtcagaaaggcgaggggcgccgggaactggcgtgtgggactccagacaggagaggctgcgccttccccgcaccgggaccttcgcgacacaccagatcctcgcccctggctcgcgcgaactcacaggatgaccaccaccctcgtgtctgccaccatcttcgacttgagcgaagttttatgcaagggtaacaagatgctcaactatagtgctcccagtgcagggggttgcctgctggacagaaaggcagtgggcacccctgctggtgggggcttccctcggaggcactcagtcaccctgcccagctccaagttccaccagaaccagctcctcagcagcctcaagggtgagccagcccccgctctgagctcgcgagacagccgcttccgagaccgctccttctcggaagggggcgagcggctgctgcccacccagaagcagcccgggggcggccaggtcaactccagccgctacaagacggagctgtgccgcccctttgaggaaaacggtgcctgtaagtacggggacaagtgccagttcgcacacggcatccacgagctccgcagcctgacccgccaccccaagtacaagacggagctgtgccgcaccttccacaccatcggcttttgcccctacgggccccgctgccacttcatccacaacgctgaagagcgccgtgccctggccggggcccgggacctctccgctgaccgtccccgcctccagcatagctttagctttgctgggtttcccagtgccgctgccaccgccgctgccaccgggctgctggacagccccacgtccatcaccccaccccctattctgagcgccgatgacctcctgggctcacctaccctgcccgatggcaccaataacccttttgccttctccagccaggagctggcaagcctctttgcccctagcatggggctgcccgggggtggctccccgaccaccttcctcttccggcccatgtccgagtcccctcacatgtttgactctccccccagccctcaggattctctctcggaccaggagggctacctgagcagctccagcagcagccacagtggctcagactccccgaccttggacaactcaagacgcctgcccatcttcagcagactttccatctcagatgactaagccagggtagggagggacctcctgcctactccagcccctaccctgcacccacatcccataccctcttctccctacccatcccattccccacaggccctacattaacaaggttaagctcaacccctttcccccagcacctcagaatgtgccctccctctccccctcataaccccacctaacataaggacaagtcaatttgtcagtagcttcttctggcttgaaaccccctccctggattttatagcccacttaccatgcataacagacaagtcccatattttgtcagtagatgccnnnnnnnnnccggcttaagccttaagtgccaaatcacaagagaaaaagcagtaacagtttacagaagcaacttagtgccttgtaatctaactttgtcactgtgactacattacctcttcagcgccagagggcacccgtgggcctcccggagcctctgcccatggcggggtggagacccggaaccagcagccccctccactggcgacacaactgcaccttccctcatttcagtctcccgcacacttattcctcctcccctcttcccggtggcacctctccacctgtacccgcccccgccccaccaccccggccccttggaagagttgttgccagaccagggttttgggggaaacctgtcttgacattcaaaacctttttcttcccgatctgaacccctgttgactaatcttgcctgggtttgtgtaggtctgcaggaaggaaggctgaaaaagcggacgaagattttgacttaagtgggactttgtgatttaannnnnnnnnnnnnnnaagtggggaggaaggggaagctagatggactatgagagacttgattttggtgctaaagttccccagttcatatgtgacatcttttt

SEQ ID NO: 183593 - DNA, 1816 bp, Homo Sapiens
  misc_feature (1045)..(1075): n is a, c, g, or t
  misc_feature (1254)..(1268): n is a, c, g, or t
  misc_feature (1355)..(1404): n is a, c, g, or t
ttggcttttgcccctacgggccccgctgcccgtccccgcctccagcatagctttagctttgctgggtttcccagtgccgctgccaccgccgctgccaccgggctgctggacagccccacgtccatcaccccaccccctattctgagcgccgatgacctcctgggctcacctaccctgcccgatggcaccaataacccttttgccttctccagccaggagctggcaagcctctttgcccctagcatggggctgcccgggggtggctccccgaccaccttcctcttccggcccatgtccgagtcccctcacatgtttgactctccccccagccctcaggattctctctcggaccaggagggctacctgagcagctccagcagcagccacagtggctcagactccccgaccttggacaactcaagacgcctgcccatcttcagcagactttccatctcagatgactaagccagggtagggagggacctcctgcctactccagcccctaccctgcacccacatcccataccctcttctccctacccatcccattccccacaggccctacattaacaaggttaagctcaacccctttcccccagcacctcagaatgtgccctccctctccccctcataaccccacctaacataaggacaagtcaatttgtcagtagcttcttctggcttgaaaccccctccctggattttatagcccacttaccatgcataacagacaagtcccatattttgtcagtagatgccattttttttccggcttaagccttaagtgccaaatcacaagagaaaaagcagtaacagtttacagaagcaacttagtgccttgtaatctaactttgtcactgtgactacattacctcttcagcgccagagggcacccgtgggcctcccggagcctctgcccatggcggggtggagacccggaaccagcagccccctccactggcgacacaactgcaccttccctcatttcagtctcccgcacacttattcctcctcccctcttcccggtggcacctctccacctgtnnnnnnnnnnnnnnnnnnnnnnnnnnnnnnnttggaagagttgttgccagaccagggttttgggggaaacctgtcttgacattcaaaacctttttcttcccgatctgaacccctgttgactaatcttgcctgggtttgtgtaggtctgcaggaaggaaggctgaaaaagcggacgaagattttgacttaagtgggactttgtgatttaannnnnnnnnnnnnnnaagtggggaggaaggggaagctagatggactaggagagacttgattttggtgctaaagttccccagttcatatgtgacatctttttnnnnnnnnnnnnnnnnnnnnnnnnnnnnnnnnnnnnnnnnnnnnnnnnnngtaaggggtgagcagttaatggtattcattccacatacaatatctgtgtaaaacgatttcctgtagaagtagctttaatggtttttgctctagaataccgtaggtctatccttagagcactcacgccatgctttcttccctgggttttaaacttcatataactttcagaaattggagagcaaaaattttgcttgtcactgcacatcaatataaaaaagcttatttaacttatcaaaacgtatttattgccaaactatgcttttttttgttaattttgttcatatttatcgggatgacaaatccatagaatatattcttttatgttaaattatgatcttcatattaatcttaaaattttgtgacgtgtctttttcctttttttccacagttttaatatattattcttcaacga

SEQ ID NO: 183594 - DNA, 879 bp, Homo Sapiens
  misc_feature (80)..(94): n is a, c, g, or t
  misc_feature (181)..(230): n is a, c, g, or t
  misc_feature (644)..(719): n is a, c, g, or t
actttgtacaaaaaagttggggaaggaaggctgaaaaagcggacgaagattttgacttaagtgggactttgtgatttaannnnnnnnnnnnnnnaagtggggaggaaggggaagctagatggactaggagagacttgattttggtgctaaagttccccagttcatatgtgacatctttttnnnnnnnnnnnnnnnnnnnnnnnnnnnnnnnnnnnnnnnnnnnnnnnnnngtaaggggtgagcagttaatggtattcattccacatacaatatctgtgtaaaacgatttcctgtagaagtagctttaatggtttttgctctagaataccgtaggtctatccttagagcactcacgccatgctttcttccctgggttttaaacttcatataactttcagaaattggagagcaaaaattttgcttgtcactgcacatcaatataaaaaagcttatttaacttatcaaaacgtatttattgccaaactatgcttttttttgttaattttgttcatatttatcgggatgacaaatccatagaatatattcttttatgttaaattatgatcttcatattaatcttaaaattttgtgacgtgtctttttcctttttttccacagttttaatatattattcttcaacgacnnnnnnnnnnnnnnnnnnnnnnnnnnnnnnnnnnnnnnnnnnnnnnnnnnnnnnnnnnnnnnnnnnnnnnnnnnnnctgttggattatttattttagaaattcccccctttgtgttggactgcaaattgagtttctttctctttaggcctttcacaactaggactgagaatgtatgtaaaagttctgtgacagtacagaaggaaaacaactttttatgtatagcttctaaaagggg

SEQ ID NO: 183595 - DNA, 1275 bp, Homo Sapiens
  misc_feature (261)..(297): n is a, c, g, or t
  misc_feature (476)..(490): n is a, c, g, or t
  misc_feature (577)..(626): n is a, c, g, or t
  misc_feature (1040)..(1115): n is a, c, g, or t
ttgggataagtggctaatcctcttggtaaaggagaatgagtttacggaatcaacttattgccgtgtaatctaactttgtcactgtgactacattacctcttcagcgccagagggcacccgtgggcctcccggagcctctgcccatggcggggtggagacccggaaccggaagccccctccactggcgacacaactgcaccttccctcatttcactctcccgcacacttattccacctcccctcttcccagagggacctctnnnnnnnnnnnnnnnnnnnnnnnnnnnnnnnnnnnnnttggaagagttgttgccggaccagggttttgggggaaacctgtcttgacattcaaaacctttttcttcccgatctgaacccctgttgactaatcttgcctgggtttgtgtaggtctgcaggaaggaaggctgaaaaagcggacgaagattttgacttaagtgggactttgtgatttaannnnnnnnnnnnnnnaagtggggaggaaggggaagctagatggactaggagagacttgattttggtgctaaagttccccagttcatatgtgacatctttttnnnnnnnnnnnnnnnnnnnnnnnnnnnnnnnnnnnnnnnnnnnnnnnnnngtaaggggtgagcagttaatggtattcattccacatacaatatctgtgtaaaacgatttcctgtagaagtagctttaatggtttttgctctagaataccgtaggtctatccttagagcactcacgccatgctttcttccctgggttttaaacttcatataactttcagaaattggagagcaaaaattttgcttgtcactgcacatcaatataaaaaagcttatttaacttatcaaaacgtatttattgccaaactatgcttttttttgttaattttgttcatatttatcgggatgacaaatccatagaatatattcttttatgttaaattatgatcttcatattaatcttaaaattttgtgacgtgtctttttcctttttttccacagttttaatatattattcttcaacgacnnnnnnnnnnnnnnnnnnnnnnnnnnnnnnnnnnnnnnnnnnnnnnnnnnnnnnnnnnnnnnnnnnnnnnnnnnnnctgttggattatttattttagaaattcccccctttgtgttggattgcaaattgagtttctttctctttaggcctttcacaactaggactgagaatgtatgtaaaagttctgtgacagtacagaaggaaaacaactttttatgtatagcttctaaaagggg

SEQ ID NO: 183596 - DNA, 815 bp, Homo Sapiens
  misc_feature (118)..(166): n is a, c, g, or t
  misc_feature (578)..(655): n is a, c, g, or t
gagcaatgctttcctataaaatagccaactttgtacaaaaaagttgggaagctagatggactaggagagacttgattttggtgctaaagttccccagttcatatgtgacatctttttnnnnnnnnnnnnnnnnnnnnnnnnnnnnnnnnnnnnnnnnnnnnnnnnngtaaggggtgagcagttaatggtattcattccacatacaatatctgtgtaaaacgatttcctgtagaagtagctttaatggtttttgctctagaataccgtaggtctatccttagagcactcacgccatgctttcttccctgggttttaaacttcatataactttcagaaattggagagcaaaaattttgcttgtcactgcacatcaatataaaaaagcttatttaacttatcaaaacgtatttattgccaaactatgcttttttttgttaattttgttcatatttatcgggatgacaaatccatagaatatattcttttatgttaaattatgatcttcatattaatcttaaaattttgtgacgtgtctttttcctttttttccacagttttaatatattattcttcaacgnnnnnnnnnnnnnnnnnnnnnnnnnnnnnnnnnnnnnnnnnnnnnnnnnnnnnnnnnnnnnnnnnnnnnnnnnnnnnnctgttggattatttattttagaaattcccccctttgtgttggactgcaaattgagtttctttctctttaggcctttcacaactaggactgagaatgtatgtaaaagttctgtgacagtacagaaggaaaacaactttttatgtatagcttctaaaagggg

SEQ ID NO: 183597 - DNA, 632 bp, Homo Sapiens
ctttgtacaaaaaagttggtttaatggtttttgctctaaaataccgtaggtctatccttaaagcactcacgccatgctttcttccctgggttttaaacttcatataactttcagaaattggagagcaaaaattttgcttgtcactgcacatcaatataaaaaagcttatttaacttatcaaaacgtatttattgccaaactatgcttttttttgttaattttgttcatatttatcgggatgacaaatccataaaatatattcttttatgttaaattatgatcttcatattaatcttaaaattttgtgacgtgtctttttcctttttttccacagttttaatatattattcttcaaccacattttttggaactttacacttttttggttattttattttaaaaagatgacaaattaatttaatcaaatgcaaaaaactgttggattatttattttaaaaattcccccctttgtgttcgactgcagattgagtttatttctctttaggactttctaaccaggactgacaatgattgtggaacttctgtgacagtagcaacagcaaacaaattcccctgtatatcttactccaagggacataaaaataaaacacaaaccgtttaacttccacctg

SEQ ID NO: 183598 - DNA, 1886 bp, Homo Sapiens
ttggctgcagtctctctcgtccggtgtctgcgtgccaagctgtattaccaactgcttgtggactaaagaggatggcatagaacttccacctctgctgtccctaacctgtttgttccattgaacactaacccaaaagaggtccaggagatgaggaacaagatccgagagcagaatttacaggacattaagacggctggccctcagtcccaggttttgtgtggtgtagtgatggacaggagcctcgtccagggagagctggtgacggcctccaaggccatcattgaaaaggagtaccagccccacgtcattgtgagcaccacgggccccaaccccttcaccacactcacagaccgtgagctggaggagtaccgcagggaggtggagaggaagcagaagggctctgaagagaatctggacgaggctagagaacagaaagaaaagagtcctccagaccagcctgcggtcccccacccgcctcccagcactcccatcaagctggaggaagaccttgtgccggagccgactactggagatgacagtgatgctgccacctttaagccaactctccccgatctgtcccctgatgaaccttcagaagcactcggcttcccaatgttagagaaggaggaggaagcccatagacccccaagccccactgaggcccctactgaggccagccccgagccagccccagacccagccccggtggctgaagaggctgccccctcagctgtcgaggagggggccgccgcggaccctggcagcgatgggtctccaggcaagtccccgtccaaaaagaagaagaagttccgtaccccgtcctttctgaagaagagcaagaagaagagtgactcctgaaagccctgcgctaacactgtcctgtccggagcgaccctggctctgccagcgtccccggccacgtctgtgctctgtccttgtgtaatggaatgcaaaaaagccaagccctccgcctagaggtcccctcacgtgaccagccccgtgtagccccgggctgacccagtgtgtgctcagcagccccaccccaccctgccccttgtcctctcagagcctcagcttctgggggagacatgctctccccacaggggggaggcactaagtcatggtcctggctggaaggtactgaaggcttctgcagctttggctgcacgtcaccctcctgagcctcacctttcctgccgtccctcctgttgtgaaatcaccacattctgtctctgcttggcttcccctccaccctaaagtctcaggtgacggactcagactcctggcttcatgtggcattctctctgctcagtgatctcacttaaatctatatacaaagccttggtcccgtgaaaacactcgtgtgcccaccagcggccttgaagaggcaggtctgggccagatgctgggcaggaaaccccagcggcagatgggcctgtgtgcacccaacgtgatgctatgcatgtctgaccgacgatccctcgaccagaatcagattcaggagctcagtttctttttcacttgggtctctggattcctgtcatagggaaggtatatcaggaggggaagaggcctttctagaattttctttgagcaggtttacaatttagcttacatttttcgactgtgaacgtgaataggctgctttttgctttcttctttccagaccccacagtagagcacttttcacttatttgggggaggcttcagggactgttctcaccttaactcagccagaaagatgccctagttgtgatcaaaggtaactcgaggtggagggtagccctggggcccctcgacatcaccgtcattgatggagcctgaaccgtgtgctcctcggcagatgctgttgttgttacttccctccagaggctggaaaagggctc

SEQ ID NO: 183599 - DNA, 1924 bp, Homo Sapiens
ttctgtctatagaggactgatacaaggaggttcattgaaaacaccagaagaatgatcttgaacatagtccagaggctttttaggaggccgggtgggagacagagccggggcgcgcgagcttggtgtgggggcgccactccggggcggaggggaggggctaccagtgacttctccgagtcgggagctagaaagaggcttccggccaggttcccttggaacaggtgtcggagttgttgggagaggggctggtctttcatgctgaagaattgatgacttgccaggttcatattcaaaaatactccttggctcagaccgaaattttcttgtgtccacttttctgtctggaggatcccagtcatgcttttctgttgaagaccgatctcttggtcgaagcggcgggactggaggtggaacatgtgggggaggcactggggaggacgcatccttaaaggcattggggctgttgtcggagtggcttttggaaagaggtctgtaggtttgggtctttgcagcagggtgtgactgagcactgtagggtgggttgtacagacctgcattgtatgtataaggagtattatacatgtctgtgtcatcatccggcttgtgcaccatgtgaatttgcttaaacatcgtcttgtaccagtccttgggccggtcgactgtcgttctaattgctgtggggattccggattcatccacgggcccgatccctgggtaatgcggggctttgatgactgtcactctcttctcttcctctgaggatcggtacagggggatagagctgctggtggtgccatccagagactgcgcatgctggggatatgtgtctgtggaatcgagggatgtgccgtgctgcatgacaatgctggagttgagtgaggctgggagagaatatgccgagggggaaaacggcctctgatagtaactcatgggactcacggcacctcctgagtttccattcactgttatctggctctgagttggtgatcttttatcttgtaggtttggtcgaacgcttctaaaaccttttgctgcaagagaggaatatgtagcatctccgttcagtgtctcctgattgccatcattgtaagatctccaagctgagtctggtgactgagaatcacgccctgcagccaataggtttggagaactttgcactctcttcacagatgttagcgtaacagacatggcggcacgtttgcgagcacacccaccgctatctgtgttcattttcaccttggagagtttgttattaaagtcttcagttttcctacaggcagctgagttcaacagttgctctatacagaggaagtaggagtcagtggccttttacatgtagagattgtttatttagccctttttaaaaggtcttgaactccagaggtttaagattaagtccaatccaagtgtctctgtcagtgtactgggacgctcaggaagccccttctccgcctcggcctcagcgtgcagacatatgccctgggagcccacaatctgttaacaggaagcaggtaaacccgagagcgtccgcctgcgttccagtccagtgcccgtcccagcacacacctgctttttcagacctgccgctcatatgccacagccacgcacaggaccagcgttagcagagtgcaacaccctccgtttggatccctcgttttcagggtaagcagctagggagctgctgagataatattgcagggaaagcttgccttcccaagacaaaaacctttgctgctgcctgatagcagatatgcagcattatcactctgcattccacattctccaatcagctaattggaacggcagtcaacagcctgtccaaaaggcagcttgcaggcctgcgtggctgtgatcattgtatactaacatgcccattgcttctctcttccctgaagaggatgtataaaagagccaacttttttgt

SEQ ID NO: 183600 - DNA, 1041 bp, Homo Sapiens
gacagaaatctagccgaaactgccagcaccgttcaccccatttcccctaccccgtgccccacccccccgacatccctctccttttgctccctccattgggtctcactctcccaagtccccggtaccatggccaccacctttggtggcccaaggagacttcaatgggtgggctgggtgggggagcgagagggcaggccactggtgagacaggcttgaggggtgctggcaccagggaagcgtggacccagcctaagcgagccccagctcctgcccctcactgagatggtgagcaggccgggacagcgtggccagccaggccctgtggcctctcgtgaagcccctcattcctcgtttgtgtgccttctctgctcctttctctggctgccctacccttcccctccacgctgcctgggcagcaaggacagggaccaacaggagcaagtgtgccttcctcagggcccttcctgagagctccacagcccaccctgtggccccctgcttggcttggcctggcctgcccggccccagccttccaatgctgctgcacgtcctcattttcctttttggtcccctcctgccccctctggctgttctgcctttgggcctcagccccagctgcctgagtttgggcaaggttctttctctgtggccttcaggctcacccccagggctctgacccgggcctctcccaccggccccaccctacctgacagctgcacccctggtttcagctcttctaactgtgaaagccccatccaaggctaacattcgagaggcacagggctgccaagggtttcttctgcccacttagtccccagtggctcaggctccttccttggaagttccctggggtaggtgaggcagaggcagatctccgaggaacttgactgactgagcaacgaagaccctctctgagttttcctcccaaggtcttagggtggcttggcagtccccaccccctcacactgtctcagggtctctaccctcaacaagattagattccttttagccagaaagagtccaacttttttgtacaaagtt

SEQ ID NO: 183601 - DNA, 3125 bp, Homo Sapiens
ttggcgactaagcagaagaaagatcaaaaaccggaaaagaggagaagagcaaacaggcactttgaggaacaatcccctttaactccaagccgacagcggtctaggaattcaagttcagtgcctaccgaagacaaaggcgccccgagggagtggcggtgcgaccccagggcgtgggcccggccgcggagcccacactgcccggctgacccggtggtctcggaccatgtctcccgccccaagacccccccgttgtctcctgctccccctgctcacgctcggcaccgcgctcgcctccctcggctcggcccaaagcagcagcttcagccccgaagcctggctacagcaatatggctacctgcctcccggggacctacgtacccacacacagcgctcaccccagtcactctcagcggccatcgctgccatgcagaagttttacggcttgcaagtaacaggcaaagctgatgcagacaccatgaaggccatgaggcgcccccgatgtggtgttccagacaagtttggggctgagatcaaggccaatgttcgaaggaagcgctacgccatccagggtctcaaatggcaacataatgaaatcactttctgcatccagaattacacccccaaggtgggcgagtatgccacatacgaggccattcgcaaggcgttccgcgtgtgggagagtgccacaccactgcgcttccgcgaggtgccctatgcctacatccgtgagggccatgagaagcaggccgacatcatgatcttctttgccgagggcttccatggcgacagcacgcccttcgatggtgagggcggcttcctggcccatgcctacttcccaggccccaacattggaggagacacccactttgactctgccgagccttggactgtcaggaatgaggatctgaatggaaatgacatcttcctggtggctgtgcacgagctgggccatgccctggggctcgagcattccagtgacccctcggccatcatggcacccttttaccagtggatggacacggagaattttgtgctgcccgatgatgaccgccggggcatccagcaactttatgggggtgagtcagggttccccaccaagatgccccctcaacccaggactacctcccggccttctgttcctgataaacccaaaaaccccacctatgggcccaacatctgtgacgggaactttgacaccgtggccatgctccgaggggagatgtttgtcttcaaggagcgctggttctggcgggtgaggaataaccaagtgatggatggatacccaatgcccattggccagttctggcggggcctgcctgcgtccatcaacactgcctacgagaggaaggatggcaaattcgtcttcttcaaaggagacaagcattgggtgtttgatgaggcgtccctggaacctggctaccccaagcacattaaggagctgggccgagggctgcctaccgacaagattgatgctgctctcttctggatgcccaatggaaagacctacttcttccgtggaaacaagtactaccgtttcaacgaagagctcagggcagtggatagcgagtaccccaagaacatcaaagtctgggaagggatccctgagtctcccagagggtcattcatgggcagcgatgaagtcttcacttacttctacaaggggaacaaatactggaaattcaacaaccagaagctgaaggtagaaccgggctaccccaagtcagccctgagggactggatgggctgcccatcgggaggccggccggatgaggggactgaggaggagacggaggtgatcatcattgaggtggacgaggagggcggcggggcggtgagcgcggctgccgtggtgctgcccgtgctgctgctgctcctggtgctggcggtgggccttgcagtcttcttcttcagacgccatgggacccccaggcgactgctctactgccagcgttccctgctggacaaggtctgacgcccaccgccggcccgcccactcctaccacaaggactttgcctctgaaggccagtggcagcaggtggtggtgggtgggctgttcccatcgtcccgagccccctccccgcagcctccttgcttctctctgtcccctggctggcctccttcaccctgaccgcctccctccctcctgccccggcattgcatcttccctagataggtcccctgagggctgagtgggagggcggccctttccagcctctgcccctcaggggaaccctgtagctttgtgtctgtccagccccatctgaatgtgttgggggctctgcacttgaaggcaggaccctcagacctcgctggtaaaggtcaaatggggtcatctgctccttttccatcccctgacataccttaacctctgaactctgacctcaggaggctctgggcactccagccctgaaagccccaggtgtacccaattggcagcctctcactactctttctggctaaaaggaatctaatcttgttgagggtagagaccctgagacagtgtgagggggtggggactgccaagccaccctaagaccttgggaggaaaactcagagagggtcttcgttgctcagtcagtcaagttcctcggagatctgcctctgcctcacctaccccagggaacttccaaggaaggagcctgagccactggggactaagtgggcagaagaaacccttggcagccctgtgcctctcgaatgttagccttggatggggctttcacagttagaagagctgaaaccaggggtgcagctgtcaggtagggtggggccggtgggagaggcccgggtcagagccctgggggtgagcctgaaggccacagagaaagaaccttgcccaaactcaggcagctggggctgaggcccaaaggcagaacagccagagggggcaggaggggaccaaaaaggaaaatgaggacgtgcagcagcattggaaggctggggccgggcaggccaggccaagccaagcaagggccacagggtgggctgtggagctctcagaaagggcctgaggaaagcacacttgctcctgttggtcctgtccttgctgcccaggcagcgtggaggggaagggtagggcagccaggaaaggagcagagaaggcacacaaacgaaggatgagggg

SEQ ID NO: 183602 - DNA, 1887 bp, Homo Sapiens
ttggctgctgtttcgtagccgactgctgaaggctggtttgcgtcgacatggcggttaccctgagtctcttgctgggcgggcgcgtttgcgccgccgtcactcgctgtgggttcgcgacccggggggtggcgggcccaggccctattggccgggagccggaccccgattccgactgggagccggaggaacgggagctgcaggaggtggagaggtaccggcttctccccgggccctcagcttgaagcagggcctcgtgccccggcgctccaggccgcgcccccttggcgccgggtgtcctgccgctgcttgcgcagcggcccttgtttcttcttacccgttgttaggggcgcagcgtcaggtgttcagctcccctgggaccactggtcccttcattagtgacgtatttcatcatcagtttagagagttcggcatgcttacaggcagttattgttctaggtgttagctttctgggtgtacggagcagctctaagccggcaacatggcccggttgcccttgcgatcaaagagaagagggctgggcgctccatgatttagcctgaggctcttcaaacatccattctgcttccacgcatggcttctgccattggttctcttcccccagcaccctgaaacgacagaaacaagcaatccgattccagaaaattcggaggcaaatggaggcgcctggtgccccgcccaggaccctgacgtgggaagccatggagcagatacggtatttacatgaggaatttccagagtcctggtcagttcccaggttggctgaaggctttgatgtcagcactgatgtgatccgaagagttttaaaaagcaagtttttacccacattggagcagaagctgaagcaggatcaaaaagtccttaagaaagctgggcttgcccactcgctgcagcacctccggggctctggaaatacctcaaagctgctccctgcaggccactctgtatcaggctctttgcttatgccagggcatgaagcctcatctaaagacccaaatcacagcacagctttgaaagtgatagagtcagacactcacaggacaaatacaccaaggagaaggaagggaagaaataaagaaatccaggacctggaggagagctttgtgcctgttgctgcacccctaggtcatccaagagagctgcagaagtactccagtgattctgagagccccagaggaactggcagtggtgcgttgccaagtggtcagaagctggaggagttgaaggcagaggagccagataacttcagcagcaaagtagtgcagaggggccgagagttctttgacagcaacgggaacttcctgtacagaatttgagtcggggcttggcttatggagatgcctcgtgaaacacagctgggcaagtattaatgtatatggaacagcctggatttctgcatatggataagccaccttggaataggaagaggtgttgagcctggactgtgggaggaaagagctgcgtggatagattcaaacttcctgtggtagtgctcccagtctgacctctgtagaccttcagtactcactcttcttgcttaggctctctgtgtgttgaaagccatcccgtgttgcatgtgttgttacaattttctgtgatacttgcaatttatgtttgagaagaagtgaaaagtttgccttctgacctcatttccttcttgatcagtgaacactaacattttggggacaacttagtcaattggttttccttacaacaaaataaagtaaaatgtagcagtctgcctctttggtgctctttggggtgggatggtttacctgtgaaccttggagagagggaaggacaaaggcagaaaggaaggatctctggtcagtaaacattgggagagagatggaaccagaggaatttccc

SEQ ID NO: 183603 - DNA, 1482 bp, Homo Sapiens
ttggcttaaaattttaataaattttagaatagcattgataggatggcctcttttggctaaacaaaatggcacatttgttcttttggggctatttggttaaacattcgtctgaaaattgaagaagtaccgactggtcaaaaagaatctgtaatctgaagcctcttaatcttggagtgactttggagattttaatggcagtaggtaattcctttactgttactgttggcagaatctaaagttgaaggtcccttccacaaccaggaaaaactacacattttacattttttaggtggtggcggcagtcggatagacaataccacaacaacacattttgcagagctttggggccatttggatcacacgatgttttttcaagattttagaccctttctaagtagcagtccactggaccaagataatagagccaatgaaaggggtcaccagactcacactgacttctggggagcaagacctccacggttgccattgggtcggagatacagatctcgaggaagttctcgtcctgacagatctccagctattgaaggaatactacaacacatctttgcaggattctttgcaaattctgccattcctggatctccacaccctttttcctggagcgggatgctgcactccaaccctggggactatgcctggggtcagacagggcttgatgccattgtaacccagcttttatgacaactggaaaacacaggccctcccccagctgacaaggaaaagatcacatctcttccaacagtgacagtaactcaggaacaagttgatatgggtttagagtgtccagtatgcaaagaagattacacagttgaagaggaagtccggcagttaccttgcaatcacttctttcacagcagttgtattgtgccgtggctagaactgcatgacacatgtcctgtatgtaggaagagcttaaatggtgaggactctactcggcaaagccagagcactgaggcctctgcaagcaacagatttagcaatgacagtcagctacatgaccgatggactttctgaagctaaagaccacacctgaatcagggctgtggtaatcatcttaccatagctgtaaattgtatcaaaacaaaaaattagtagatggatttaggaatatgtaagaaactcaacacataatataaatgcaatgaatgtttttcttctttaaatttaaagttagtatctacagatggaattgtatctacaaccaaatgcctcttatccctgaattcagagtgataattttataagtgtgaaacttaattatgtagggctccccccgtctgaatagaattaattccttaaagtctagttagggtcctgctgtctgtcatgttgccttgtaacggatgtttccacctccttctccaacctctaccccaccattagtgtattttactataaaaacagtggaaccacagccctaaagtcctgctgatataaagtccttttgtcttaattgtattt

SEQ ID NO: 183604 - DNA, 1379 bp, Homo Sapiens
  misc_feature (79)..(94): n is a, c, g, or t
tctggcacttggtgttagtttgctgttgtttccacataggcaaacactacatattttggaaggccacatagtaaaacannnnnnnnnnnnnnnnaaaaatcagtcgggcaaaagtttttcccctacattctactgtctgatgagattggagagcagcaagaacttgctgtcagcagtcattttacaaaaacagctcaggaggtgggtggcacctacatcatgttgtggtgattgttcctgtcaataatgtccacaggtgaaaggatttccttccggatagcaggggcaggcagggagagcgtcgtcttagtcttgaagaggtcagacacgaagaaaactatgcagcaggccaccagggctccttgagcaaatcctgccagaacatcactgggatggtgcttgtggtctgatacgcgagacagtcccgtgtagaaggccatcatgatcaaggtgaactgcaggaggggccggagcaggcgggctcctcgccaagtgaagcgggcctgcaggtatagcaccaaatacagcatagtgtacatggagaaggaggcatggccagagaagaaggacttcctggcttcctggactttgctgtcatcacctctgcatctgtagttctgaatgtagccttcagagcagttgatctggctgaaatcagggttgcagacactcaagaagtgaggacgcaggcgccctatggacactttggcaatgtctgtgaaagactggctgatggcacagccaaagaggaagcagcccacttgcttatagagtgctgccacgtaggggttctgaatcgtcgaccgcgacttcttcaggtaatagatccggtagaattcccccgtgatgatcgcgaggatggcaatgacgatccccacggcacagagcacagcgtcatttattgtctcaccagttttcagtgggtacttgatgctctcatcattgcagtaaaaccctcggtggtaaggcttgatggtgcttgtctcgatgatgaggaaggggaggcccgccatgaagaggcagaagaggtcgaggcagatgagcagcacccgcttgctgccgctcctcctcgggttgttgttgagcgccgggctgccgccgttcttgctctccgggacgatcgctttgtcgtacttgtagttttgcatggcgctggctgcggcgcgagcctcccgccccgcgaagacgtcccgcaacagcagccacacacccaggcggctagagtgcagccggggctgcctgcctccaactgcagaaggtggtgttttctgctcctcctgcgcgcctctgctttcctctgtcaaccctaaatcgttctaaagtccaaggggaagagagccagatcccgagcagaaacttttgcagagctgcgcagccaa

SEQ ID NO: 183605 - DNA, 1921 bp, Homo Sapiens
  misc_feature (249)..(265): n is a, c, g, or t
ttggagttttcttcgtgtctgacctcttcaagactaagacgacgctctccctgcctgcccctgctatccggaaggaaatcctttcacctgtggacattattgacaggaacaatcaccacaacatgatgtaggtgccacccacctcctgagctgtttttgtaaaatgactgctgacagcaagttcttgctgctctccaatctcatcagacagtagaatgtagggaaaaacttttgcccgactgatttttnnnnnnnnnnnnnnnnntgttttactatgtggccttccaaaataggtagtgtttgcctatgtggaaacaacagcaaactaacaccaagtgccagagtcctggatgtgcaattggtttaagtgttcatgttctagtgaacacagcttgttcgggaacaaacactaaaacgatttgagtagaggctgctggtcaccttttgtgacctgaggaatcccaggcctgtgagaaaagcaaaaattcacattgcagcacatgatgccagaaatagcactgaatcaagaaaatagccattgcggagctgccctcttgagtctttctgtccatcccattctattctgtactgtgactttagttcaggaagttttgttttgtgttttaaataaaaggaaagagcaagtttgctcagtcaagtgatcagatcccgaatctagattcccagttctaaggccttatcacctcccctgcccataggccaacaaccatagttcctcacattagtgattagcagactctttgtggacgagtgaatttcacaaacagcacaatttcagaagaaatcgagggcacaggccctcacttttcttcttttgacgcatcatcctgtgatgttgaaatgtcaattgcaggatgctgatgttgtgcacgtcaatcaccgggcacttgcatactcttagaaacagttcgacttcggttactgccttctcccttgaaatccttgctgcgtgcccaccaggatttcctgtgagggcccgggaatgagcaaggcatggtctgccaccagctgacggaaagcagccttctgtacaacagatgggagggtgaagggggcagaatgaaaatcgaaccaaccttttagctgttgcaaatcagaaggagccagagaagcaggcagtctcatgcatgagaggttacccttcaggatgacagagctgagggtctttgtaggagttgctcttgctgtgtaaagcactattgtcttggggttgagccctagggcagttcttggtaggttctgctgggcagaacatatgggttaaatctcggtagagagttttcctcatcctctatccgtaagtgtccttccatgcaaggtcccactctaggtgatagacagggaccccttctactgaacctttgaggaaaggaggaaggaagaaatgcgtttagatcttggatgcagacctttcaaagggttaaatgtaaccatatggatcaaccacatgcacatccttactacagaatccgtcctttcatttcaacttatagcaagctatgatttttatatataaatattatataaataatgtataaaacattaaaagttaactatgtaagatattatttctgaaacaatttagctatatccactatgattataaactgtgtctcgacctgtgttatttacattagctgcttaaaaaagcattgagttaatttttttaaatatcaactaaaatatcatagttctgtggtaaacattgttttataatgaaataactgcaactagagaaaactgtataaaaacattaaattgtcagtatttttgtaaggttccattttgtaaagagaataatattcaaagacttttgtagcatacaaagtgaaaacttgtatctgcgaaactatacttgtattaaatgtgctttttaaataaaagctcgtaacacaactaa

SEQ ID NO: 183606 - DNA, 1176 bp, Homo Sapiens
  misc_feature (1037)..(1078): n is a, c, g, or t
agaaggacttccttgccttcctggactttgctgtcatcacctctgcatctgtagttctgaatgtagccttcagagcagttgatctggctgaaatcagggttgcagacactcaagaagtgaggacgcaggcgccctatggacactttggcaatgtctgtgaaagactggctgatggcacagccaaagaggaagcagcccacttgcttatagagtgctgccacgtaggggttctgaatcgtcgaccgcgacttcttcaggtaatagatccggtagaattcccccgtgatgatcgcgaggatggcaatgacgatccccacggcacagagcacagcgtcatttattgtctcaccagttttcagtgggtacttgatgctctcatcattgcagtaaaaccctcggtggtaaggcttgatggtgcttgtctcgatgatgaggaaggggaggcccgccatgaagaggcagaagaggtcgaggcagatgagcagcacccgcttgctgccgctcctcctcgggttgttgttgagcgccgggctgccgccgttcttgctctccgggacgatcgctttgtcgtacttgtagttttgcatggcgctggctgcggcgcgagcctcccgccccgcgaagacgtcccgcaacagcagccacacacccaggcgcccgggtcgcctcctggccgaggctgctgcggatagtggcgggtcggccccggctccgggcgcggcggctagagtgcagccggggctgcctgcctccaactgcagaaggtggtgttttctgctcctcctgcgcgcctctgctttcctctgtcaaccctaaatcgttctaaagtccaaggggaagagagccagatcccgagcagaaacttttgcagagctgcgcagcttggggcgcgctgttgtggcgcgcgtctgagtgcgcgagcgagcgagtgggcagcgcgggcgctcggccaccttcctccgcagctggttccttaatgaatgggagctgcgctgagcccagcaactccggagcgccagccccaactctaactttgnnnnnnnnnnnnnnnnnnnnnnnnnnnnnnnnnnnnnnnnnngctgttggtgctgctgccgcggcggctgctgctgtgatcgcctgggtttgttttctgcacttttatttcacgaggtcctttaaaaagagaagacccaa

SEQ ID NO: 183607 - DNA, 1919 bp, Homo Sapiens
  misc_feature (128)..(138): n is a, c, g, or t
ttggcgtaaatatgtaaagattcttcaaggtaacaagggtttgggttttgaaataaacatctggatccttatagaccgttcatacaatggttttagcaagttcatagtaagacaaacaagtcctatcnnnnnnnnnnnggctggggtgggggcattggtcacatatgaccagtaattgaaagacgtcatcactgaaagacagaatgccatctgggcatacaaataagaagtttgtcacagcactcaggattttgggtatcttttgtagctcacataaagaacttcagtgcttttcagagctggatatatcttaattactaatgccacacagaaattatacaatcaaactagatctgaagcataatttaagaaaaacatcaacattttttgtgctttaaactgtagtagttggtctagaaacaaaatactccaagaaaaagaaaattttcaaataaaacccaaaataatagctttgcttagccctgttagggatccattggagcattaaggagcacatatttttattaacttcttttgagctttcaatgttgatgtaatttttgttctctgtgtaatttaggtaaactgcagtgtttaacataataatgttttaaagacttagttgtcagtattaaataatcctggcattatagggaaaaaacctcctagaagttagattatttgctactgtgagaatattgtcaccactggaagttactttagttcatttaattttaattttatattttgtgaatattttaagaactgtagagctgctttcaatatctagaaatttttaattgagtgtaaacacacctaactttaagaaaaagaaccgcttgtatgattttcaaaagaacatttagaattctatagagtcaaaactatagcgtaatgctgtgtttattaagccagggattgtgggacttcccccaggcaactaaacctgcaggatgaaaatgctatattttctttcatgcactgtcgatattactcagatttggggaaatgacatttttatactaaaacaaacaccaaaatattttagaataaattcttagaaagttttgagaggaatttttagagaggacatttcctccttcctgatttggatattccctcaaatccctcctcttactccatgctgaaggagaagtactctcagatgcattatgttaatggagagaaaaagcacagtattgtagagacaccaatattagctaatgtattttggagtgttttccattttacagtttatattccagcactcaaaactcagggtcaagttttaacaaaagaggtatgtagtcacagtaaatactaagatggcatttctatctcagagggccaaagtgaatcacaccagtttctgaaggtcctaaaaatagctcagatgtcctaatgaacatgcacctacatttaataggagtacaataaaactgttgtcagcttttgttttacagagaacgctagatattaagaattttgaaatggatcatttctacttgctgtgcattttaaccaataatctgatgaatatagaaaaaaatgatccaaaatatggatatgattggatgtatgtaacacatacatggagtatggaggaaattttctgaaaaatacatttagattagtttagtttgaaggagaggtgggctgatggctgagttgtatgttactaacttggccctgactggttgtgcaaccattgcttcatttctttgcaaaatgtagttaagatatactttattctaatgaaggccttttaaatttgtccactgcattcttggtatttcactacttcaagtcagtcagaacttcgtagaccgacttgaagtttctttttgaatacttgtttctttagcactttgagatagaaaaaccactttttaagtactaagtcatcatttgccttgaaa

SEQ ID NO: 183608 - DNA, 1415 bp, Homo Sapiens
  misc_feature (123)..(218): n is a, c, g, or t
  misc_feature (1268)..(1278): n is a, c, g, or t
ttggcagggaggcagcggcgctcgccttcatccaggacaacaaaactgccatttccgaagagaaaggaaacggctcgcggtttctggggttcccaagcgcgcgcctgcgagggaggccgcgannnnnnnnnnnnnnnnnnnnnnnnnnnnnnnnnnnnnnnnnnnnnnnnnnnnnnnnnnnnnnnnnnnnnnnnnnnnnnnnnnnnnnnnnnnnnnnngctcctgcgccctatttggtcattcggggggcaagcggcgggaggggaaacgtgcgcggccgaaggggaagcggagccggcgccggctgcgcagaggagccgctctcgccgccgccacctcggctgggagcccacgaggctgccgcatcctgccctcggaacaatgggactcggcgcgcgaggtgcttgggccgcgctgctcctggggacgctgcaggtgctagcgctgctgggggccgcccatgaaagcgcagccatggcggcatctgcaaacatagagaattctgggcttccacacaactccagtgctaactcaacagagactctccaacatgtgccttctgaccatacaaatgaaacttccaacagtactgtgaaaccaccaacttcagttgcctcagactccagtaatacaacggtcaccaccatgaaacctacagcggcatctaatacaacaacaccagggatggtctcaacaaatatgacttctaccaccttaaagtctacacccaaaacaacaagtgtttcacagaacacatctcagatatcaacatccacaatgaccgtaacccacaatagttcagtgacatctgctgcttcatcagtaacaatcacaacaactatgcattctgaagcaaagaaaggatcaaaatttgatactgggagctttgttggtggtattgtattaacgctgggagttttatctattctttacattggatgcaaaatgtattactcaagaagaggcattcggtatcgaaccatagatgaacatgatgccatcatttaaggaaatccatggaccaaggatggaatacagattgatgctgccctatcaattaattttggtttattaatagtttaaaacaatattctctttttgaaaatagtataaacaggccatgcatataatgtacagtgtattacgtaaatatgtaaagattcttcaaggtaacaagggtttgggttttgaaataaacatctggatccttatagaccgttcatacaatggttttagcaagttcatagtaagacaaacaagtcctatcnnnnnnnnnnnggctggggtgggggcattggtcacatatgaccagtaattgaaagacgtcatcactgaaagacagaatgccatctgggcatacaaataagaaagtttgtcacagcactcagattttgggtatcttttgtagctcacat

SEQ ID NO: 183609 - DNA, 1053 bp, Homo Sapiens
  misc_feature (879)..(888): n is a, c, g, or t
gccaactttgtacaaaaaagttggcgctgctcctggggacgctgcaggtgctagcgctgctgggggccgcccatgaaagcgcagccatggcggcatctgcaaacatagagaattctgggcttccacacaactccagtgctaactcaacagagactctccaacatgtgccttctgaccatacaaatgaaacttccaacagtactgtgaaaccaccaacttcagttgcctcagactccagtaatacaacggtcaccaccatgaaacctacagcggcatctaatacaacaacaccagggatggtctcaacaaatatgacttctaccaccttaaagtctacacccaaaacaacaagtgtttcacagaacacatctcagatatcaacatccacaatgaccgtaacccacaatagttcagtgacatctgctgcttcatcagtaacaatcacaacaactatgcattctgaagcaaagaaaggatcaaaatttgatactgggagctttgttggtggtattgtattaacgctgggagttttatctattctttacattggatgcaaaatgtattactcaagaagaggcattcggtatcgaaccatagatgaacatgatgccatcatttaaggaaatccatggaccaaggatggaatacagattgatgctgccctatcaattaattttggtttattaatagtttaaaacaatattctctttttgaaaatagtataaacaggccatgcatataatgtacagtgtattacgtaaatatgtaaagattcttcaaggtaacaagggtttgggttttgaaataaacatctggatcttatagaccgttcatacaatggttttagcaagttcatagtaagacaaacaagtcctatcnnnnnnnnnnggctggggtgggggcattggtcacatatgaccagtaattgaaagacgtcatcactgaaagacagaaatgccatctgggcatacaaataagaagtttgtcacagcactcagattttgggtatcttttgtagctcacataaagaacttcagtgcttttcagagctgg

SEQ ID NO: 183610 - DNA, 1697 bp, Homo Sapiens
ttggcactgagatccgaggcctgctggcccaaggtctgcggcctgagagccccccaccagccggccccctgctcaacggggcccccgctggggagagtccccagcctaaggccgcccccgaggcctcctcgccgcctgcctcacccctccagcatctcctgcctggaaaggctgtggaccttgggccccccaagcccagcgaccaggagactggagagcaggtgtccagccccagcagccaccccgccctccacaccaccaccgaggacagtgcaggggtgcagactgagttctaggccagtgggtccctgactgctgcacatggcacaggccgttcccttccggacccaggcaggctcagctctggggagggcaccctggtctgtgccttgtgggtggaggcggggcagggctgtgtggcaccgccagggagcgggcccacctgagtcactttattgggttcagtcaacactttcttgctccctgttttctcttctgtgggatgatctcagatgcaggggctggttttggggttttcctgcttgtgccaagggctggacactgctggggggctggaaagcccctcccttcctgtccttctgtggcctccatcccctcatgggtgctgccatccttcctggagagagggaggtgaaagctggtgtgagcccagtgggttcccgcccactcacccaggagctggctgggccaggaccgggagagggagcactgctgccctcctggccctgctccttccgcagttaggggtggaccgagcctcgctttccccactgttctggagggaaggggaaggagggggtcttcaggctggagccaggctgggggtgctgggtggagagatgagatttagggggtgcctcatggggtgggcaggcctggggtgaaatgagaaaggcccagaacgtgcaggtctgcggaggggaagtgtcctgagtgaaggaggggacccccatcctgggggatgctgggagtgagtgagtgagatggctgagtgagggttatggggagcctgaggttttatgggcctgtgtatccccttctcccggccccagcctgcctccctcctgcccgcctggcccacaggtctccctctggtccctgtccctctggtggttggggatggagcggcagcaaggggtgtaatggggctgggttctgtcttctacaggccaccccgaggtcctcagtggttgcctggggagccggacggggctcctgaggggtacaggttgggtgggccctccctgagggtctggggtcaggctttggcctctgctgcctctcagtcaccaagtcacctccctctgaaaatccagtcccttctttggatgtccttgtgagtcactctgggcctggctgtcgtccctcctcagcttcttgttcctgggacaagggtcaagccaggattgtctttttttctgggatcccccaccccaggacccccaggccctctctcctgctgctttgcggggggcagggcagaaatggactccttttgggtccccgaggtggggtcccctcccagccctgcatcctccgtgccctagacctgctccccagaggaggggccttgaccctcaggacgtgtggtggcgcctggcactcagggacccccagctgccccagccctggtctctggcgcatctcttccctcttgtcccgaacatctgcgcctc

SEQ ID NO: 183611 - DNA, 2115 bp, Homo Sapiens
ttggctgacgtggaggcgtccgaagggcagcagggtgtgtcggggctcggattaagacatcggagtcggagacctgagagatgttaaccaaattcgagaccaagagcgcgcgggtcaaagggctcagctttcaccccaaaagaccttggatcctgactagtttacataatggggtcatccagttatgggactatcggatgtgcactctcattgacaagtttgatgaacatgatggtccagtgcgaggcattgacttccataagcagcagccactgttcgtctctggaggagatgactataagattaaggtttggaattacaagcttcggcgctgtcttttcacattgcttgggcacttagattatattcgcaccacgttttttcatcatgaatatccctggattctgagtgcctccgatgatcagaccatccgagtgtggaattggcaatctagaacctgtgtttgtgtgttaacagggcacaaccattatgtgatgtgtgctcagttccaccccacagaagacttggtagtatcagccagcctggaccagactgtgcgcgtttgggatatttctggtctgaggaaaaaaaacctgtcccctggtgcggtggaatcggatgtgagaggaataactggggttgatctatttggaactacagatgcagtggtgaagcatgtactagagggtcacgatcgtggagtaaactgggctgccttccaccccactatgccccttattgtatctggggcagatgatcgtcaagtgaagatctggcgcatgaatgaatcaaaggcatgggaggttgatacctgccggggccattacaacaatgtatcttgtgccgtcttccaccctcgccaagagttgatcctcagcaattctgaggacaagagtattcgagtctgggatatgtctaagcggactggggttcagactttccgcagagaccatgatcgtttctgggtcctagctgctcaccctaaccttaacctctttgcagcaggccatgatggtggtatgattgtgtttaagctggaacgggaacggccagcctatgctgttcatggcaatatgctacactatgtcaaggaccgattcttacgacagctggatttcaacagctccaaagatgtagctgtgatgcagttgcggagtggttccaagtttccagtattcaatatgtcatacaatccagcagaaaatgcagtcctgctttgtacaagagctagcaatctagagaatagtacctatgacctgtacaccatccctaaagatgctgactcccagaatcctgatgcgcctgaagggaaacgatcctcaggcctgacagccgtttgggtcgctcgaaatcggtttgctgtcctagatcggatgcattcgcttctgatcaagaatctgaagaatgagatcaccaaaaaggtacaggtgcccaactgtgatgagatcttctatgctggcacaggcaatctcctgcttcgagatgcggactctatcacactctttgacgtacagcagaagcggactctggcatctgtgaagatttctaaagtgaaatacgttatctggtcagcagacatgtcacatgtagcactactagccaaacacgccattgtgatctgtaaccgcaaactggatgctttatgtaacattcatgagaacattcgtgtcaagagtggggcctgggatgagagtggggtatttatctataccacaagcaaccacatcaaatatgctgtcaccactggggaccacgggatcattcgaactctggatttacccatctatgtcacacgggtgaagggcaacaatgtatactgcctaaacagggagtgtcgtccccgggtactcaccattgatcccactgagttcaaattcaagctggccctgatcaacagaaaatatgatgaggtactgcacatggtgaggaatgccaaactagttggccagtctattattgcttatctccagaagaagggctatcctgaagtggcactgcattttgtcaaggatgagaaaactcgctttagtctggcactggagtgtggaaacatttgagattgctctggaagcagccaaagcactggatgacaagaactgctgggaaaagctggga

SEQ ID NO: 183612 - DNA, 2787 bp, Homo Sapiens
taatgccaactttgtacaaaaaagttggccatccctaaacgatgctgactcccagaatcctgatgcgcctgaagggaaacgatcctcaggcctgacagccgtttgggtcgctcgaaatcggtttgctgtcctagatcggatgcattcgcttctgatcaagaatctgaagaatgagatcaccaaaaaggtacaggtgcccaactgtgatgagatcttctatgctggcacaggcaatctcctgcttcgagatgcggactctatcacactctttgacgtacagcagaagcggactctggcatctgtgaagatttctaaagtgaaatacgttatctggtcagcagacatgtcacatgtagcactactagccaaacacgccattgtgatctgtaaccgcaaactggatgctttatgtaacattcatgagaacattcgtgtcaagagtggggcctgggatgagagtggggtatttatctataccacaagcaaccacatcaaatatgctgtcaccactggggaccacgggatcattcgaactctggatttacccatctatgtcacacgggtgaagggcaacaatgtatactgcctagacagggagtgtcgtccccgggtactcaccattgatcccactgagttcaaattcaagctggccctgatcaacagaaaatatgatgaggtactgcacatggtgaggaatgccaaactagttggccagtctattattgcttatctccagaagaagggctatcctgaagtggcactgcattttgtcaaggatgagaaaactcgctttagtctggcactggagtgtggaaacattgagattgctctggaagcagccaaagcactggatgacaagaactgctgggaaaagctgggagaagtggccctgctgcaggggaaccaccagattgtggaaatgtgctatcagcgtaccaaaaactttgacaaactttccttcctgtatcttatcactggcaacttagaaaaacttcgcaagatgatgaagattgctgagatcagaaaggacatgagtggccactatcagaatgccctatacctgggtgatgtgtcagagcgtgtgcggatcctgaagaactgtggacagaagtccctggcctatctcacagctgctacccatggcttagatgaagaagctgagagcctaaaggagacatttgacccagagaaggagacaatcccagacattgaccctaatgccaagctgctccagccacctgcacctatcatgccattggataccaattggcctttattgactgtatccaaaggattttttgaaggcaccattgccagcaaagggaagggaggagcactggctgctgacattgacattgacactgttggtacagagggctggggagaggatgcagagctgcagttggatgaagatgggtttgtggaggctacagaaggtttgggggatgatgctcttggcaagggacaggaagaaggaggtggctgggatgtagaagaagatctggagctccctcctgagctggatatatcccctggggcagctggtggggctgaagatggtttctttgtgcccccaaccaagggaacaagtccaactcagatctggtgtaataactctcagcttccagttgatcacatcctggcaggctctttcgaaacagccatgcggctccttcatgaccaagtaggggtaatccagtttggcccctacaagcaactgttcctacagacatacgcccgaggccgcacaacctatcaggctctgccctgcctaccctccatgtatggctatcctaatcgcaactggaaggatgcagggctgaagaatggtgtaccagctgtgggcctgaagcttaatgacctcatccaacggttgcagctgtgctaccagctcaccacagttggcaaatttgaggaggctgtggaaaaattccgttccatccttctcagtgtgccacttcttgttgtggacaataaacaagagattgcagaggcccagcagctcatcaccatttgccgtgagtacattgtgggtttgtccgtggagacagaaaggaagaagctgcccaaagagactctagaacagcagaagcgcatctgtgagatggcagcctatttcacccactcaaacctgcagcctgtgcacatgatcctggtgctgcgtacagccctcaatctgttcttcaagctcaagaacttcaagacagctgccacctttgctcggcgcctactagaactcgggcccaagcctgaggtggcccaacagacccgaaaaatcctgtctgcctgtgagaagaatcccacagatgcctaccagctcaattatgacatgcacaacccctttgacatttgtgctgcatcatatcggcccatctaccgtggaaagccagtagaaaagtgtccactcagtggggcctgctattcccctgagttcaaaggtcaaatctgcagggtcaccacagtgacagagattggcaaagatgtgattggtttaaggatcagtcctctgcagtttcgctaaggccccctttgtgtgcatgggtcagtcaccatatgttccccccagagaatgtgtctatatcctccttctaacagcaccttccccctgcagctactcttcagatctggctctctgtaccctaaaacctagtatctttttctcttctatggaaaatccgaaggtctaaacttgacttttttgaggtcttctcaacttgactacagttgtgctcataattgtccttgcctttccagcttaattattttaaggaacaaatgaaaactctg

SEQ ID NO: 183613 - DNA, 1686 bp, Homo Sapiens
tacgaatgtttaacaatcactcatcacagcgagtcaccttgggctgcctgccttttagggttaattgagataccattgttacttgcaccataagcaacagcttcatcagggttgatgctcttattcagttcttttccattgaagaagtcttggagaagcttctgaatcttggggatacgagtagaaccaccaaccaggacaatatcatgaatctgtgacttgtctagtttggcatctcgaagggctttctctactgggtccagggtgccacggaacaggtcagcattcagttcttcaaatcgggcacgggtaatggaggtatagaagtcgattccttcatagagagaatcgatctcaatactggcctgggtgctggaagagagggtacgcttagcacgttcacaagcagtacggaggcgtcttacagctctcttgttctcactgatgtccttcttatgcttgcgcttaaactcagcaataaaatggttgaccattcggttgtcaaaatcttctccacccaagtgggtgtctccagctgtagacttgacctcaaagattccatcctcaatagtgaggattgacacatcaaaagtgccacctcccaggtcaaagatgagcacgtttctttctgctccaacctgccgttaaaaacaatctcatttaaatttacgatggatcaaattaatcttaaaataatccgaacttgcatcacaaatggtacatacctttttgtctaagccgtaagcaatagcagcagcagttggctcattaataattctaagtacattgagaccagcaatagttccagcatctttggtagcctgacgctgagagtcattaaagtaagctggcactgtgaccacagcattggtaacagtctaggaataaggaaaagaccacagattggtaactattatacttacatatatgcaaactccagcaaatggattaatgctggtgaaagaacagctggagcaccccccccaccaaaatgtaaattactgtgtaattgtcaagattcactggtttctggtgttgacagacccatctacctagagagcctagggcactgttgggcacgtggtcttaaccctgagctgagccccatctgttcccctccctcgccaggtgccagtgcccccgggagtcatcgggcttttaactactccggaatgcaccccatactgaaaaaccaacctcaccttcccaaggtaggcttctgcaatttccttcatctttgtcagaaccatagaagacacctcctctggatagaagcttttggtctctcccttgtattctacttggaccttgggcctgccagcatcattcaccaccataaagggccaatgtttcatatcagactggacaacagcatcatcaaatctgcgtccaatcagacgtttggcatcaaaaactgtgttggtggggttcattgcaacttgattctttgcggcatcaccgatcaaccgttcagtgtccgtaaaggcgacatagcttggagtggttcggtttccctgatcattggcaattatctcgacttttccgtgctggaaaacacccacacaagagtaggtggtgccaagatcaataccaactgcaggtcccttggacatggttgctggggtgtaggcctggctccaataacgaaggaagccacaaaaaacccaagagctgcaggcgagccaa

SEQ ID NO: 183614 - DNA, 2152 bp, Homo Sapiens
ttggcgttattggagccaggcctacaccccagcaaccatgtccaagggacctgcagttggtattgatcttggcaccacctactcttgtgtgggtgttttccagcacggaaaagtcgagataattgccaatgatcagggaaaccgaaccactccaagctatgtcgcctttacggacactgaacggttgatcggtgatgccgcaaagaatcaagttgcaatgaaccccaccaacacagtttttgatgccaaacgtctgattggacgcagatttgatgatgctgttgtccagtctgatatgaaacattggccctttatggtggtgaatgatgctggcaggcccaaggtccaagtagaatacaagggagagaccaaaagcttctatccagaggaggtgtcttctatggttctgacaaagatgaaggaaattgcagaagcctaccttgggaagactgttaccaatgctgtggtcacagtgccagcttactttaatgactctcagcgtcaggctaccaaagatgctggaactattgctggtctcaatgtacttagaattattaatgagccaactgctgctgctattgcttacggcttagacaaaaaggtatgtaccatttgtgatgcaagttcggattattttaagattaatttgatccatcgtaaatttaaatgagattgtttttaacggcaggttggagcagaaagaaacgtgctcatctttgacctgggaggtggcacttttgatgtgtcaatcctcactattgaggatggaatctttgaggtcaagtctacagctggagacacccacttgggtggagaagattttgacaaccgaatggtcaaccattttattgctgagtttaagcgcaagcataagaaggacatcagtgagaacaagagagctgtaagacgcctccgtactgcttgtgaacgtgctaagcgtaccctctcttccagcacccaggccagtattgagatcgattctctctatgaaggaatcgacttctatacctccattacccgtgcccgatttgaagaactgaatgctgacctgttccgtggcaccctggacccagtagagaaagcccttcgagatgccaaactagacaagtcacagattcatgatattgtcctggttggtggttctactcgtatccccaagattcagaagcttctccaagacttcttcaatggaaaagaactgaataagagcatcaactctgatgaagctgttgcttatggtgctagctgtccaggcagccatcttgtctggagacaagtctgagaatgttcaagatttgctgctcttggatgtcactcctctttcccttggtattgaaactgctggtggagtcatgactgtcctcatcaagcgtaataccaccattcctaccaagcagacacagaccttcactacctattctgacaaccagcctggtgtgcttattcaggtatgtttctgtacttctcttgtttggcttactgataacagataaagggaagtcttgactgactcgctatgatgatggattccaaaaccattcgtagtttccaccagaaagtcttatgttggccagttccttccttggatgtctgagcgaccattcttccttagcaggaccctagcactgtcacagacctggagtccattgtagtaatttgttttatttcctaccaaggtttatgaaggcgagcgtgccatgacaaaggataacaacctgcttggcaagtttgaactcacaggcatacctcctgcaccccgaggtgttcctcagattgaagtcacttttgacattgatgccaatggtatcctcaatgtctctgctgtggacaagagtacgggaaaagagaacaagattactatcactaatgacaagggtaaggaggcactgtcatctggtcttgacagggataatggtatttcaattgagttactggtgcctaagggcgtctagctaagagaaactagagttacacatacacaggtaatttaaggcttttacttagagttaatttctttcctagccgtttgagcaaggaagacattgaacgtatggtctaggaagctgagaagtacaaagctgaagatgagaagcagagggacaaggtgtcatccaggaattcacttgagtcctatgccttcaacatgaaagca

SEQ ID NO: 183615 - DNA, 2045 bp, Homo Sapiens
ttggcacagtgctctggagccatgcattaacaaagtgacttcatctgatagctgtcggggaggagaacggggatgtcccgtagtggggtgatgtaaacagcctgaaaccacgccctcactccgatgcagatgctgcaggcggggctgggccaaccgagggcctgtgtaggaaaaggccttgcttaaggcagcttagagcagttgccctgtcttagaaaggagggaaagagcagccacaggaaagctgtgggcccaagggaggagtgcatgaacccaggaaagggctttggtacagcagcctgctgggagcagggatggagttaagcactggccaggctgtttaggaaatgaaatttatatagatctgcataaagagcaaccacgttctcatggctgctcgcggcttctgaagtggaaaccagaggagtttccccattgtctctgtctcgggaggcgagtgttccagtggccctggaggcctggggtgggaaactgtgtgtgccactgtggtctggagcctgcacaggcatctcgacagcatctaggagcgcaaggatggcaagggggtgtgaaagggagggagaccatgccccaagatcaagcctgtgggaaagttgtcctgcaagtgtgaggagtgtgagctccagtgtccccaggtcttctcggggcccctagcaggggtttcagtgttaggtggaggtgtgactcagtgactgatgtacttcattcgcataggttgtaaatgagggaacgatgacttccctgcaggagaggaaaagtcttttgggggttctggggcggctacttccctttgatggagtttcttcttctccagtagaagagccacgtgctggagccattgtccagccttgccctggaggagcagtgtctggctttgtccctagattggtccactgggaaaactggaagggccggggaccagcccttgaagatcatcagcagtgactccacagggcagctccacctcctgatggtgaatgagacgaggcccaggctgcagaaagtggcctcatggcaggcacatcaattcgaggcctggattgctgctttcaattactggcatccagaaattgtgtattcagggggcgacgatggccttctgaggggctgggacaccagggtacccggcaaatttctcttcaccagcaaaagacacaccatgggtgtgtgcagcatccagagcagccctcatcgggagcacatcctggccacgggaagctatgatgaacacatcctactgtgggacacacgaaacatgaagcagccgttggcagatacgcctgtgcagggtggggtatggagaatcaagtggcaccctttccaccaccacctgctcctggccgcctgcatgcacagtggctttaagatcctcaactgccaaaaggcaatggaggagaggcaggaggcgacggtcctgacatctcacacattgcccgactcgctggtgtatggagccgactggtcctggctgctcttccgttctctgcagcgggccccctcgtggtcctttcctagcaacctaggaaccaagacggcagacctgaagggtgcaagcgagttgccaacaccctgtcatgaatgcagagaggataacgatggggagggccatgccagaccccagagtggaatgaagccactcacagagggcatgaggaagaatggcacctggctgcaggctacagcagccaccacacgtgactgtggcgtgaacccagaagaagcagactcagccttcagcctcctggccacctgctccttctatgaccatgcgctccacctctgggagtgggaggggaactgagcttgaaatcatgaagccccttcccacaacgaaaccaggagggagactgcgagtgagtgcccggggactacctcatcagagatgcttactgcagctcctgcaggtgcctgtgcactgatggaatccacagtgtagtcagcaaagctgttgacttctcttaaatcaacttccctgctggagcccctgaaagtggactgggtgattctgtctggcacagagtggg

SEQ ID NO: 183616 - DNA, 2025 bp, Homo Sapiens
ttggttctctgtccgaagtcgggacaccctcctaccacctgtagagaagcgggagtggatctgaaataaaatccaggaatctgggggttcctagacggagccagacttcggaacgggtgtcctgctactcctgctggggctcctccaggacaagggcacacaactggttccgttaagcccctctctcgctcagacgccatggagctggatctgtctccacctcatcttagcagctctccggaagacctttgcccagcccctgggacccctcctgggactccccggccccctgatacccctctgcctgaggaggtaaagaggtcccagcctctcctcatcccaaccaccggcaggaaacttcgagaggaggagaggcgtgccacctccctcccctctatccccaaccccttccctgagctctgcagtcctccctcacagagcccaattctcgggggcccctccagtgcaagggggctgctcccccgcgatgccagccgcccccatgtgagttgtccctcagaagggaagggagggatgcacgggttctgggtctgtgggagatacacagccgcttccatggaggcaggggatcttggttaggagtccctgagggtctagcaggtgcggaaagggaatgaatcaccctttgcctcccctcaagtcgtgtgcaattcctggggcgcaggtagtaaaggtgtacagtgaggatggggcctgcaggtctgtggaggtggcagcaggtgccacagctcgccacgtgtgtgaaatgctggtgcagcgagctcacgccttgagcgacgagacctgggggctggtggagtgccacccccacctagcactggagcggggtttggaggaccacgagtccgtggtggaagtgcaggctgcctggcccgtgggcggagatagccgcttcgtcttccggaaaaacttcgccaagtacgaactgttcaagagctccccacactccctgttcccagaaaaaatggtctccagctgtctcgatgcacacactggtatatcccatgaagacctcatccagaacttcctgaatgctggcagctttcctgagatccagggctttctgcagctgcggggttcaggacggaagctttggaaacgctttttctgcttcttgcgccgatctggcctctattactccaccaagggcacctctaaggatccgaggcacctgcagtacgtggcagatgtgaacgagtccaacgtgtacgtggtgacgcagggccgcaagctctacgggatgcccactgacttcggtttctgtgtcaagcccaacaagcttcgaaatggccacaaggggcttcggatcttctgcagtgaagatgagcagagccgcacctgctggctggctgccttccgcctcttcaagtacggggtgcagctgtacaagaattaccagcaggcacagtctcgccatctgcatccatcttgtttgggctccccacccttgagaagtgcctcagataataccctggtggccatggacttctctggccatgctgggcgtgtcattgagaacccccgggaggctctgagtgtggccctggaggaggcccaggcctggaggaagaagacaaaccaccgcctcagcctgcccatgccagcctccggcacgagcctcagtgcagcctgttcctggtccgggagagtcagcggaacccccagggctttgtcctctctttgtgccacctgcagaaagtgaagcattatctcatcctgccgagcgaggaggagggccgcctgtacttcagcatggatgatggccagacccgcttcactgacctgctgcagctcgtggagttccaccagctgaaccgcgggcatcctgccgtgctttgctgcgccattgctgcacgcgggtggccctctgaccaggccgtggactggctcatgcctcagcccgccttcagctgcccgccgcccctccacccatccagtggactctggggcgcggccacaggggacgggatgaggagcgggagggttccgccactcagttttctc

SEQ ID NO: 183617 - DNA, 1564 bp, Homo Sapiens
tgaagtacaggcggccctcctcctcgctcggcaggatgagataatgcttcactttctgcaggtggcacaaagagaggacaaagccctgggggttccgctgactctcccggaccaggaacaggccgtctaccaagccttgctgtccaataagccgctggctctcctcacgggaaatgcgcccgtggaaccagagttgggtgcggtggatggctgcactgaggctcgtgccggaggctggcatgggcaggctgaggcggtggtttgtcttcttcctccaggcctgggcctcctccagggccacactcagagcctcccgggggttctcaatgacacgcccagcatggccagagaagtccatggccaccagggtattatctgaggcacttctcaagggtggggagcccaaacaagatggatgcagatggcgagactgtgcctgctggtaattcttgtacagctgcaccccgtacttgaagaggcggaaggcagccagccagcaggtgcggctctgctcatcttcactgcagaagatccgaagccccttgtggccatttcgaagcttgttgggcttgacacagaaaccgaagtcagtgggcatcccgtagagcttgcggccctgcgtcaccacgtacacgttggactcgttcacatctgccacgtactgcaggtgcctcggatccttagaggtgcccttggtggagtaatagaggccagatcggcgcaagaagcagaaaaagcgtttccaaagcttccgtcctgaaccccgcagctgcagaaagccctggatctcaggaaagctgccagcattcaggaagttctggatgaggtcttcatgggatataccagtgtgtgcatcgagacagctggagaccattttttctgggaacagggagtgtggggagctcttgaacagttcgtacttggcgaagtttttccggaagacgaagcggctatctccgcccacgggccaggcagcctgcacttccaccacggactcgtggtcctccaaaccccgctccagtgctaggtgggggtggcactccaccagcccccaggtctcgtcgctcaaggcgtgagctcgctgcaccagcatttcacacacgtggcgagctgtggcacctgctgccacctccacagacctgcaggccccatcctcactgtacacctttactacatgggggcggctggcatcgcgggggagcagcccccttgcactggaggggcccccgagaattgggctctgtgagggaggactgcagagctcagggaaggggttggggatagaggggagggaggtggcacgcctctcctcctctcgaagtttcctgccggtggttgggatgaggagaggctgggacctctttacctcctcaggcagaggggtatcagggggccggggagtcccaggaggggtcccaggggctgggcaaaggtcttccggagagctgctaagatgaggtggagacagatccagctccatggcgtctgagcgagagaggggcttaacggaaccagttgtgtgcccttgtcctgaaccccgagcgtcaggacacccggctgccaa

SEQ ID NO: 183618 - DNA, 944 bp, Homo Sapiens
ttggggaatctggacccacagggctcccccccgcctctgacttctctgtccgaagtcgggacaccctcctaccacctgtagagaagcgggagtggatctgaaataaaatccaggaatctgggggttcctagacggagccagacttcggaacgggtgtcctgctactcctgctggggctcctccaggacaagggcacacaactggttccgttaagcccctctctcgctcagacgccatggagctggatctgtctccacctcatcttagcagctctccggaagacctttgcccagcccctgggacccctcctgggactccccggccccctgatacccctctgcctgaggaggtaaagaggtcccagcctctcctcatcccaaccaccggcaggaaacttcgagaggaggagaggcgtgccacctccctcccctctatccccaaccccttccctgagctctgcagtcctccctcacagagcccaattctcgggggcccctccagtgcaagggggctgctcccccgcgatgccagccgcccccatgtagtaaaggtgtacagtgaggatggggcctgcaggtctgtggaggtggcagcaggtgccacagctcgccacgtgtgtgaaatgctggtgcagcgagctcacgccttgagcgacgagacctgggggctggtggagtgccacccccacctagcactggagcggggtttggaggaccacgagtccgtggtggaagtgcaggctgcctggcccgtgggcggagatagccgcttcgtcttccggaaaaacttcgccaagtacgaactgttcaagagctccccacactccctgttcccagaaaaaatggtctccagctgtctcgatgcacacactgggtatatcccatgaagacctcatccagaacttcctgaatgctggcagctttcctgagatccagggctttctg

SEQ ID NO: 183619 - DNA, 2527 bp, Homo Sapiens
  misc_feature (2409)..(2429): n is a, c, g, or t
tttgtacaaaaaagttggggcctctcaaccctgctcagcccaacggaccgcctgaggcagagccacggcctccccagtcccctgcctcaacggccagtttcatcttctccaagggctctaggaagctgcagctggagcggcccgtgtcccctgagacccaggctgacctccagcggaatctggtggcagaactccggagcatctcagagcagcggccaccccaggccccaaagaagtcacctaaggctcccccacctgtggcccgcaagccgtctgtgggagtccccccacccgcctcccccagttaccctcgagctgagccccttactgctcctcccaccaatgggctccctcacacccaggacaggactaagagggagctggcggagaatggaggtgtcctgcagctggtgggcccagaggagaagatgggcctcccgggctcagactcacagaaagagctggcctgaccaccaggcacctcactggcactgctgacccatcccagaaacacaatctcagggacccgagcagctccaaggacgagaggatacagcagacacaacctaatagagagggcgcctgcagccttaacctccacggccttcgatacttatgcaagcctgggttgctcctgtcctcagagtcatcctgcgctcatgccttttcccgaatgggttcacctctggcagttgccgcttcagtcttggccttagcctcatcttgaagtgggtagctggcgggagagggtggctgcgccccctgctggccctgaggctgcagagttgggagcaggacacctcacctgagtttcattttttttcatgtccaaaccatgcacatactatagtccagaatcaaagcacttttgaaaagtggctgcatggccatcctccagggcccaggaagttgcattccaagggcctgtttacatggcagcagaatccatccccggcagtcagcccatagcttgggaccagtctgtgccctcctgcccagtccagtttactcctcttggttcctgaaggtggccaagtcattgtgttcccacaggcttctctaggctgggggcaggtgtggggctgtggaattccaaagcacaaaaggtgcagaggggattggccttcctgtgcctcaactcaccaaccaccctcctgccttccagttctgccaggtgctccatgctggggacaagtaggagactgccagggcccaaagaaatgggtgagcagtagagtcatctcggggcacttggcagtgtcaagcacctgccccttgcctccttgaccacactggggtgggtgggcccccagcacttcagaggcaggagcctttgggctgagcaagcactgaggaggtggatggaagggagcatctggagggggggagcttccttgagcagtgggcccaggcctggccctccacacttcattctctgacctttctctctcctcatttcggtgcatgtcctttctgcagctgcctttcagcacaggtggttccactgggggcagctaacgctgagtgacaaggatgggaagccacaggtgcattttactcaagtcttctctagtcaatgaggggcacccagtgcttctagggcaggctgggtggtggtcccctaggtatcagcctctcttactgtactctccgggaatgttaacctttctattttcagcctgtgccacctgtctaggcaagctggcttccccattggcccctgtgggtccacagcagcgtggctgccccccagggccaccgcttctttcttgatcctctttccttaacagtgacttgggcttgagtctggcaaggaaccttgcttttagcttcaccaccaaggagagaggttgacatgacctccccgccccctcaccaaggctgggaacagaggggatgtggtgagagccaggttcctctggccctctccagggtgttttccactagtcactactgtcttctccttgtagctaatcaatcaatattcttcccttgcctgtgggcagtggagagtgctgctgggtgtacgctgcacctgcccactgagttggggaaagaggataatcagtgagcactgttctgctcagagctcctgatctaccccaccccctaggatccaggactgggtcaaagctgcatgaaaccaggccctggcagcaacctgggaatggctggaggtgggagagaacctgacttctctttccctctccctcctccaacattactggaactctatcctgttaggatcttctgagcttgtttccctgctgggtgggacagaggacaaaggagaagggagggtctagaagaggcagcccttctttgtcctctggggtaaatgagcttgacctagagtaaatggagagaccaaaagcctctgatttttaatttccataaaatgttagaagnnnnnnnnnnnnnnnnnnnnnttctttaaatttttgagtctttgatatgtctaaaaatccattccctctgccctgaagcctgagtgagacacatgaagaaaactgtgtttcatttaaag

SEQ ID NO: 183620 - DNA, 1851 bp, Homo Sapiens
  misc_feature (149)..(163): n is a, c, g, or t
  misc_feature (302)..(591): n is a, c, g, or t
  misc_feature (595)..(606): n is a, c, g, or t
cacagtagtccttggctctgcacggaataaatgataccctcaaatctaattggatgtgctttcgcctttgcatgtaagtacggtagtaagaaacctttgagatctttctgacttttcaaaattagagaaagcaaatgggatggatagannnnnnnnnnnnnnncaaggggggcaggaaggtaatggtttgagtagcctttgtttaaaaaaaagactaaatatatttaaaaggccacatttatatttttttcacaagaaccacataataaattccacttcttgacctgaatttggaaatccgnnnnnnnnnnnnnnnnnnnnnnnnnnnnnnnnnnnnnnnnnnnnnnnnnnnnnnnnnnnnnnnnnnnnnnnnnnnnnnnnnnnnnnnnnnnnnnnnnnnnnnnnnnnnnnnnnnnnnnnnnnnnnnnnnnnnnnnnnnnnnnnnnnnnnnnnnnnnnnnnnnnnnnnnnnnnnnnnnnnnnnnnnnnnnnnnnnnnnnnnnnnnnnnnnnnnnnnnnnnnnnnnnnnnnnnnnnnnnnnnnnnnnnnnnnnnnnnnnnnnnnnnnnnnnnnnnnnnnnnnnnnnnnnnnntccnnnnnnnnnnnngaaattattaatccctgcctgtgctctacatagcctcatgggcatcattggatagctcagagggcccttgattctggcaaggcaaataaagccagaatgagaaattaccatcttctactagagaaaaccaagagaaaaatttttatgctaggatgcctttatgaccacttaattttttaatcttagtttaatggtctctccctggtgctaactgctgacagtggccacctcttttttggggattgaggggcctacataactagctggccttaccccatatcttttgttcaaacataataccatctttttgcttcttctgaactttagatctccataacacatgtactgtagaatgtgatggaaaagcattgatgagaatttattggcagttcagattgtgttttcccaacttaggctctttattaattggttaaggttttctccaaaaagggcatttcaacaatgggaattatttaatgtaacagtgggcacagattacttatcttccttctctgctttgtgactcaccagcagtaacacacacaatccacatcttgtgcacctcaaatgaacagacttggtttccttgctttcttgacatttccatgactgtttcacatacaaactattgggtgaggtttttcagctgttaccgacccacgtcctgctgtctctgtgtggtcctacaaaaactgtccattcccacccctttgctttgccatttgcaagagtctggaattgtcaggtctcagcttcgaaaagtcctggttccactgacaggacacattctttagtgggaattaagacctacagagtctagtttgtatgtaggtatgaagggaattttttaaataaattgaaaagctgtgaacagcattagaactttgtctatttcttaattttaaaatatgctgatatgccttaaactgtagttgtagatccttgtcattttgctgtttgaaaataaccaatgtgttttctaaaactgtcgtgtaatctactttcattgttaatgcagaattgtcatatatgtaagctgcatgttagacatttgtcttttttaaactaaagtaattgtattgatgtgaagcatatcattttttcaaatatgaaagtgatcacttagcaacatgcttggtaatttggcatctgttaaggtaggagagtggtgaacagataatctatgcatatatcactagtgccaagacataaaagcgggggaaaatatatttttacccaaacatt

SEQ ID NO: 183621 - DNA, 1206 bp, Homo Sapiens
ttggctcccgcccggtagcggcccggtgggcagcagtggaagcagcagcacgtttggtggcctgcaccagcacgagcgtatgggctaccagctgcatggagcagaggtgaacggtgggctcccatctgcatcctccttctcctcagcccccggagccacgtacggcggcgtctccagccacacgccgcctgtcagcggggccgacagcctcctgggctcccgagggaccacagctggcagctccggggatgccctcggcaaagcactggcctcgatctactccccggatcactcaagcaataacttctcgtccagcccttctacccccgtgggctccccccagggcctggcaggaacgtcacagtggcctcgagcaggagcccccggtgccttatcgcccagctacgacgggggtctccacggcctgcagagtaagatagaagaccacctggacgaggccatccacgtgctccgcagccacgccgtgggcacagccggcgacatgcacacgctgctgcctggccacggggcgctggcctcaggtttcaccggccccatgtcactgggcgggcggcacgcaggcctggttggaggcagccaccccgaggacggcctcgcaggcagcaccagcctcatgcacaaccacgcggccctccccagccagccaggcaccctccctgacctgtctcggcctcccgactcctacagtgggctagggcgagcaggtgccacggcggccgccagcgagatcaagcgggaggagaaggaggacgaggagaacacgtcagcggctgaccactcggaggaggagaagaaggagctgaaggccccccgggcccggaccagcccagacgaggacgaggacgaccttctccccccagagcagaaggccgagcgggagaaggagcgccgggtggccaataacgcccgggagcggctgcgggtccgtgacatcaacgaggcctttaaggagctggggcgcatgtgccaactgcacctcaacagcgagaagccccagaccaaactgctcatcctgcaccaggctgtctcggtcatcctgaacttggagcagcaagtgcgagagcggaacctgaatcccaaagcagccctgtttgaaacggcgagaagaggaaaatgtgtcaagtgtggttggagacccccagatggtgctttcagctccccacccaggcctgaacgaagcccaca

SEQ ID NO: 183622 - DNA, 721 bp, Homo Sapiens
  misc_feature (588)..(599): n is a, c, g, or t
ctttgtacaaaaaagttggcgcatgtgccaccctgcacctcaacagcgagaagccccagaccaaactgctcatcctgcaccaggctgtctcggtcatcctgaacttggagcagcaagtgcgagagcggaacctgaatcccaaagcagcctgtttgaaacggcgagaagaggaaaaggtgtcaggtgtggttggagacccccagatggtgctttcagctccccacccaggcctgagcgaagcccacaaccccgccgggcacatgtgaaaggtatgcctccgtgggacgagccacccgctttcagccctgtgctctggccccagaacggccactcgagaccccgggcttcatccacatccacacctcacacacctgttgtcagcatcgagccaacaccaacctgacaaggttcggagtgatgggggcggccaaggtgacactgggtccaggagctccctggggccctggcctaccactcactggcctcgctccccctgtccccgaatctcagccaccgtgtcactctgtgacctgtcccatggatcctgaaactgcatcttggccctgttgcctgggctgacaggagcannnnnnnnnnnnccagtaaacaaaacctgaaagcaagcaacaaaaacatacactttgtcagagaagaaaaaaatgccttaactataaaaagcggaagaaatggaaacatatcactcaaggggaatgctgtggaa

SEQ ID NO: 183623 - DNA, 2608 bp, Homo Sapiens
  misc_feature (2489)..(2517): n is a, c, g, or t
caatgcttttttatttatgccaactttgtacaaaaaagttggagcttaaagattttgttggtgaatttaaatgcctgtagttaaagccagcttagttcaaattccacatatttctggctaactttatatctatatttaaaaattagagcattgctaaaagtgaaacatcgatttatgggaaaattaatactcagaagtaggatttctacttacttttatttctctcacctgtaggtgaagtatttgactatttggttgcacatggcaggatgaaggaaaaagaagcaagatctaaatttagacagattgtgtctgcagttcaatactgccatcagaaacggatcgtacatcgagacctcaaggctgaaaatctattgttagatgccgatatgaacattaaaatagcagatttcggttttagcaatgaatttactgttggcggtaaactcgacacgttttgtggcagtcctccatacgcagcacctgagctcttccagggcaagaaatatgacgggccagaagtggatgtgtggagtctgggggtcattttatacacactagtcagtggctcacttccctttgatgggcaaaacctaaaggaactgagagagagagtattaagagggaaatacagaattcccttctacatgtctacagactgtgaaaaccttctcaaacgtttcctggtgctaaatccaattaaacgcggcactctagagcaaatcatgaaggacaggtggatcaatgcagggcatgaagaagatgaactcaaaccatttgttgaaccagagctagacatctcagaccaaaaaagaatagatattatggtgggaatgggatattcacaagaagaaattcaagaatctcttagtaagatgaaatacgatgaaatcacagctacatatttgttattggggagaaaatcttcagagctggatgctagtgattccagttctagcagcaatctttcacttgctaaggttaggccgagcagtgatctcaacaacagtactggccagtctcctcaccacaaagtgcagagaagtgtttcttcaagccaaaagcaaagacgctacagtgaccatgctggaccagctattccttctgttgtggcgtatccgaaaaggagtcagaccagcactgcagatagtgacctcaaagaagatggaatttcctcccggaaatcaagtggcagtgctgttggaggaaagggaattgctccagccagtcccatgcttgggaatgcaagtaatcctaataaggcggatattcctgaacgcaagaaaagctccactgtccctagtagtaacacagcatctggtggaatgacacgacgaaatacttatgtttgcagtgagagaactacagctgatagacactcagtgattcagaatggcaaagaaaacagcactattcctgatcagagaactccagttgcttcaacacacagtatcagtagtgcagccaccccagatcgaatccgcttcccaagaggcactgccagtcgtagcactttccacggccagccccgggaacggcgaaccgcaacatataatggccctcctgcctctcccagcctgtcccatgaagccacaccattgtcccagactcgaagccgaggctccactaatctctttagtaaattaacttcaaaactcacaaggagtcgcaatgtatctgctgagcaaaaagatgaaaacaaagaagcaaagcctcgatccctacgcttcacctggagcatgaaaaccactagttcaatggatcccggggacatgatgcgggaaatccgcaaagtgttggacgccaataactgcgactatgagcagagggagcgcttcttgctcttctgcgtccacggagatgggcacgcggagaacctcgtgcagtgggaaatggaagtgtgcaagctgccaagactgtctctgaacggggtccggtttaagcggatatcggggacatccatagccttcaaaaatattgcttccaaaattgccaatgagctaaagctgtaacccagtgattatgatgtaaattaagtagcaattaaagtgttttcctgaacactgatggaaatgtatagaataatatttaggcaataacgtctgcatcttctaaatcatgaaattaaagtctgaggacgagagcacgcctgggagcgaaagctggccttttttctacgaatgcactacattaaagatgtgcaacctatgcgccccctgccctacttccgttaccctgagagtcggcgtgtggccccatctccatgtgcctcccgtctgggtgggtgtgagagtggacggtatgtgtgtgaagtggtgtatatggaagcatctccctacactggcagccagtcattgctagtacctctgcgggagatcatccggtgctaaaacattacagttgccaaggaggaaaatactgaatgactgctaagaattaaccttaagaccagttcatagttaatacaggtttacagttcatgcctgtgnnnnnnnnnnnnnnnnnnnnnnnnnnnnnagtgcaaaaggtttaaaatttatagttgtgaacattgcttgtgtgtgtttttctaagtagattcacaagataattaaaaaattcacttttt

SEQ ID NO: 183624 - DNA, 1485 bp, Homo Sapiens
ccaactttgtacaaaaaagttgggttcctagatcgaaatggccaaacaagctcgaaatctcatcactgatatttgcacagaacagtgtacccttagtgaccagttgctacccaagcattgtgccaaaactatcagtcaagcagtgaataagaaatcaaaaaagcagactggtaagaaaggggaacctgaaagggagaaaccaggtgttgagagcatgaggaaaaacaggctggttgtgaccaaccttgataaattgcacactgcactttctgagttatgcttctctataaattatgtaccaaacatggtggtatgggaacatacctttaccccacgagaatatttgacttctcatctggaaatacgctttaccaagtcaattgttgggatgactatgtataatcaagccacacaggaaattgcaaaaccttcagaacttctaacaagtgtaagagcatacatgaccgtactccagtcaatagaaaactatgtgcagattgatattacaagagtatttaataatgtgcttcttcaacaaacacaacatttagacagtcatggagagccaaccattacaagtctatacacaaattggtatttggaaactttgttacgacaagtcagcaatggccatatagcatattttcctgcaatgaaagcgtttgtgaacttacctacagaaaatgaattaacattcaatgcagaggaatattctgacatatcagaaatgaggtcattatcagaactactaggcccatatggtatgaagtttctaagtgaaagccttatgtggcatatttcatcacaagttgctgaacttaagaaacttgtggtggagaatgttgatgtgttaacacaaatgaggaccagctttgacaaaccagaccagatggctgcactgtttaaaagattatcatctgttgacagtgtcttgaagaggatgacaataattggtgtaattttatccttccgatcattggcacaagaagcacttagagatgtgttatcctaccacattccttttcttgtaagttcaattgaagattttaaggatcacattccaagggaaactgatatgaaggttgcaatgaatgtgtatgagttatcatcagctgccggattaccttgtgagattgatcctgcattggtcgtagctctttcttcacaaaaatcggaaaacattagtccagaagaagagtataaaattgcctgccttctcatggtgtttgtggcagtttctttgccaacactggccagtaatgtgatgtctcagtacagccctgctatagaaaggcattgcaacaacatacattgcttggccaaagccatcaaccagattgctgcagctttgtttacaattcacaaaggaagcattgaagaccgtcttaaagaatttctggcgcttgcatcctccagtctactgaaaattggccaggagacagataaaactacaacaagaaatagagaatctgtttatttactgct

SEQ ID NO: 183625 - DNA, 1721 bp, Homo Sapiens
actttgtacaaaaaagttggaaagcgtttgtgaacttacctacagaaaatgaattaacattcaatgcagaggaatattctgacatatcagaaatgaggtcattatcagaactactaggcccatatggtatgaagtttctaagtgaaagccttatgtggcatatttcatcacaagttgctgaacttaagaaacttgtggtggagaatgttgatgtgttaacacaaatgaggaccagctttgacaaaccagaccagatggctgcactgtttaaaagattatcatctgttgacagtgtcttgaagaggatgacaataattggtgtaattttatccttccgatcattggcacaagaagcacttagagatgtgttatcctaccacattccttttcttgtaagttcaattgaagattttaaggatcacattccaagggaaactgatatgaaggttgcaatgaatgtgtatgagttatcatcagctgccggattaccttgtgagattgatcctgcattggtcgtagctctttcttcacaaaaatcggaaaacattagtccagaagaagagtataaaattgcctgccttctcatggtgtttgtggcagtttctttgccaacactggccagtaatgtgatgtctcagtacagccctgctatagaagggcattgcaacaacatacattgcttggccaaagccatcaaccagattgctgcagctttgtttacaattcacaaaggaagcattgaagaccgtcttaaagaatttctggcgcttgcatcctccagtctactgaaaattggccaggagacagataaaactacaacaagaaatagagaatctgtttatttactgctagatatgattgtacaagaatctccattccttacaatggatcttttggaatcttgttttccttatgtcttgctgagaaatgcataccatgctgtctacaaacaaagtgttacatcttctgcataaaattacctacttaatcaagataagcacgcatttttgttgccttggttttacctgtagactgtggaactattttaccttaagacctgaaaaagttttgtggattataaatttctttcatacggttgtattttctgatcattggtttcttaatatggttgtactacagtatacttggttgatttaggttgcacattcactgaattcactgagattattcctataattttaaagtatcatttatttgaaaaacatacattatcaacatgtttttgatatttgataatgaaaaaaatctttgcttgtttatttctgaaaaagaactgtatttagtgattattttagatagtgatattatagcattcatctgtgtgtaaattatttcatatagggaagagttctgatctgtacctatggttcttattgaaaacaacattggatgtgcatttctgtgatgttatgaatacatttctactttattttgaaacatttgccaaactaaatactgtaacactgtataacatttaaaaatgttaaagaactgcttagtattagaagcagatcatttcccaaaattctaagagcagcagcatatgttgttgcttgtataaagcctagcgataatttttagactaacttccatggtgccctgttggcattagcactaccattgtaccctgctgtataataaacaatcttaaacatttatcaactgttgatacaaatgttagtccctaaccactttttata

SEQ ID NO: 183626 - DNA, 2634 bp, Homo Sapiens
  misc_feature (2564)..(2593): n is a, c, g, or t
gaaacttcataccatatgagcctagtagttctgataatgacctcatttctgatatgtcagaatattcctctgcattgaatgttaattcattttctgtaggtaagttcacaaacgctttcattgcaggaaaatatgctatgtggccattgctgacttgtcgtaacaaagtttccaaataccaatttgtgtatagacttgtaatggttggctctccatgactgtctaaatgttgtgtttgttgaagaagcacattattaaatactcttgtaatatcaatctgcacatagttttctattgactggagtacggtcatgtatgctcttacacttgttagaagttctgaaggttttgcaatttcctgtgtggcttgattatacatagtcatcccaacaattgacttggtaaagcgtatttccagatgagaagtcaaatattctcgtggggtaaaggtatgttcccataccaccatgtttggtacataatttatagagaagcataactcagaaagtgcagtgtgcaatttatcaaggttggtcacaaccagcctgtttttcctcatgctctcaacacctggtttctccctttcaggttcccctttcttaccagtctgcttttttgatttcttattcactgcttgactgatagttttggcacaatgcttgggtagcaactggtcactaagggtacactgttctgtgcaaatatcagtgatgagatttcgagcttgtttggccatttcatctaggaacatattacataaggaaagactgcgatctccaatatgatgtcgctcttctggacatagttcatgcgtgcaactcataaaatgagtgcaaagtagtggaaatgcaattgagtatcttgattgagagggtaactccaaacactgttgaaacatcttctcaaaagcacgactataaaaacaaaatatggagagatctgatgtttccaccaacatttccaccaaggaatctaccatttttgtatgaaaaattattgtattcatcatctttccaagttctctgtgatctgcaaggccaagtgaagcctttgagacactagtatatgcctgtaacctaaaccaatctaatctcattcctctgaaatcaaatacttccccatcttcaacttgttttacacttagggaagtcatagtgttaacaaaagaggacatgatgattgattcatcttcagggcaaacagaaagattctgcacgagttcattgaggacaacagcatcaaagccagaaaggtactgcacgtaatacctctgcattacaggtccgtatttcctcacatgtgctctaagttcttccatgtaaaatattaattcagcaatgtgcttatctataaagtcgtctgcactcttctttggcatgttatctgcatgacgaagtagccagatgatttcatcacgggcaaaggataatgccataaaaacaaaaagtgccttgggacctagcaatccaggttgatcagagaggacagtagccaattccttcagtgcagatcttaaaaacttgcgtctttctctgtgcattgaaccagcatgtgacacggctgcctccttgcattctcttatgtcattaatacgtttattatagcctcgtatgtttacaaataagtcttctgcagctttgtgaatgtggaaaacttcatcccgaaagagagagaggcaagagctactttgaagagctagtttccaaaggttcagtgctgtagcgtcagtatttaggatcccatggcacaaaataaagccaaagataatccacttttccattgcatccaaagagaggtattcacaaggcatagtgtcggactgtgctggattaagcattgtactaggtgcactgatgaggctcaataactgggcatttctccactggtcagctgaaagattccttcgaggatataccatttgaagagaaattagtgcatctgaaagagacttgctatggggtacaaattcttccatcatcttctttaaagggttttcataatccacaatcatctggccaaggcgtgggtattctctgtcacttgctccatgagtcatttcatgggcatagttgtataatccaatgattgccttcctttcttcaattcgagacagcagtatcattagtgttgtataggttataattaaatctaagtagttctttgttaaatcaaagtttacagtaatatcaaagaagacttggcaaacgtcaatagtattcagcaattcacaaacatggtccttaaattccataacatctacaaatgtgaagtaatataatgccagatttttcagaatctctgatttttctttctgtagttgtgcaagctgttgattgttgttgcgggtttctacagcagggaattttctgactatgaatttcacagcagattccaggtttttgtcgataagataggatggttttgccttggggtctccacatgccttcttgatgttgtagaggcgggtgagcatgccgacgccccggtcgttgaggatggtgagcttctccgccagcttctgctgactgggctgcagcactgagcgcgacatggtggtgctggtnnnnnnnnnnnnnnnnnnnnnnnnnnnnnnagtcacgggcccgcggccttcgcagcagcctctctcgccaa

SEQ ID NO: 183627 - DNA, 1086 bp, Homo Sapiens
ttggggcctacttccccaccctgtccaccgagcagatgctgtcgtccgaggccgtggccgtggacttcgggaactatcacctgggcgtcatgtcctggatcatccccgtcttcgtgggcctgtcctgcttcggctccgtcaatgggtccctgttcacatcctccaggctcttcttcgtggggtcccgggaaggccacctgccctccatcctctccatgatccacccacagctcctcacccccgtgccgtccctcgtgttcacgtgtgtgatgacgctgctctacgccttctccaaggacatcttctccgtcatcaacttcttcagcttcttcaactggctctgcgtggccctggccatcatcggcatgatctggctgcgccacagaaagcctgagcttgagcggcccatcaaggtgaacctggccctgcctgtgttcttcatcctggcctgcctcttcctgatcgccgtctccttctggaagacacccgtggagtgtggcatcggcttcaccatcatcctcagcgggctgcccgtctacttcttcggggtctggtggaaaaacaagcccaagtggctcctccagggcatcttctccacgaccgtcctgtgtcagaagctcatgcaggtggtcccccaggagacatagccaggaggccgagtggctgccggaggagcatgcgcagaggccagttaaagtagatcacctcctcgaacccactccggttccccgcaacccacagctcagctgcccatcccagtccctcgccgtccctcccaggtcgggcagtggaggctgctgtgaaaactctggtacgaatctcatccctcaactgagggccagggacccaggtgtgcctgtgctcctgcccaggagcagcttttggtctccttgggccctttttcccttccctcctttgtttacttatatatatattttttttaaacttaaattttgggtcaacttgacaccactaagatgattttttaaggagctgggggaagggcaggagccttcctttctcctgccccaagggcccagaccctgggcaaacagagctactgagacttggaaacctcattgctac

SEQ ID NO: 183628 - DNA, 895 bp, Homo Sapiens
  misc_feature (759)..(759): n is a, c, g, or t
ttggcaaaggactacttcacagacttaatcactaacgagagcattaattacttcaaaatgtctaagagaatgtatccccataggcccgttatgatggtgatcagccacgctgcgccccacggccccgaggactcagccccacagttttctaaactgtaccccaatgcttcccaacacataactcctagttataactatgcaccaaatatggataaacactggattatgcagtacacaggaccaatgctgcccatccacatggaatttacaaacattctacagcgcaaaaggctccagactttgatgtcagtggatgattctgtggagaggctgtataacatgctcgtggagacgggggagctggagaatacttacatcatttacaccgccgaccatggttaccatattgggcagtttggactggtcaaggggaaatccatgccatatgactttgatattcgtgtgcctttttttattcgtggtccaagtgtagaaccaggatcaatagtcccacagatcgttctcaacattgacttggcccccacgatcctggatattgctgggctcgacacacctcctgatgtggacggcaagtctgtcctcaaacttctggacccagaaaagccaggtaacaggtttcgaacaaacaagaaggccaaaatttggcgtgatacattcctagtggaaagagggtaattattggttcctggggtgcttctgggaaccagtcctagtgggcagctttccctgctgagtatntttttttctccttatttttgtttactaagcatgcagatttcgtaaacctagtcacaagattgaatggtttgctgcttattctgtagtggtcaatagagtaataattgctggatcagaattgtaaagaataaccctc

SEQ ID NO: 183629 - DNA, 2679 bp, Homo Sapiens
  misc_feature (94)..(102): n is a, c, g, or t
ttggcttctccaagtgagagtcgcaggcaatagaactactttgcttttggaggaaaaggaggaattcattttcagcagacacaagaaaagcagnnnnnnnnncaggtgctgacggccacccaccatcatctaaagaagataaacttggcaaatgacatgcaggttcttcaaggcagaataattgcagaaaatcttcaaaggaccctatctgcagatgttctgaatacctctgagaatagagattgattattcaaccaggatacctaattcaagaactccagaaatcaggagacggagacattttgtcagttttgcaacattggaccaaatacaatgaagtattcttgctgtgctctggttttggctgtcctgggcacagaattgctgggaagcctctgttcgactgtcagatccccgaggttcagaggacggatacagcaggaacgaaaaaacatccgacccaacattattcttgtgcttaccgatgatcaagatgtggagctggggtccctgcaagtcatgaacaaaacgagaaagattatggaacatgggggggccaccttcatcaatgcctttgtgactacacccatgtgctgcccgtcacggtcctccatgctcaccgggaagtatgtgcacaatcacaatgtctacaccaacaacgagaactgctcttccccctcgtggcaggccatgcatgagcctcggacttttgctgtatatcttaacaacactggctacagaacagccttttttggaaaatacctcaatgaatataatggcagctacatcccccctgggtggcgagaatggcttggattaatcaagaattctcgcttctataattacactgtttgtcgcaatggcatcaaagaaaagcatggatttgattatgcaaaggactacttcacagacttaatcactaacgagagcattaattacttcaaaatgtctaagagaatgtatccccataggcccgttatgatggtgatcagccacgctgcgccccacggccccgaggactcagccccacagttttctaaactgtaccccaatgcttcccaacacataactcctagttataactatgcaccaaatatggataaacactggattatgcagtacacaggaccaatgctgcccatccacatggaatttacaaacattctacagcgcaaaaggctccagactttgatgtcagtggatgattctgtggagaggctgtataacatgctcgtggagacgggggagctggagaatacttacatcatttacaccgccgaccatggttaccatattgggcagtttggactggtcaaggggaaatccatgccatatgactttgatattcgtgtgcctttttttattcgtggtccaagtgtagaaccaggatcaatagtcccacagatcgttctcaacattgacttggcccccacgatcctggatattgctgggctcgacacacctcctgatgtggacggcaagtctgtcctcaaacttctggacccagaaaagccaggtaacaggtttcgaacaaacaagaaggccaaaatttggcgtgatacattcctagtggaaagaggcaaatttctacgtaagaaggaagaatccagcaagaatatccaacagtcaaatcacttgcccaaatatgaacgggtcaaagaactatgccagcaggccaggtaccagacagcctgtgaacaaccggggcagaagtggcaatgcattgaggatacatctggcaagcttcgaattcacaagtgtaaaggacccagtgacctgctcacagtccggcagagcacgcggaacctctacgctcgcggcttccatgacaaagacaaagagtgcagttgtagggagtctggttaccgtgccagcagaagccaaagaaagagtcaacggcaattcttgagaaaccaggggactccaaagtacaagcccagatttgtccatactcggcagacacgttccttgtccgtcgaatttgaaggtgaaatatatgacataaatctggaagaagaagaagaattgcaagtgttgcaaccaagaaacattgctaagcgtcatgatgaaggccacaaggggccaagagatctccaggcttccagtggtggcaacaggggcaggatgctggcagatagcagcaacgccgtgggcccacctaccactgtccgagtgacacacaagtgttttattcttcccaatgactctatccattgtgagagagaactgtaccaatcggccagagcgtggaaggaccataaggcatacattgacaaagagattgaagctctgcaagataaaattaagaatttaagagaagtgagaggacatctgaagagaaggaagcctgaggaatgtagctgcagtaaacaaagctattacaataaagagaaaggtgtaaaaaagcaagagaaattaaagagccatcttcacccattcaaggaggctgctcaggaagtagatagcaaactgcaacttttcaaggagaacaaccgtagaggaagaacgagaggaaggagaagagacggcagaggaaagggaagagtgcagcctgcctggcctcacttgcttcacgcatgacaacaaccactggcagacagccccgttctggaacctgggatctttctgtgcttgcacgagttctaacaataacacctactggtgtttgcgtacagttaa

SEQ ID NO: 183630 - DNA, 1025 bp, Homo Sapiens
ccctttaatgccaactttgtacaaaaaagttggggatgctccagcccctccctatttcgaatggttttggtttgttttgcaggtgttttattcttcccaatgactctatccattgtgagagagaacagtaccaatcggccccagcctgcaaggaccataaggcatagcttgacaaagagattgaagctctgccacataaaattactaatttaagaaaagtgataggacatctgaccagaaggaagcctgaggaatgtagctgctctaaacaaagctattacaataaagagaaaggtgtaaaaaagcaagagaaattaaagagccatcttcacccattcagggaggctgctcacgaagtagatagcaaactgcaacttttcaaggagaacaaccgtacgaggaaaaaggagaggaaggagaagagacggcagaggaagggggaagagtgcagcctgcctggcctcacttgcttcacgcatgacaacaaccactggcagacagccccgttctggaacctgggatctttctgtgcttgcacgagttctaacaataacacctactggtgtttgcgtacagttaatgagacgcataattttcttttctgtgagtttgctactggctttttggagtattttgatatgaatacagatccttatcatctcacaaatacagtgcacacggtagaacgaggcattttgaatcagctacacgtacaactaatggagctcagaagctgtcaaggatataagcagtgcaacccaagacctaagaatcttgatgttggaaataaagatggaggaagctatgacctacacagaagacagttatgggatggatgggaaggttaatcagccccgtctcactgcagacatcaactggcaaggcctagaagagctacacagtgtgaatgaaaacatctatgagtacagacaaactacagacttactctggtggactggactaattacttgaaggatttatatagagtatttgcactgctgaagagtcactatgagcaaataaaa

SEQ ID NO: 183631 - DNA, 1915 bp, Homo Sapiens
  misc_feature (90)..(140): n is a, c, g, or t
  misc_feature (1555)..(1585): n is a, c, g, or t
  misc_feature (1841)..(1853): n is a, c, g, or t
aagagaaattaaagagccatcttcacccattcaaggaggctgctcaggaagtagatagcaaactgcaacttttcaaggagaacaaccgtnnnnnnnnnnnnnnnnnnnnnnnnnnnnnnnnnnnnnnnnnnnnnnnnnnntgcagcctgcctggcctcacttgcttcacgcatgacaacaaccactggcagacagccccgttctggaacctgggatctttctgtgcttgcacgagttctaacaataacacctactggtgtttgcgtacagttaatgagacgcataattttcttttctgtgagtttgctactggctttttggagtattttgatatgaatacagatccttatcagctcacaaatacagtgcacacggtagaacgaggcattttgaatcagctacacgtacaactaatggagctcagaagctgtcaaggatataagcagtgcaacccaagacctaagaatcttgatgttggaaataaagatggaggaagctatgacctacacagaggacagttatgggatggatgggaaggttaatcagccccgtctcactgcagacatcaactggcaaggcctagaggagctacacagtgtgaatgaaaacatctatgagtacagacaaaactacagacttagtctggtggactggactaattacttgaaggatttagatagagtatttgcactgctgaagagtcactatgagcaaaataaaacaaataagactcaaactgctcaaagtgacgggttcttggttgtctctgctgagcacgctgtgtcaatggagatggcctctgctgactcagatgaagacccaaggcataaggttgggaaaacacctcatttgaccttgccagctgaccttcaaaccctgcatttgaaccgaccaacattaagtccagagagtaaacttgaatggaataacgacattccagaagttaatcatttgaattctgaacactggagaaaaaccgaaaaatggacggggcatgaagagactaatcatctggaaaccgatttcagtggcgatggcatgacagagctagagctcgggcccagccccaggctgcagcccattcgcaggcacccgaaagaacttccccagtatggtggtcctggaaaggacatttttgaagatcaactatatcttcctgtgcattccgatggaatttcagttcatcagatgttcaccatggccaccgcagaacaccgaagtaattccagcatagcggggaagatgttgaccaaggtggagaagaatcacgaaaaggagaagtcacagcacctagaaggcagcgcctcctcttcactctcctctgattagatgaaactgttaccttaccctaaacacagtatttctttttaacttttttatttgtaaactaataaaggtaatcacagccaccaacattccaagctaccctgggtacctttgtgcagtagaagctagtgagcatgtgagcaagcggtgtgcacacggagactcatcgttataatttactatctgccaagagtagaaagaaaggctggggatatttgggttggcttgnnnnnnnnnnnnnnnnnnnnnnnnnnnnnnntactaaaacagtattatcttttgaatatcgtagggacataagtatatacatgttatccaatcaagatggctagaatggtgcctttctgagtgtctaaaacttgacacccctggtaaatctttcaacacacttccactgcctgcgtaatgaagttttgattcatttttaaccactggaatttttcaatgccgtcattttcagttagatgattttgcactttgagattaaaatgccatgtctatttgattagtcttannnnnnnnnnnnnacaggcttatcattctcactgttggctgtcattgtgacaaattcaaataaacccccaaggac

SEQ ID NO: 183632 - DNA, 1162 bp, Homo Sapiens
  misc_feature (88)..(100): n is a, c, g, or t
ttggctggaatttttcaatgccgtcattttcagttagatgattttgcactttgagattaaaatgccatgtctatttgattagtcttannnnnnnnnnnnnacaggcttatcagtctcactgttggctgtcattgtgacaaagtcaaataaacccccaaggacgacacacagtatggatcacatattgtttgacattaagcttttgccagaaaatgttgcatgtgttttacctcgacttgctaaaatcgattagcagaaaggcatggctaataatgttggtggtgaaaataaataaataagtaaacaaaatgaagattgcctgctctctctgtgcctagcctcaaagcgttcatcatacatcatacctttaagattgctatattttgggttattttcttgacaggagaaaaagatctaaagatcttttattttcatcttttttggttttcttggcatgactaagaagcttaaatgttgataaaatatgactagttttgaatttacaccaagaacttctcaataaaagaaaatcatgaatgctccacaatttcaacataccacaagagaagttaatttcttaacattgtgttctatgattatttgtaagaccttcaccaagttctgatatcttttaaagacatagttcaaaattgcttttgaaaatctgtattcttgaaaatatccttgttgtgtattaggtttttaaataccagctaaaggattacctcactgagtcatcagtaccctcctattcagctccccaagatgatgtgtttttgcttaccctaagagaggttttcttcttatttttagataattcaagtgcttagataaattatgttttctttaagtgtttatggtaaactcttttaaagaaaatttaatatgttatagctgaatctttttggtaactttaaatctttatcatagactctgtacatatgttcaaattagctgcttgcctgatgtgtgtatcatcggtgggatgacagaacaaacatatttatgatcatgaataatgtgctttgtaaaaagatttcaagttattaggaagcatactctgttttttaatcatgtataatattccatgatacttttatagaccattctggcttcggaaagtctagaagcatatttcttcaaataaaggtgtttaaccttt

SEQ ID NO: 183633 - DNA, 961 bp, Homo Sapiens
ttggcacttcgcagaccgtcgctaatgaatcttggggccggtgtcgggccggggcggcttgatcggcaactaggaaaccccaggcgcagaggccaggagcgagggcagcgaggatcagaggccaggccttcccggctgccggcgctcctcggaggtcagggcagatgaggaacatgactctcccccttcggaggaggaaggaagtcccgctgccaccttatctctgctcctctgcctcctccctgttcccagagctttttctctagagaagattttgaaggcggcttttgtgctgacggccacccaccatcatctaaagaagataaacttggcaaatgacgtgcaggttcttcaaggcagaataattgcagaaaatcttcaaaggaccctatctgcagatgttctgaatacctctgagaatagagattgattattcaaccaggatacctaattcaagaactccagaaatcaggagacggagacattttgtcagttttgcaacattggaccaaatacaatgaagtattcttgctgtgctctggttttggctgtcctgggcacagaattgctgggaagcctctgttcgactgtcagatccccgaggttcagaggacggatacagcaggaacgaaaaaacatccgacccaacattattcttgtgcttaccgatgatcaagatgtggagctggggtccctgcaagtcatgaacaaaacgagaaagattatggaacatggggggggccaccttcatcaatgcctttgtgactacacccatgtgctgcccgtcacggtcctccatgctcaccgggaagtatgtgcacaatcacaatgtctacaccaacaacgagaactgctcttccccctcgtggcaagccatgcatgagcctcggacttttgctgtatatcttaacaacactggctacagaacagccttttttggaaaatacctcaatgaatataa

SEQ ID NO: 183634 - DNA, 1368 bp, Homo Sapiens
atgagccactgcacccaacccctggaaaactaaatttttaagtgcttatttttatagaagtttgaaaatttaatgcaggcaggtgtgtaataaattatttttgaattgaacattaaaattctgcttcttaaagtcagcactcaacttggacatgttgaaattagaatctattcttgtatttgatagacaaaatatgtgggaaagattttttgcatgacttttctctcattttattcttccataatgtatttctactataaaatagaatcaacttgggttatatttgtcatttactttgttctgttagattttttcagttgtttttggaaaaattctagaaatcaggatgaaaaatgcagcttttccagggttgctggactgggggttttatttgggcctccttattataatttgtcactacttataaaaaacattctgttgcaaacagtggtgttgcattgaattgaactttggcaatgagaacacagcacacagctcccttttcaaaaagggtctcaaccccagtgtgtatttttgtacatcaacatttagaatacttatggcagataagtaaggcatgtcactgtgtccttcagtaacctctctcagtaactggtttctttatccctaacatgaattcatttctcctttgaagtcatttattattttataaattgagaacaaccacaccaccaaatgtcacaccttcttataaagtgtgaacaaggaaggtcatgtttttgtgggtattttgtcagacttagaggtttcatttcagggcatagtcaaaggcatcatcctcccaactacccacttgattatgtatttcagatccctccgtgggggccttcttctgacagagaattctttgaggtacgcagtagtgcttttgtcagcacagactgctaatctacatcttgctgcgttctgtttgctgaggttgggcttattcatttaacacgtaccaaccattatccagaggcaccatggagagttagtcatggaataaagcactgtccttgcagatgaaaaaagtctccagagcagacttctgacaggaaaggtttagatgctggagagttgaagaggtgtaagaagagatcgtgccctcatttttcacttatttttttggttattcatttataataaaaggttggcattgatatggtacaacctgcaaattacttgcagttctgagtttcagataaaacattataaaacattaaattcaatacatactgctcctttgaaatttgggtaaaaaattgtacaaccgtatatatagtcatttttgtatttttctatgttgtgaaaaccaaaattgtaattttataagtctttgattcactaaaattatatacttaaatg

SEQ ID NO: 183635 - DNA, 1474 bp, Homo Sapiens
ttgggagagagactgtgccagtcccagccgccctaccgccgtgggaacgatggcagatgatcagggctgtattgaagagcagggggttgaggattcagcaaatgaagattcagtggatgctaagccagaccggtcctcgtttgtaccgtccctcttcagtaagaagaagaaaaatgtcaccatgcgatccatcaagaccacccgggaccgagtgcctacatatcagtacaacatgaattttgaaaagctgggcaaatgcatcataataaacaacaagaactttgataaagtgacaggtatgggcgttcgaaacggaacagacaaagatgccgaggcgctcttcaagtgcttccgaagcctgggttttgacgtgattgtctataatgactgctcttgtgccaagatgcaagatctgcttaaaaaagcttctgaagaggaccatacaaatgccgcctgcttcgcctgcatcctcttaagccatggagaagaaaatgtaatttatgggaaagatggtgtcacaccaataaaggatttgacagcccactttaggggggatagatgcaaaacccttttagagaaacccaaactcttcttcattcaggcttgccgagggaccgagcttgatgatggcatccaggccgactcggggcccatcaatgacacagatgctaatcctcgatacaagatcccagtggaagctgacttcctcttcgcctattccacggttccaggctattactcgtggaggagcccaggaagaggctcctggtttgtgcaagccctctgctccatcctggaggagcacggaaaagacctggaaatcatgcagatcctcaccagggtgaatgacagagttgccaggcactttgagtctcagtctgatgacccacacttccatgagaagaagcagatcccctgtgtggtctccatgctcaccaaggaactctacttcagtcaatagccatatcaggggtacattctagctgagaagcaatgggtcactcattaatgaatcacatttttttatgctcttgaaatattcagaaattctccaggattttaatttcaggaaaatgtattgattcaacagggaagaaactttctggtgctgtcttttgttctctgaattttcagagactttttttataatgttattcatttggtgactgtgtaactttctcttaagattaattttctctttgtatgtctgttaccttgttaatagacttaatacatgcaacagaagtgacttctggagaaagctcatggctgtgtccactgcaattggtggtaacagtggtagagtcatgtttgcacttggcaaaaagaatcccaatgtttgacaaaacacagccaaggggatatttactgctctttattgcagaatgtgggtattgagtgtgatttgaatgatttttcattggcttagggcagattttcatgcaaaagttctcatatgagttagaggagaaaa

SEQ ID NO: 183636 - DNA, 1007 bp, Homo Sapiens
tacaaaaaagttggcctccatgcgcagtcatgagtcgcttcaagtttatcgatattggtatcaacttgactgaccctatgttcagaggaatttataggggggttcaaaagcatcaagatgacttacaggatgtaatagggagagctgtcgagattggtgttaaaaagtttatgattacaggtggaaatctacaagacagtaaagatgcactgcatttggcacaaacaaatggtatgtttttcagtacagttggatgtcatcctacaagatgtggtgaatttgaaaagaataaccctgatctttacttaaaggagttgctaaatcttgctgaaaacaataaagggaaagttgtggcaataggagaatgcggacttgattttgaccgactgcagttttgtcccaaagatactcaactcaaatattttgaaaaacagtttgaactgtcagaacaaacaaaattaccaatgtttcttcattgtcgaaactcacatgctgaatttttggacataatgaaaagaaatagagatcggtgtgtagggggagtggtgcattcatttgatggtaccaaggaagcagcagctgctttgattgacttggatctttatataggatttaatggttgctcactgaaaactgaagctaatttggaagttttgaagtcaattcctagtgaaaaattaatgattgagacagatgcaccttggtgtggagtcaaaagtacacatgctggatcaaaatatataagaactgcatttcctaccaaaaagaagtgggaaagtgggcactgcttaaaagacagaaatgaaccctgccatataattcaaatattggagataatgtcagcagtgagagatgaggatccactggaattagccaatacactatataacaatactattaaagtattttttcctggaatataattggtatatgtcttccactttccatcatgtatggaaaatttccatagtaaaacttcctgatagtttcaataagaaattatctgc

SEQ ID NO: 183637 - DNA, 1583 bp, Homo Sapiens
ttggaggacctagacacatgcagaaaggcagagtggaaactagcagagttgttcacatcatggattttcaacgagggaaaaacttgagataccagctattacagctggtagaaccatttggagtcatttcaaatcatctgattctaaataaaattaatgaggcatttattgaaatggcaaccacagaggatgctcaggccgcagtggattattacacaaccacaccagcgttagtatttggcaagccagtgagagttcatttatcccagaagtataaaagaataaagaaacctgaaggaaagccagatcagaagtttgatcaaaagcaagagcttggacgtgtgatacatctcagcaatttgccgcattctggctattctgatagtgctgttctcaagcttgctgagccttatgggaaaataaagaattacatattgatgaggatgaaaagtcaggcttttattgagatggagacaagagaagatgcaatggcaatggttgaccattgtttgaaaaaagccctttggtttcaggggagatgtgtgaaggttgacctgtctgagaaatataaaaaactggttctgaggattccaaacagaggcattgatttactgaaaaaagataaatcccgaaaaagatcttactctccagatggcaaagaatctccaagtgataagaaatccaaaactgatggttcccagaagactgagagttcaaccgaaggtaaagaacaagaagagaagtccggtgaagatggtgagaaagacacaaaggatgaccagacagagcaggaacctaatatgcttcttgaatctgaagatgagctacttgtagatgaagaagaagcagcagcactgctagaaagtggcagttcagtgggagacgagaccgatcttgctaatttaggtgatgtggcttctgatgggaaaaaggaaccatcagataaagctgtgaaaaaagatggaagtgcttcagcagcagcaaagaaaaagcttaaaaagcgtcgttttccagggagtatggaaggttttgtcactctagatgaggttggtgatgaggaagattcggaacttcagaaacttcgtaaatcgggcatggcatttaaatctggtgacaaaaatgatgatggtttggttgaaattaaggtggacaagatcgaggaacttgatcaagaaaacgaagcagcgttggaaaatggaattaaaaatgaggaaaacacagaaccaggtgctgaatcttctgagaacgctgatgatcccaacaaagatacaagtgaaaacgcagatggtcaaagtgatgagaacaaggacgactatacaatcccagatgagtatagaattggaccatatcagcccaatgttcctgttggtatagactatgtgatacctaaaacagagttttactgtaagctgtgttcactcttttatacaaatgaagaagttgcaaaagaatactcattgcagcagccttcctcaattatcagaaattaaagaaatttcctgaataaaattggcagaagaaccgcagaacagaagaaggaaacttaagatgtgcaaggagatttaatgatttcaagaaaataa

SEQ ID NO: 183638 - DNA, 1618 bp, Homo Sapiens
  misc_feature (1470)..(1478): n is a, c, g, or t
ccaactttgtacaaaaaagttggcgttcttctgccaatttattcagacagaagaaggaaacttaagatgtgcaaggagatttaatgatttcaaagaaaataatggttctttgtttttaatgttaaccttttttaaatacaatactgatagttagaagaaaactattgtactcttttgttttagtggagaaataatagatgtctgttcatgtgttaagtgttatagcaaaaaaaatacacatatggttaagttaatgaatagtttttgttttatcagaatggcaacagacagaagtactttgtagagattgacttcctaagctacttaagacaacttgcaccactaagaaaaaaatgtagaaccatttggaaaaatgaaatttagtagttccaagtttcaaagaaatgtcaacattttattccattcaataaagaacaaaaccaatagtgtttttattactttcatctgaaacattccatgttttaatctgagccttgcagactttcatttggagtttgaacccgttttggttgcatttcatttttggagaacttaattaacgtgagattggcaattgaaatgcaggtgcagttttctgttaatgtcatgctgttgtttaggtaataagaaatattaagtaattggctttagattttgtaatttttttccctgagttcctgctagatttcgtattctagtagtcaatgtattttcagtgaaatgcaaaaatattcccattatctttgaccagtattaatttttgagatcttactgcttgtcacttgaatcccgtgattgtcatacatctctggtataagcaacatttgatttttgaagtgtgtagaccatctcttcatattttcaagatgtaattttacatttctgcatttttaaaacagtttggccataatcctagatgcacgcttctaattcatgtacctgcacatgtgacctttgtgaacagaaatttgcatgtataatttgtgtttacttgtaactttctggttatatactgcttatatctgtggattcaagttactgaagtgaataccaataaaaagaaaaccctaggccatgttaattggttatacatgtttggaatgttaaccaacgtatttgtcagttgtggtttttattcgctcttaaactttgtgcatgctttaacaatttattacttttaaatctagagtgaattctaaagactgccgctaaagatctgagttttaaaaatgttgttgctggtggatttcttgttcctgttacataactaaaagtgaggccatttgtggtttttaaaaaccttatgaattaaaaatgctacaggtgaacaaacagaagcttatgtttagagagattgatgacttaacagtacaattggaagtaatacggatgagcaagaattagttctgcagcttttcaaaataattacgtagagactcttggtatattggattatctgttgtaaacaannnnnnnnncttccctgacacagggtctcactctgtcacccagactggagtgcagtggcacagttctctgcaacctcagcctttgggctcaaatgaccctcctacctcagtctcctgagtagctgggactacaggctcatgccactata

SEQ ID NO: 183639 - DNA, 2836 bp, Homo Sapiens
  misc_feature (950)..(1119): n is a, c, g, or t
  misc_feature (1129)..(1153): n is a, c, g, or t
  misc_feature (1258)..(1303): n is a, c, g, or t
tttcttgcagcaactgtgtcacagttaaatcaaaggaccaaagactataataaaatatttttttaaagattagattttagtttacaggcatacatttcaaatcacagataaaaatctgttgacatatgcaaaatatacattttagcctgactgtctttaagtcaccttaaatataccatagccttgccttaagaattatttttcataaataaatattgggttattagtggcctcaataaatgatttttacagtcatcagacaaaaagaagtctaatctacaaacttcttagttctgtttttctgtgattattcatactacaaaaacaaaactttgaaatcagagacataataaatcctattatagtataagtactagtattttttaagtttcaaatgacctaataaatggttatggttaaagtgtaaggaaactttaaaccattgttatattactgctagagttctaaagcccaaacaataaagctgtcttgcctggaaattaatatcttcaataaactaatgaactgttttgtatcacaagataaaaacagtttcatttcaagactgaattcagagataattcatcagtactctattaattattacttaaattttgctttgtaagaagtctttatgtttccttccagggctataaaatccatttgtgtggcaaactatataataaatacatattggctagagaagacctttgaaggattttttttatcactttcacatcttcttttaaagccaaaaacattacctttttagtgttgtcctatgggaatattttctaaactacagtttttttgttaaggttattgcaatatcaagactctactagatggcagtataattaatatagctaatatcttttataaattaaattacatttaaaaagtaatcacttgagctcagtaattcaagaccaccttcggcaacatggcannnnnnnnnnnnnnnnnnnnnnnnnnnnnnnnnnnnnnnnnnnnnnnnnnnnnnnnnnnnnnnnnnnnnnnnnnnnnnnnnnnnnnnnnnnnnnnnnnnnnnnnnnnnnnnnnnnnnnnnnnnnnnnnnnnnnnnnnnnnnnnnnnnnnnnnnnnnnnnnnnnnnnnnnncctgatctcnnnnnnnnnnnnnnnnnnnnnnnnncaagtaatatttaagatattcatttagaaaaaattattttcaagcctgaaccatgttttaagtatatgtatataataaagtaaacaaatacaggttttcaaactnnnnnnnnnnnnnnnnnnnnnnnnnnnnnnnnnnnnnnnnnnnnnnaaaatttcgtaagagtggattttgcttaaattaacatttagggaacatttcagatcatttattaatggattctctgaattacattacaaaaagacactttagttcattaatatataaaaagagatttcttaccgattctagcagcaatgacgcctgcaaacagcagactgacagagattatgggcacagattcaggacttgtctccgggacaatattagcagaattagacccattagacatgtatatttcagttgtaatttcaggtatcttggtaggtgtaattgactctccttgaatgaaccttgatcggatatcttcaaaaggagaaacggacaagtccagggggcttccaggcatgaatacagagatcacacacaagatcaaacaggaaagctgtgccaatcctgagatcagacctgtccgaaccaaaccacattttcgacgtagccaagtaaaagctacagttcccattattccagttatagctgatgctcccatcaaaatactgaggatggaaccactcagtccctgagtgtaggcgtaccctgtggtgatgcagtcaaagcccaggacagtcatataaaggaaagcaagacccatgccagccagaaacacaggctggttgtagtaggagacccatccatctcggaaggtacggaagggctcagccatctgggaggcacaagtaggctcttgctcatgttcaagctcatggatgttagagtctttcacacccattagatgagttccctccaggggttttggctcagtatctttgtgtaaattcagctgtttcaattcagtttcctcttctttaagaccagctttcacagctagagctggggttttctggtaaaccttccagagcaggacgtactccacgcacatggataccaagttccatcccgaaataaagccacagccgatgactggggagccaaatgtcataatctggccaacagccatgggggctaagatgttggttaactggtcaatccttcgtattgtggcattcatatttgctagtttgcttctgtcttctcctgcaacaacaacaatccaatccctttggattgtgattgcagtagcagtactggccaaatttgcaatatttgcaatagtgatgatcaggatatagcaggaagtgagaacccatccatggtacatggtcagaagctcatgtttatgtaagaaaaccatcatcaggatgattccacacaggatgactgaaacattctgtaccaccagcgaggtctgggccactttaagtctagcattcttgtccacccagtcaccgatgatggctcccaggaccagaacagaccctgccaccaccagcccgtagactgctgtcaaaaggaggctgtttccatagagctctaccagaaacacagacaccgcaaagtgccacatccgatctcccttaaatgaaaagagaaaatgttttgatggaatatttttcgtttctagtctattgtactcaggaagttgcttccttatcaaaagggcacttcctgggtacattatgccaa

SEQ ID NO: 183640 - DNA, 1825 bp, Homo Sapiens
  misc_feature (1409)..(1431): n is a, c, g, or t
gcccactttgtacaaaaaagttggcaatacgacctgattgaccagttaaccaacatcttagcccccatggctgttggccagattatgacatttggctccccagtcatcggctgtggctttatttcgggatggaacttggtatccatgtgcgtggagtacgtcctgctctggaaggtttaccagaaaaccccagctctagctgtgaaagctggtcttaaagaagaggaaactgaattgaaacagctgaatttacacaaagatactgagccaaaacccctggagggaactcatctaatgggtgtgaaagactctaacatccatgagcttgaacatgagcaagagcctacttgtgcctcccagatggctgagcccttccgtaccttccgagatggatgggtctcctactacaaccagcctgtgtttctggctggcatgggtcttgctttcctttatatgactgtcctgggctttgactgcatcaccacagggtacgcctacactcagggactgagtggttccatcctcagtattttgatgggagcatcagctataactggaataatgggaactgtagcttttacttggctacgtcgaaaatgtggtttggttcggacaggtctgatctcaggattggcacagctttcctgtttgatcttgtgtgtgatctctgtattcatgcctggaagccccctggacttgtccgtttctccttttgaagatatccgatcaaggttcattcaaggagagtcaattacacctaccaagatacctgaaattacaactgaaatatacatgtctaatgggtctaattctgctaatattgtcccggagacaagtcctgaatctgtgcccataatctctgtcagtctgctgtttgcaggcgtcattgctgctagaatcggtctttggtcctttgatttaactgtgacacagttgctgcaagaaaatgtaattgaatctgaaagaggcattataaatggtgtacagaactccatgaactatcttcttgatcttctgcatttcatcatggtcatcctggctccaaatcctgaagcttttggcttgctcgtattgatttcagtctcctttgtggcaatgggccacattatgtatttccgatttgcccaaaatactctgggaaacaagctctttgcttgcggtcctgatgcaaaagaagttaggaaggaaaatcaagcaaatacatctgttgtttgagacagtttaactgttgctatcctgttactagattatatagagcacatgtgcttattttgtactgcagaattccaataaatggctgggtgttttgctctgtttttaccacagctgtgccttgagaactaaaagctgtttaggaaacctaagtcagcagaaattaactgattaatttcccttatgttgaggcatgnnnnnnnnnnnnnnnnnnnnnnnctcagtttaaatacggagactataatgataacactgaattcccctatttctcatgagtagatacaatcttacgtaaaagagtggttagtcacgtgaattcagttatcatttgacagattcttatctgtactagaattcagatatgtcagttttctgcaaaactcactcttgttcaagactagctaatttatttttttgcatcttagttatttttaaaaacaaattcttcaagtatgaagagtaaattttgataactaatattatccttattgatcctattgatcttaaggtatttacatgtatgtggaaaaacaaaacacttaactagaattctctaataaggtttatggtttagcttaaagagcacctttgtatttttattatcagatggggc

SEQ ID NO: 183641 - DNA, 1682 bp, Homo Sapiens
  misc_feature (680)..(702): n is a, c, g, or t
  misc_feature (1525)..(1564): n is a, c, g, or t
aattgatgagcaatgctttaccaaaaaaaccaactttgtacaaaaaagttggctgaaatatacatgtctaatgggtctaattctgctaatattgtcccggagacaagtcctgaatctgtgcccataatctctgtcagtctgctgtttgcaggcgtcattgctgctagaatcggtctttggtcctttgatttaactgtgacacagttgctgcaagaaaatgtaattgaatctgaaagaggcattataaatggtgtacagaactccatgaactatcttcttgatcttctgcatttcatcatggtcatcctggctccaaatcctgaagcttttggcttgctcgtattgatttcagtctcctttgtggcaatgggccacattatgtatttccgatttgcccaaaatactctgggaaacaagctctttgcttgcggtcctgatgcaaaagaagttaggaaggaaaatcaagcaaatacatctgttgtttgagacagtttaactgttgctatcctgttactagattatatagagcacatgtgcttattttgtactgcagaattccaataaatggctgggtgttttgctctgtttttaccacagctgtgccttgagaactaaaagctgtttaggaaacctaagtcagcagaaattaactgattaatttcccttatgttgaggcatgnnnnnnnnnnnnnnnnnnnnnnnctcagtttaaatacggagactataatgataacactgaattcccctatttctcatgagtagatacaatcttacgtaaaagagtggttagtcacgtgaattcagttatcatttgacagattcttatctgtactagaattcagatatgtcagttttctgcaaaactcactcttgttcaagactagctaatttatttttttgcatcttagttatttttaaaaacaaattcttcaagtatgaagactaaattttgataactaatattatccttattgatcctattgatcttaaggtatttacatgtatgtggaaaaacaaaacacttaactagaattctctaataaggtttatggtttagcttaaagagcacctttgtatttttattatcagatggggcaacatattgtatgaagcatatgtagcacttcacagcatggttatcatgtaagctgcaggtagaagcaaagctgtaaagtagatttatcacacaatgactgcatacagacttcaaatatgtcaatagtttggtcatagaacctagaagccaaaagccacacagaagggcaagaatcccaatttaactcatgttatcatcattagtgatctgtgttgtagaacatgagggtgtaagccttcagcctggcaagttacatgtagaaagcccacacttgtgaaggttttgttttacaaatcacttgatttaacacactcaggtagaatatttttatttttactgttttatacccagaagttatttctacattgttctacagcaagaatattcataaaagtatccctttcaaatgcctttgagaagaatagaagnnnnnnnnnnnnnnnnnnnnnnnnnnnnnnnnnnnnnnnngtcagtttgcaacatgtctgtaccaagatggtactttgccttaccgtttatatgcactttcatggagactgcaatacgttgctatgagcactttctttatccttggagtttaatcctt

SEQ ID NO: 183642 - DNA, 1202 bp, Homo Sapiens
  misc_feature (110)..(132): n is a, c, g, or t
ttgggttttgctctgtttttaccacagctgtgccttgagaactaaaagctgtttaggaaacctaagtcagcagaaattaactgattaatttcccttatgttgaggcatgnnnnnnnnnnnnnnnnnnnnnnnctcagtttaaatacggagactataatgataacactgaattcccctatttctcatgagtagatacaatcttacgtaaaagagtggttagtcacgtgaattcagttatcatttgacagattcttatctgtactagaattcagatatgtcagttttctgcaaaactcactcttgttcaagactagctaatttatttttttgcatcttagttatttttaaaaacaaattcttcaagtatgaagactaaattttgataactaatattatccttattgatcctattgatcttaaggtatttacatgtatgtggaaaaacaaaacacttaactagaattctctaataaggtttatggtttagcttaaagagcacctttgtatttttattatcagatggggcaacatattgtatgaagcatatgtagcacttcacagcatggttatcatgtaagctgcaggtagaagcaaagctgtaaagtagatttatcacacaatgactgcatacagacttcaaatatgtcaatagtttggtcatagaacctagaagccaaaagccacacagaagggcaagaatcccaatttaactcatgttatcatcattagtgatctgtgttgtagaacatgagggtgtaagccttcagcctggcaagttacatgtagaaagcccacacttgtgaaggttttgttttacaaatcacttgatttaacacactcaggtagaatatttttatttttactgttttatacccagaagttatttctacattgttctacagcaagaatattcataaaagtatccctttcaaatgcctttgagaagaatagaagaaaaaaagtttgtatatattttaaaaaattgttttaaaagtcagtttgcaacatgtctgtaccaagatggtactttgccttaaccgtttatatgcactttcatggagactgcaatacgttgctatgagcactttctttatccttggagtttaatcctttgcttcatctttctacagtatgacataatgatttgctatgttgtaaaatctttgtaaaaaatttctatataaaaatattttgaaaatctt

SEQ ID NO: 183643 - DNA, 1620 bp, Homo Sapiens
ttgggacaatgagggtatgttagagaaggaaaaataggagctttttgcttatggattttagaggtccacaaatcgaaaggaaaaataaatttcttcatttctaaccctaaaataattttgttaatgagatgctgggaagaagactaccaaaaggcctcaaagctcatgcttctagaatattcagtaattctgaatagtctttgggaagtagcatttcttgggaagtagcatttcccttctcccaaataactgtttgagatcttaaaacagaaaatccagtgttaatgggctctagatcttaaactaggtgagcagcttcttacatacaaccagttccttgttaaggatccagcaggaaaaccagccataaaacatttcaacatgcagtttgggggctcccttgcttattcactgagtttaagctcttgctgcaacatagctctgtaccatctgggatgctagcagtcacagcagttagctcagatatctgagctgtctgccacacaaagcctgaggagatcatcattcttcagtttcattcattacttaatgaatgccaaattaattggcaggaagaagaaacactgtgtgatatactgaacaagcctgtgtgcatgaataaggagccactcaaaaagccaattttgagctttatttctccgttgttaacaaatctcaagaaagcctttgttacagtttagctcatgtcatttggttggttttattttctagccctttaacataggaggaaaattgtcatttcatgtataacttgtaacacagaattgaactgatactagtttccttgccttaaattaattatatgtcatcccaagggtctctgttaattctgctttgccaagcaataatgagatctgggtttggcattagaagtatttcataattttggttttttatttaggtttcctccacatctgtaaagtgattgattaaattagaggaggcgtgtagaataaatcccaatcccattgcaactggcagagctttataaatctttataaattcagttacaacaaaggagaggatcctacaccattagagccatgccatcaggtgtttgcaagtgacagctgtagtgtgttgcctcaaataataccaagttataaataataccaagtaattatcaactcactcccaaatttaataagatatcaaagtccaaaaggttacttaggagtagtcttccgtgggggaagataaatttattaaagagtcatgtactgatctttttcttgggattttttttcctttcccagaaaaaaaattattttggtgactgatcaattgtaaacaattttcttccttacttacaaatcatccgttcagaaaaataaaagtggacttcctttcctaagcattacaattagcctgggcaagaggtgttatgattgtcttattctttaagccggcttactttttggatttgtgtgaaatgtcttttgaaaagaaagtagatagtatagtattaattaactactttgtatagtcttctgcataatttagagttgaaaataatgtaacattttcctgtgacagattcctttatgcgtacatactttataaatatacatacatacacatacacatacatttttaaaa

SEQ ID NO: 183644 - DNA, 2822 bp, Homo Sapiens
ttgggataataaactcaagcagcgagtcatccagtaccttaccagtaacaaatgtggcaaatatgtggacattggagtcttagcgtctgatttacaaagagtgtacagtatagactatggtcgaagaaaaagaaatgcttttaggattcaggtagaaaaagtatttagcataattagtagtgagaaggaacttaagaatttaacagaattagaagatgaacatttggcaaaaagggcaagacaaggtgaagaggataatgagtatactgaaagctattctgatgatgattcaagtatggaagactacccagatccacagtcagcaaatcacatgaacagttccctgctgtctttatatcggaaaggaaatcctgattctgtttcaaatactcctgagatggagcaaagagaaaccacctcttcaacaccacgaataagttccaaaacaggctccattcccttgaagacccctgccaaagattctgaaggaggatggtttattgacaaaaccccaagtgtaaagaaagacagttttttcttggacctgtcatgtgagaaaagtaatcctaagaagccaataactgagatacaggattcaaaagattcttctcttttggagagtgatatgaaacggaaaggcaagctaaagaataaaggaagcaaaaggaagaaagaagatcttcaggaagtagatggagaaattgaagctgtcctacaaaagaaagctaaagccagggggttagaattccagatctccaacgtgaagtttgaagatgtgggaggcaatgatatgacattaaaagaggtctgcaagatgctcatacacatgcgtcacccggaggtgtaccaccacctgggcgtcgtgccccctcgtggagttctccttcatggaccaccaggctgtgggaagacattacttgcacatgcaattgctggggaacttgacctgccaattttgaaagtggctgctccagagattgtgtctggagtatccggagagtctgagcagaagctgagagaactatttgagcaagctgtgtcaaatgcaccatgtatcattttcattgatgaaattgatgctattacccccaaaagagaagtggcttcaaaagatatggaacgaagaattgtagcccaactcctaacctgcatggatgatctgaataatgtggctgctacagcccgggtcctagttattggagctactaatcgaccagactcgttagaccctgctttgagacgtgcgggaaggttcgaccgagaaatatgcctaggtatcccagatgaagcatccagggaaagaatacttcaaacattgtgcagaaaactgaggcttcctcaagcttttgatttctgtcacttagcacacctaactccaggctttgttggtgctgatctcatggcactgtgccgagaggcagcaatgtgtgcagtcaatagagtcttaatgaagctacaggaacagcagaagaaaaatcctgaaatggaagatttgccatctaaaggagtccaggaggaaaggctgggaactgagcccacttctgaaacacaggatgaattacaaaggctgctggggttgctaagagaccaagatcccctctcagaggagcagatgcaaggactgtgcattgaactgaatgatttcattgttgctctatcctcagtccaaccctctgccaaaagggaaggctttgtcactgtccctaatgtgacatgggcagatattggtgccctggaagacattagagaggagctcaccatggcaatattggcaccagtacgcaacccagaccagttcaaagctcttggattggtgactccagctggggtcctccttgctggtcctcctggctgtgggaagactctgctggcgaaggctgttgcaaatgagtccggactaaattttatatctgtcaagggccccgaattactaaacatgtatgttggtgagagtgaacgtgctgtgcgacaagtttttcaacgagccaagaactcagcaccctgtgtgatattctttgatgaagtggatgctttatgtcctcgaagatcagaccgagagacaggggcaagtgtccgagtggtgaatcagctacttacagagatggatggtctggaagcacgccagcaggtttttattatggcagccactaacaggccagatataattgaccctgcaatcctgcgcccgggccgcctggacaaaacactgtttgtgggtttaccgccccctgcagatcgccttgccatcttaaaaactatcacaaaaaatggtaccaaaccaccactggatgcagatgtaaatttggaagcaattgctggtgaccttcgctgtgattgctatacgggcgcagatctctctgctttggcgagaagcttctatctgtgccctgagacaggaaatggcaagacagaagagtggaaatgaaaaaggtgaactcaaggttagtcataagcattttgaagaagctttcaagaaagtaagatcatctatatcaaaaaaggatcaaatcatgtatgaacgtttgcaggagtccctcagccggtgatgtctccagcagccggcttagaggagctagcccatcaagccggcagagaatcccccacacgctctgaaggacccactttcagctggacacaggcgcggcctcatgtaaacattttattttcaaatgaatgaggccaagctgaagctgaagctgaagattcttcccatctggccagccttgtgtgaaaatgccttcttcctctttaagaaaaaggacaatttttaaactgctgaaataaaatgactgttacatttttcaaataaaacttttactttg

SEQ ID NO: 183645 - DNA, 1346 bp, Homo Sapiens
  misc_feature (234)..(244): n is a, c, g, or t
  misc_feature (1263)..(1271): n is a, c, g, or t
ttggatctgtttaaattactgttgcctttcagcattagactttgagtttaataactacaaattgagactgctcacaatattaactttttttgtaggttattttgttgtttagataacttgcctccctagaggagcattcaggagataaagacctagctacatgtaatgatatgatcatttcaaaaatgtgccaagaaagcaaaattcattattgaactctaaatttctgggtgnnnnnnnnnnnaaagtagcattttctctgggtaaagggaaaggcaatgaatgattgccaacatgtaaactccctgctgcccgccttcccccagtcccctccatctaacataatacagtaaatttgtagccagttgtagaaaaagaaattgatatctttctgagtaaggtttcatgccctgtgactaagaataggtggaggaatcatggccaaatcaaatatgaattgtttagcttggtcctgttgcagttggctttctgtagtgttctgaaacaagaggacgattccattccttctcaggaacctagaaacaacaccgcttgagcaactggaatatgtttgctgcaagcagaatattttggggagaggaagagtagtttaattcaagtagtttaattgaacatattagtcattggtctgtctgggacgtgcagtgttcatagtagcaatgtatgtaccatttattttatctggttgtgtgtgatgtgtgtgtatgcctatttaatatgtacacatatattcactacatatgtatgtatgatatattcatatatacatgcagtctgcttgattatcagcaaaatggtcagcctttatcagatagtttcttcatgtggagttcatctgcatgtggcccttactctgaagcctcttcctgatctggagccacagtctgtctgtcttccagttcatctcagtcctcgagaaaggccctttaaatatgtcactttcccattttcctttaaccatgggttgtgtgagccagaaagagctttgagaaagatggctgcttccaccagggtggaggcttctaggtctgcatgatgatggggcccgtttctggccagagggtggctctgggagcagttgtgctgcgggcttgctgggggagaactctaactgttgcagaaacagagcttcatggcttgcttaaattacttagctggaatattttaaagtgtcagataatgtgatgtacaaagagagtatgccgatgcatttcattgtttttgcattatctgtatcagtannnnnnnnnggtagcccgaataatcctgaccagattgtttcttgcaactggattctggaagccttgccctttcaactggattta

SEQ ID NO: 183646 - DNA, 901 bp, Homo Sapiens
cctgccccacctcccccaccctcaaccccctttccagtttcctctcaaacctggactacacatgagtgatggcccaggggtgcccccatttcatccccacagaggcatctccccagccatctggaaggcacggggtctccaagcagctgtcatgacggccaggagacgctgagcagccaggctcacataagactaaccctcttcccaccccgctcatttgggcaaaaggaaatgaaaacatggctaccctatctcttgagtttctggtctggctccgggtggagcagtggcttctcttagtagaaggagatgctggatttgcctcccggtgggttcaggaccttgttgtgagagcgaggccgcggccccagccggggctcatggctgtcgactgtgggcatgggctcctgctccttggcggggcctgcttttctggcgctgcctttctcacctggctctgctccagccgggatgctccttgcagctttaagatccgattttggttcttctccttcacataagaaaacatgatccttgggtttgtttgggtgtgccaagcgtgaagtggcagtgaccggagacccaaaaatgtcgctggtcttccctccaggtgggttcaggtgctgtcgagtctgcacgggggttgattcgtcaaagataccacttcctttaccccctgggggatttgtcctcttgggtatgttctgaggttcttctgttggtccaaaaatattagatgccatcctattaggcctgctggaaggagtagcttcttctggacttccaaaaagattgctcgattctcctcctgggggcttcatggccctggagccggcgcggccgccctcgctatccgggacctggaaacagtgtcgaccgccgccaacttttttgtacaaag

SEQ ID NO: 183647 - DNA, 2592 bp, Homo Sapiens
actttgtacaaaaaagttggctccacccggagccagaccagaaactcaagagatagggtagccatgttttcatttccttttgcccaaatgagcggggtgggaagagggttagtcttatgtgagcctggctgctcagcgtctcctggccgtcatgacagctgcttggagacccgtgccttccagatggctgggagatgcctctgtggggatgaaatggggcacccctggccatcactcatgtgtagtccaggtttgagaggaactggaaggggggtgagggtggggaggtggggcagggcatggtccttggatcaacagcccgccagctgattggatgtctaggaatgactgaaagaaaccaaaacagcctgtccactgctgctgtgggatggaggaggcgtaagcagaaacactaacagtatattgacctcttagcagaaccgcttccattctggagatcacggctgctaaatccagcatccccacttcattttacccccagcatattgttctgtagtcttttcttgaaacatcttgattgcttttcctcggcagctttcaaaaaaccaaataataatagttatccgtcttctacttcatggaagattgttttggtgccctgaccctctgaagtgcccagttcctgccatctgaaacctcggcctgatctgatctcatgttggaatctgcctgtctttcacacagggctggtcttggtcctttacatgccagttttgcttgtgaattcttgcttttttcctctcatcagccttaagtttaggcgtttgttgttctccagtgatgtacacagttcccttcacaagtcacagttcttcccataaatgaggcccgctgacctctgcgggactttaaaaatctattcagatatttccgagtaagtggcttgttaaattcttcctgtgtctttctttattcctttattggttggtggaaagaagaggatgcttgggaaccctgggttcttaggtttggattctttaataatatctaaaaagctaaattttaaataccagctttacataaatgattgttgactctggtctgtttctgacacctttccagaaaaaagtcaattgttcaggtacaccaaagaggaagaagagctgtggaggccaccctctacaaagctttatagaacttctggatctaactcacaaacaagcttccagaagagactagagaccttaggccaggagatgaaggagttcagtagcaaagtcacacctgtccaattccctgagctttgctcactcagctaatgggatggcaaaggtggtggtgctttcatcttcaggcagaagcctctgcccatccccctcaagggctgcaggcccagttctcatgctgcccttgggtgggcatctgttaacagaggagaacgtctgggtggcggcagcagctttgctctgagtgcctacaaagctaatgcttggtgctagaaacatcatcattattaaacttcagaaaagcagcagccatgttcagtcaggctcatgctgcctcactgcttaagtgcctgcaggagccgcctgccaagctccccttcctacacctggcacactggggtctgcacaaggctttgtcaaccaaagacagcttcccccttttgattgcctgtagactttggagccaagaaacactctgtgtgactctacacacacttcaggtggtttgtgcttcaaagtcattgatgcaacttgaaaggaaacagtttaatggtggaaatgaactaccatttataacttctgtttttttattgagaaaatgattcacgaattccaaatcagattgccaggaagaaataggacgtgacggtactgggccctgtgattctcccagcccttgcagtccgctaggtgagaggaaaagctctttacttccgcccctggcagggacttctgggttatgggagaaaccagagatgggaatgaggaaaatatgaactacagcagaagcccctgggcagctgtgatggagcccctgacattactcttcttgcatctgtcctgccttctttccctctgcgaggcagtggggtgggattcagagtgcttagtctgctcactgggagaagaagagttcctgcgcatgcaagccctgctgtgtggctgtcgtttacatttgggaggtgtcctgtatgtctgtacgttggggactgcctgtatttggaagatttaaaaacctagcatcctgttctcaccctctaagctgcattgagaaatgactcgtctctgtatttgtattaagccttaacacttttcttaagtgcattcggtgccaacattttttagagctgtaccaaaacaaaaagcctgtactcacatcacaatgtcattttgataggagcgttttgttatttttacaaggcagaatggggtgtaacagttgaattaaacttagcaatcacgtgctcagagcttttgcctgtcagttgtgtgtgtcccttatagtcccttcccccacagctcttgctgaaagagtttgccttgttttgtttgttgttttgtatttagccgaggatgccaaattagtcttctcaaactttgagtaagtaaatgtgggaataagcca

SEQ ID NO: 183648 - DNA, 1176 bp, Homo Sapiens
gccccagggagcacagtggggcagtgaggagggagctatcactgcaccctccaggcaagagaagtccctgagtagctggtttccctggcccagaggcaggggtggccctgacggtcatgggttttgaaaatccaggacgtggaggttgtaagacagggcagcatagagatgctttggtggtgagacgcaggcagtacacagggctgctgaggggagtcgacgtcagcgggaaggcgtgcaggcaggccctttgacgccggtcccacagccgtacaacaccgtagtaggaggaacctgtggccagcaggtggttgccatctgtctgcaggcagtacagggtgctgtcgtggggctcctcccactccatgacacatttccggacgctggtgcggaggtcccagtagcgaacataggtgtcatagccacaggacagcagtgtgaaaggggactcatacatgacatccagcaccccagcccctgggggaaagtcactgcccaagtgtgtcatcagctgcccactgttgaggtcccagattctcaggggtgagaagtgcccgcaacaagccgtccctgtcacaaaagagctgagtaatgggctgatagcaatggaccagactcggtcttcagtctggatggtgtgtaagcactgccccagccggcctgaggccaaaggccacaccttggccgtcctgtccctggagccactcacaatgatgccccctttgcaatccacacagttcacctcctgttcatgagccgagtacttgacagtgaaggtgatgtgaatcttatgaatgccaatcttcccatcccatcccgcactaacaatatgagagttggccagcacaaagtggcaaaggtcctcatcatgcccagcaaagaatcccagaggccgacgattcaagctggcaccatacggacggaactggtaggccaggatgaaattagcttgggatatgtacagagaatcatcttctagttgcatccagggcatctgattgcatctccacttcagcagaatcccctctcggcagcgccccagtctccagttcagagacacgttcactcgttccttcactgggacactggtcatctcatgtccagacagaacagataatccaatcaatacaacttattgccaaccacagaaaatttcatgggcttagtgagtcagga

SEQ ID NO: 183649 - DNA, 4958 bp, Homo Sapiens
  misc_feature (101)..(111): n is a, c, g, or t
  misc_feature (198)..(206): n is a, c, g, or t
  misc_feature (4841)..(4849): n is a, c, g, or t
ttggtgcacttctgcctgagtgacagagtgagaccctgtttcaaaaataaaatagaataaaagcacacctaaatcaaagatcgaaaatctagtttcagacnnnnnnnnnnngcgtaagaaacttacttcaaaagaaataagtatttaaaatactttaaagtattttatttttatattgtctagtaacaaatttgagcnnnnnnnnncctttaataaaatttggtgtcttgatttttggcagttcactaaatgataagtatagtgaaggttgatttaattgcagtaattctggaaaaaatttacatgaactcactattactaaattaaaaaaaacccaaacctgttctgtaataggtttattgtgtaaaatttggggaagaggagagtataaagaaaagtcatgtctgttattccaccaataagaaactatgataaggaatttgttttatgtcttttttgaaatgaacaaggcaaagcaaaacaaaaagaaatttgcatcatgctataaacgtaatcttgaatcttctcaagactgtgagcatttctccattttttccttaatgaaagtacaaaatctaatggttgaactggattccatcatatagataagctgtaactcctctattattcggcagagttgtctagtttatttaatccttgtgtgtaagtgattgcatacatcaattgattaaagtacagctggctgtaaatggtaattttgtgtccacaaagtttatatattagccttttgtagaaattatgatatttttaaattgtgacagagggcctggctcttcaaacaaaaataatactcattatacccccactctcatccctgaaaaaagccatataggttagtttgtaagaaatattttaagatgtgactactcatcagcaaatttttctgttgataaaactggatttgaaattttaattttgtttatctagaataggtacatcttttattttcatttacttaaaacttcttgattttaatctttcagatttctttttttgctcttttaagaggacatttcgctactgattgtgatattttgttttgcagagtaacagctatccaccaatgtcagatccatacatgcctagttactatgctccatccattggatttccatattctcttggggaagcagcgtggtccacagctggagaccagcctatgccatatctgacaacctatggacaaatgagtaatggagaacatcactatataccagatggtgtatttagtcaacctggggcattaggaaatacccctccatttcttggtcaacatggatttaacttttttcctggtaatgctgatttctctacatgggggacaagtggatctcagggacaatcaacacaaagttctgcttatagtagcagttatggctatccacctagttctcttgggagagctattactgatggacaggctggatttggcaatgatactttgagtaaggtgcctggcattagcagtattgagcaaggcatgactggactgaaaattggtggtgacctgacagctgcagtgacaaaaactgtaggtacagctttgagcagcagtggtatgactagcattgcaaccaatagtgtgcccccagttagcagtgcagcacctaaaccaacctcctgggctgccattgccagaaagcctgccaaacctcaaccgaaacttaaacccaagggcaatgtgggaattgggggttctgctgtaccaccacctcctataaaacacaacatgaatattggaacttgggatgaaaaagggtcagtggtaaaggctccaccaacccaaccagttctgcctcctcaaactataatccagcagcctcagccattaattcaaccaccaccattggtgcaaagccaactgcctcaacagcagcctcaaccaccacaaccacagcagcaacaaggacctcagccacaggcccagcctcaccaagtgcagcctcaacagcagcagctgcagaatcgctgggtagctcctcgtaacaggggagcaggcttcaaccagaacaatggagcgggcagtgaaaactttggtttaggtgttgtacctgtcagtgcttcaccttctagtgtagaagtgcatcccgtgctggaaaagctaaaggccataaacaactataatcccaaagactttgattggaatctgaagaatggacgtgtgtttataattaaaagctactctgaggatgacatacatcgttccattaaatactctatctggtgtagtactgagcatggtaataagcgtttggatgcagcttaccgttccctgaatgggaaaggcccactctatttactcttcagtgtgaatggcagtggacatttttgtggagtggctgaaatgaagtctgttgtggactataatgcgtatgctggtgtctggtctcaggataagtggaagggcaaatttgaagttaaatggatctttgtcaaagatgttcccaataaccaattacggcatattcgcttagaaaataatgacaacaaaccggttaccaattcaagggacacccaagaggtacccctagaaaaagctaagcaagtgcttaaaataattgctactttcaagcataccacctcaatctttgatgactttgcacattatgaaaagcgtcaagaagaggaggaagccatgcgtagggagagaaatagaaacaaacaataaccgtatgaagatgtcctgttaaatttacaacactaacgatgtagactctggaaatgcctaataagtcaaagaagacgtattaaagctcttttctgcttaaggtgacatctttgaacactttaacacaaagttgactcttctcgtaatggttttcatcagcgcatctgcccttatactcttcaccaaacacacttgagaactgtaacttcgtcaagcactttctgtcctgaagcttttaccagtatctgctgtcttttgtaattatgcatcctagctaaggcacagaagactgaatgaatgcaaggattcattaactctttgaatttgttaaatactaacagttaaccattagaagtggttcaatgatgtaagagtcacactgcttcaactttttctttgttgtagtttttaaattgtcgatttttagctatttgacagattaaaagcaaaataatcatgccatatttagtcctggagttcaagtctaaatgttgatgtgaaaaattattgtagtaaacttttaatatggcaaagcaaccttaagctctattttagccaaatgaaacataatctgaaattatattagaacatttcccttgtcttcaaactgtttggtgtaacagaatattgatatgcagcttggtggatttcaccagttaatgcacattcttcttccctcctccccccattaatatgtatactgaaaaatgtgcatttgtctgaggaattattttgtttgctaccacttaatgaatctcaaaattttgagtaaatgtacctcagtctaatcagactttttatgacctttataactacatttaaaacccttaattcctatttctgggtgtttgcgagcctgattgctatcatgaagtaaaaatttattactctaggtattcactagctaaataaacatagttcttgtttagcaagcatatgttgttcctcagctcttttctccagcttttgcagtgtcctggcatccttaaaatactttgaaaatatggccttgatccatggattaaatcagtatctaagtgaatgtgttgatgttttattgatcagatctatataagtgggaatacagcatatatctggatattcttatagttatctttttaacatcttatttttttcattaattacatatcaacattaattttgtatcttgaagcaaattgattttgtataattaaatgtgtcaagcatctgtattaattgatttgatggcataaggttatgaaaataatgtactgccccatgtattactgttccaaaaggagaaagctatgtagaaagatacattaagggtgaaaatagcaatacagtagatttgaataccttgatgttttgcattacttcatttatgtttacatcatgtttagaaatgttttcatttactgtggtctttggtcacttcagctcaaagacctagtgatggatatttctttgaggctttcatttatataattttattttgtacaatgttttttttaaatgtgcaaatactgtattcaagtgaaaaaaatacagtatttgtagataaccatagctactacacagttcttcggtagtcccagtgtagttatatcagtgtttactgaagggaacatcaaatattaatggtatattataaaataaagactttcttaaaggaaaattgcacctattttacctttttaagagtaagccatgaaatcttgtaacatgtctcttaactatttataatgaaaagtggcatttgggtatagtcaccacagcaatgttctacatccctaagattatctaggtaggacatgtcaaagatgactgttgtcattctggaggtcctattagagaatattataaaagggtgaccttgtaggaaggatctgagtcctccccctgaggttctctttttcttggtgctttattagcaactctggatatttttataaaactagttacattataaacggtttcaaacatgtttaatttacattaggtttttatgtaagagtgtcatggaagcactcagcaagcaggctgattgcaatagactcagacatgcgaataaatgtaattgagagtctattcatggtgaggagtacatcccagtgcctttaacctggatttctaatcttaagtgaaatgggtgcagcattcctttggnnnnnnnnntctttttattttcaagtgataattttgtgtttttctcatataagttttctccagagcacccaccttctcttctttcttggtctgtcattatattgcaaaatatttttcc

SEQ ID NO: 183650 - DNA, 1007 bp, Homo Sapiens
ctttgtacaaaaaagttgggatgttttgcattacttcatttatgtttacatcatgtttagaaatgttttcatttactgtggtctttggtcacttcagctcaaagacctagtgatggatatttctttgaggctttcatttatataattttattttgtacaatgttttttttaaatgtgcaaatactgtattcaagtgaaaaaaatacagtatttgtagataaccatagctactacacagttcttcggtagtcccagtgtagttatatcagtgtttactgaagggaacatcaaaatattaatggtatattataaaataaagactttcttaaaggaaaattgcacctattttacctttttaagagtaagccatgaaatcttgtaacatgtctcttaactatttataatgaaaagtggcatttgggtatagtcaccacagcaatgttctacatccctaagattatctaggtaggacatgtcaaagatgactgttgtcattctggaggtcctattagagaatattataaaagggtgaccttgtaggaaggatctgagtcctccccctgaggttctctttttcttggtgctttattagcaactctggatatttttataaaactagttacattataaacggtttcaaacatgtttaatttacattaggtttttatgtaagagtgtcatggaagcactcagcaagcaggctgattgcaatagactcagacatgcgaataaatgtaattgagagtctattcatggtgaggagtacatcccagtgcctttaacctggatttctaatcttaagtgaaatgggtgcagcattcctttggaaaaaaaatctttttattttcaagtgataattttgtgtttttctcatataagttttctccagagcacccaccttctcttccttcttggtctgtcattatattgcaaaatatttttcctctgaatgaaattatcacacgttgtctcaagcacaaccaactgaatgtctcttactgtgggga

SEQ ID NO: 183651 - DNA, 987 bp, Homo Sapiens
aagccaactttgtacaaaaaagttggattttagccaaatgaaacataatctgaaattatattagaacatttcccttgtcttcaaactgtttggtgtaacagaatattgatatgcagcttggtggatttcaccagttaatgcacattcttcttccctcctccccccattaatatgtatactgaaaaatgtgcatttgtctgaggaattattttgtttgctaccacttaatgaatctcaaaattttgagtaaatgtacctcagtctaatcagactttttatgacctttataactacatttaaaacccttaattcctatttctgggtgtttgcgagcctgattgctatcatgaagtaaaaatttattactctaggtattcactagctaaataaacatagttcttgtttagcaagcatatgttgttcctcagctcttttctccagcttttgcagtgtcctggcatccttaaaatactttgaaaatatggccttgatccatggattaaatcagtatctaagtgaatgtgttgatgttttattgatcagatctatataagtgggaatacagcatatatctggatattcttatagttatctttttaacatcttatttttttcattaattacatatcaacattaattttgtatcttgaagcaaattgattttgtataattaaatgtgtcaagcatctgtattaattgatttgatggcataaggttatgaaaataatgtactgccccatgtattactgttccaaaaggagaaagctatgtagaaagatacattaagggtgaaaatagcaatacagtagatttgaataccttgatgttttgcattacttcatttatgtttacatcatgtttagaaatgttttcatttactgtggtctttggtcacttcagctcaagacctagtgatggatatttctttgaggctttcatttatataattttattttgtacaatgtttttttaaatgtgcaaatactg

SEQ ID NO: 183652 - DNA, 1191 bp, Homo Sapiens
  misc_feature (277)..(285): n is a, c, g, or t
ttggcttgaacttcaacctttttgttctaaaaattcagggatatttcagctcatgctctccctatgccaacatgtcacctgtgtttatgtaaaattgttgtaggttaataaatatattctttgtcagggatttaacccttttattttgaatcccttctattttacttgtacatgtgctgatgtaactaaaactaattttgtaaatctgttggctctttttattgtaaagaaaagcattttaaaagtttgaggaatcttttgactgtttcaagcaggnnnnnnnnnttacatgaaaatagaatgcactgagttgataaagggaaaaattgtaaggcaggagtttggcaagtggctgttggccagagacttacttgtaactctctaaatgaagtttttttgatcctgtaatcactgaaggtacatactccatgtggacttcccttaaacaggcaaacacctacaggtatggtgtgcaacagattgtacaattacattttggcctaaatacatttttgcttactagtatttaaaataaattcttaatcagaggaggcctttgggttttattggtcaaatctttgtaagctggcttttgtctttttaaaaaatttcttgaatttgtggttgtgtccaatttgcaaacatttccaaaaatgtttgctttgcttacaaaccacatgattttaatgttttttgtataccataatatctagccccaaacatttgattactacatgtgcattggtgattttgatcatccattcttaatatttgatttctgtgtcacctactgtcatttgttaaactgctggccaacaagaacaggaagtatagtttggggggttggggagagtttacataaggaagagaagaaattgagtggcatattgtaaatatcagatctataattgtaaatataaaacctgcctcagttagaatgaatggaaagcagatctacaatttgctaatataggaatatcaggttgactatatagccatacttgaaaatgcttctgagtggtgtcaactttacttgaatgaatttttcatcttgattgacgcacagtgatgtacagttcacttctgaagctagtggttaacttgtgtaggaaacttttgcattttgacactaacataacttctgtgtgcatttttctatgcttttttaaaaactagtttcatttcattttc

SEQ ID NO: 183653 - DNA, 1550 bp, Homo Sapiens
  misc_feature (570)..(607): n is a, c, g, or t
  misc_feature (810)..(819): n is a, c, g, or t
  misc_feature (1132)..(1140): n is a, c, g, or t
ttggcacagccagttaaatccaccatggggcttactggattcaagggaatacgttagtccacaaaacatgttttctggtgctcatctcacatgctatactgtaaaacagttttatacaaaattgtatgacaagttcattgctcaaaaatgtacagttttaagaattttctattaactgcaggtaataattagctgcatgctgcagactcaacaaagctagttcactgaagcctatgctattttatggatcataggctcttcagagaactgaatggcagtctgcctttgtgttgataattatgtacattgtgacgttgtcatttcttagcttaagtgtcctctttaacaagaggattgagcagactgatgcctgcataagatgaataaacagggttagttccatgtgaatctgtcagttaaaaagaaacaaaaacaggcagctggtttgctgtggtggttttaaatcattaatttgtataaagaagtgaaagagttgtatagtaaattaaattgtaaacaaaacttttttaatgcaatgctttagtattttagtactgtaaaaaaattaannnnnnnnnnnnnnnnnnnnnnnnnnnnnnnnnnnnnngagtttgaagcagaattcacatcatgatggtgctactcagcctgctacaaatatatcataatgtgagctaagaattcattaaatgtttgagtgatgttcctacttgtcatatacctcaacactagtttggcaataggatattgaactgagagtgaaagcattgtgtaccatcatttttttccaagtccttttttttattgttnnnnnnnnnngcataccttttttcaatacttgatttcttagcaagtataacttgaacttcaacctttttgttctaaaaattcagggatatttcagctcatgctctccctatgccaacatgtcacctgtgtttatgtaaaattgttgtaggttaataaatatattctttgtcagggatttaacccttttattttgaatcccttctattttacttgtacatgtgctgatgtaactaaaactaattttgtaaatctgttggctctttttattgtaaagaaaagcattttaaaagtttgaggaatcttttgactgtttcaagcaggnnnnnnnnnttacatgaaaatagaatgcactgagttgataaagggaaaaattgtaaggcaggagtttggcaagtggctgttggccagagacttacttgtaactctctaaatgaagtttttttgatcctgtaatcactgaaggtacatactccatgtggacttcccttaaacaggcaaacacctacaggtatggtgtgcaacagattgtacaattacattttggcctaaatacatttttgcttactagtatttaaaataaattcttaatcagaggaggcctttgggttttattggtcaaatctttgtaagctggcttttgtctttttaaaaaatttcttgaatttgtggttgtgtccaatttgcaaacatttccaaaaatgtttgctttgcttacaaaccacatgattttaatgtttttt

SEQ ID NO: 183654 - DNA, 1176 bp, Homo Sapiens
  misc_feature (135)..(190): n is a, c, g, or t
  misc_feature (962)..(1003): n is a, c, g, or t
ttggtaggggtaccttttcattcaagtttttatcataattacctattcttacacaagcttagtttttaaaatgtggacattttaaaggcctctggattttgctcatccagtgaagtccttgtaggacaataaacnnnnnnnnnnnnnnnnnnnnnnnnnnnnnnnnnnnnnnnnnnnnnnnnnnnnnnnnaaatattttaaatggtgttttagaagcactttgtctacctaagctttgacaacttgaacaatgctaaggtactgagatgtttaaaaaacaagtttactttcattttagaatgcaaagttgatttttttaaggaaacaaagaaagcttttaaaatatttttgcttttagccatgcatctgctgatgagcaattgtgtccatttttaacacagccagttaaatccaccatggggcttactggattcaagggaatacgttagtccacaaaacatgttttctggtgctcatctcacatgctatactgtaaaacagttttatacaaaattgtatgacaagttcattgctcaaaaatgtacagttttaagaattttctattaactgcaggtaataattagctgcatgctgcagactcaacaaagctagttcactgaagcctatgctattttatggatcataggctcttcagagaactgaatggcagtctgcctttgtgttgataattatgtacattgtgacgttgtcatttcttagcttaagtgtcctctttaacaagaggattgagcagactgatgcctgcataagatgaataaacagggttagttccatgtgaatctgtcagttaaaaagaaacaaaaacaggcagctggtttgctgtggtggttttaaatcattaatttgtataaagaagtgaaagagttgtatagtaaattaaattgtaaacaaaacttttttaatgcaatgctttagtattttagtactgtaaaaaaattaannnnnnnnnnnnnnnnnnnnnnnnnnnnnnnnnnnnnnnnnngagtttgaagcagaattcacatcatgatggtgctactcagcctgctacaaatatatcataatgtgagctaagaattcattaaatgtttgagtgatgttcctacttgtcatatacctcaacactagtttggcaataggatattgaactgagagtgaaagcattgtgtaccatca

SEQ ID NO: 183655 - DNA, 841 bp, Homo Sapiens
actttgtacaaaaaagttgggtacctgtgaaatcggtggtaataatttgattctttattctattttgattgtagctccttttgtaaggagcatttgtaaaatttagttgctttagagttatacaaatccttttattaccatttattaactgtttgttgttttaggacctgatcccaaccttgaagaaagtcctaaaagaaaaaatattacatatgaggaattaaggaataagaacagagagtcatatgaagtatctttaacacaaaagactgacccctcagtcaggcctatgcatgaaagagtgccaaaaaaagaagtcaaagtaaacaattatggagatacttgggatgagtgaaaaattacatcattggacatgaaggagtttcaacatccagcttcatctaggtggtcatgattacctgcatgctttgagctcagcagcagtcttcataaacacatttaaaacaagatcctgggtttttgtggtttgacttctatggtgttttaaaaaaacacagatttttagtgttaatattgtgtaaatgtactcaccttagggattcatttgaatgatggtattataccatgattgtatacagtttgtgaaattgttgcaagggcaaagataactcttaaaaaaccgtcgagattacaatgctctagaatcagcatataagaaaataaatgatatctgcatgttgaattgggggtggatgggggggagcaagcataattttttaagtgtgaagctttgcatcaagaaattattaaaaagcttttttttctccagtattttctgtattatcttaatgtttatggcaataaaatgtaaaggagcatg

SEQ ID NO: 183656 - DNA, 1414 bp, Homo Sapiens
  misc_feature (962)..(977): n is a, c, g, or t
ttggagaaaaagggtctaatatcagagataatcactgctgcatcttacagttcagtcaaaatgaggcttcagctctgcactgtaaagccagagggcactgttgctgcctttccaagcagctgtttttctggggctgctgcatgacgtcatagcagaagaaaaaaacacgaagaaaactatttcaaaataaatgtttaatataatttttagaccaaagaaaaactcaatcatacattgtctccagtggaccatatgtgccagaacaggaccaactcagtccagctttgaaggccctgattcagtcctactggtataatctcccttgatttattgatttgtgtatgctgcttatgcaatacaaggtgcattttactcttgaagtccctatcacctccaccatcgccatttaactgcaaaagcatgcttcctaatgggagggttttcttcccccttccctgcagaggttctgaaccttcaaggagtttgacaatcttatgaatctcttgaaccttctccccagaaaaatgtacatacaagtctacaaataatttcatggggttcatggaccccaaggcccacaatggtttctaaggccccaaattaaggaacctctgtgctagtgatttgagcaacgcaattgccctcagaagacactgacacagggcaggtgaaggactgggttaaccaaaatgacaggaggcaatctcataatttctgtttttattttggggcaaaatttagttctcagggcctccctacgtttaagagcagaactactcaagaacctaagcagctatcagcatagtttaagcgatttagaatagggctgtgcaaggggatgtacagggttcctcattcagctgaggacctcatttagctccttaactggaagctttacatttgatctgcagtgaggggacatttctaattttagtttgacccacatggaaaggtggatagcnnnnnnnnnnnnnnnnggtatagagagcacgtagaattggacaattaggtaaatccttggaatcccccaaacagccatttgctttataaatccagtatttcttacctctgaacgtcttaaagagctgcctcacaaattaatctaaccattgcttgcactaagaagtttgccaagagcctcttccagccttactggggggaaggaagagattactgaaaaccaacttgtaggaatgaaatgaggctgtcagttgtctaacctaacaaactgccaaattaggtttacattttttgttattagacttttgaatggccgaggcagagttaaatttaaaattttggattgtagccactttccactcgcctaaacactcaataccggtttgtttatttttccagcatcaagaaagaaaaccaaggcactagaaagcaagcacacttaagtattgaccaa

SEQ ID NO: 183657 - DNA, 2990 bp, Homo Sapiens
  misc_feature (502)..(526): n is a, c, g, or t
  misc_feature (1890)..(1920): n is a, c, g, or t
  misc_feature (2715)..(2729): n is a, c, g, or t
aactgagcagagcagagcatcgagccaaaggggagatgagtttgtctgtcctctgctgaggctacggccgggcctagggaactgggagcttgggtggaagcgacacccgtggaagtgggaggaggtggcgccgggactttaaccccttgtgggctctgcggcaggggatttaaccctttgtggatctggcccctcggaggcagcgtcatcggtagttttaaccccttcggggctgggtttcacgcactggacttaccctcatcaccttgctcaccaactcctttattggggtgctccgcttggaggtttgaggcccacctccgcccattacgtactgttcctgccgctgcacccccttggacccgctagctggccgcactgtgggcgcttaaccctttactgacttgagctccccagattgcagttggagtttgctgatagaaggactagctaaaggcgtcactgcaggaattacaaactgaagaggactctgttggactgnnnnnnnnnnnnnnnnnnnnnnnnnaagaaaaacccatttttttccttaaggacttactagccaaaatttcttaaacttcgaggactctactagccatggccgagccattcttgtcagaatatcaacaccagcctcaaactagcaactgtacaggtgctgctgctgtccaggaagagctgaaccctgagcgccccccaggcgcggaggagcgggtgcccgaggaggacagtaggtggcaatcgagagcgttcccccagttgggtggccgtccggggccggagggggaagggagcctggaatcccaaccacctcccttgcagacccaggcctgtccagaatctagctgcctgagagagggcgagaagggccagaatggggacgactcgtccgctggcggcgacttcccgccgccggcagaagtggagccgacgcccgaggccgagctgctcgcccagccttgtcatgactccgaggccagtaagttgggggctcctgccgcagggggcgaagaggagtggggacagcagcagagacagctggggaagaaaaaacataggagacgcccgtccaagaagaagcggcattggaaaccgtactacaagctgacctgggaagagaagaaaaagttcgacgagaaacagagccttcgagcttcaaggatccgagccgagatgttcgccaagggccagccggtcgcgccctataacaccacgcagttcctcatggatgatcacgaccaggaggagccggacctcaaaaccggcctgtactccaagcgggccgccgccaaatccgacgacaccagcgatgacgacttcatggaagaagggggtgaggaggatgggggcagcgatgggatgggaggggacggcagcgagtttctgcagcgggacttctcggagacgtacgagcggtaccacacggagagcctgcagaacatgagctagcaggagctcatcaaggagtacctggaactggagaagtgcctctcgcgcatggaggacgagaacaaccgggctgcggctggagagcaagcggctgggtggcgacgacgcgcgtgtgcgggagctggagctggagctggaccggctgcgcgccgagaacctccagctgctgaccgagaacgaactgcaccggcagcaggagcgagcgccgctttccaagtttggagactagactgaaacttttttggggggagggggcaaaggggactttttacagtgatggaatgtaacattatatacatgtgtatataagacagtggacctttttatgacacataatcagaagagaaatccccctggctttggttggtttcgtaaatttagctatatgtagcttgcgtgctttctcctgttcttttaattatgtgaaactgaagagttgcnnnnnnnnnnnnnnnnnnnnnnnnnnnnnnnccttaatgtgaaagtaatttgaccaagttataatgcatttttgtttttaacaaatcccctccttaaacggagctataaggtggccaaatctgagaacaattaaattcattttagttataataaatttaatatttgtaaatgtaacatagtttcagtgtgatttctagagctaattcaaaatagtattgatatattttatgtgactgcatttttggggaggggtaccgaaatcgttaaatttgtcagtttgcaaaaatatcaatctttaatgggagaattttcaatttgccaattttttccttgaatgggtttaagtatgctacaatatacagttcaggcaaaatttaagatgtaattatcttcaatacttaagtgtgcttgctttctagtgccttggttttctttcttgatgctggaaaaataaacaaaccggtattgagtgtttaggcgagtggaaagtggctacaatccaaaattttaaatttaactctgcctcggccattcaaaagtctaataacaaaaaatgtaaacctaatttggcagtttgttaggttagacaactgacagcctcatttcattcctacaagttggttttcagtaatctcttccttccccccagtaaggctggaagaggctcttggcaaacttcttagtgcaagcaatggttagattaatttgtgaggcagctctttaagacgttcagaggtaagaaatactggatttataaagcaaatggctgtttgggggattccaaggatttacctaattgtccaattctacgtgctctctataccnnnnnnnnnnnnnnngctatccacctttccatgtgggtcaaactaaaattagaaatgtcccctcactgcagatcaaatgtaaagcttccagttaagagctaaatgaggtcctcagctgaatgaggaaccctgtacatccccttgcacagccctattctaaatcgcttaaactatgctgatagctgcttaagttcttgagtagttctgctcttaaacgtaagaggccctgagaactaaaattttgcccccaaaataaaacagaaattatgagattgc

SEQ ID NO: 183658 - DNA, 1889 bp, Homo Sapiens
  misc_feature (185)..(235): n is a, c, g, or t
  misc_feature (1571)..(1607): n is a, c, g, or t
  misc_feature (1754)..(1774): n is a, c, g, or t
ttggctttattgatggcttttcaggactgtgttggtatttttcatgcagtgtatttgtcagcttacatttttcagttgagctacctgatgctactgacacacatatgattttcctatcttaccaggcaaatactactgttaacgttttaatagtaagtctacttatgcacattgattttactttnnnnnnnnnnnnnnnnnnnnnnnnnnnnnnnnnnnnnnnnnnnnnnnnnnnttgtaatggcagtgaagcattttatagtttctcctccctcattggttctgaattttggtgacaggtgtatttcttaatgcagatatgaaaaacagtagctccgtatcgaatacattgacaaatggatgtgtcatcaatggacatttggacttcccctccacgaccccgctcagtgggatggaaagcaggaatggccagtgcttgacaggaactaacggaattagcagtggattagccccaggacagccgtttccgagtagccagggttctctctgcattagtgggactgaggagccagagaagaccctgagagctaaccctgagttgtgcggttctctgcacctgaacgggagtccaagtagctgcatagccagtaggccttcctgggtggaagacattggggataacctgtactatggacactaccacgggtttggggacactgctgaaagcatcccagaactgaacagtgtggtcgagcattccaagtccgtgaaggtgcaggagcggtacgacagtgccgtgctgggcaccatgcacctgcaccacggctcctagagacgctgacctggctctcggaaacgcaggagtccttcctggtagccagctcagaatacccatgtagcagcaacttgaacgaatgtcacaacttgtactttttttatatacttcaactttctgaaaaagtaaacttcgacaagttcccagcaactgcttgtttgtgcatgagtagggcttactaagtgcatagatgtttctacagtgaggtgtcctttttataaggtgcacttttggagtttttctgatgccaatctcaacattgtctttttaatactgtcaccagatattgccatttttctttttgttaaaagattatatgatcaagataaattggggtggtaaatcaggtgcctggtaatttatctctttgcacatgggcatcattttaaaaagcttgcttccactcttttctgtagaatttgacggaacacagctatttccctatgcaaggtacagccttacaaagatttctgcagtgatttgtgtgaagaagagaatgtttgtctttttcaatgaagctttgcagatcaccatgtggttgaaggttttagttgtggacacagtggtccctccttaatgatgaagatcactgccttgggcttcatggaaaacaggcccagcctggggctgcgtttggatttattgtttttattccacacttcctacttggtctctggaagttttaccacatgtaacagattcctttatatgtagtggaaatcactatttgtagaaactgtcaggtcaaaatatttaactgactgttgacatgtannnnnnnnnnnnnnnnnnnnnnnnnnnnnnnnnnnnntgctttaagatatataccactatgtatatccagttaaaggagggaattttgacttttttaataaaactgcattaagtttttgattttgtagaaattagcttttgtttaggcaattaggggttatattttgcaaatattgtaaggaannnnnnnnnnnnnnnnnnnnntaataaaaattggggcggataaaatgtcaaaggaacaaaccagggttttaagggggttattaacattttgttttaaaactgtccttcccaaatggaataaaaaactttccccctc

SEQ ID NO: 183659 - DNA, 901 bp, Homo Sapiens
ttggcgttcctttgtgctgcggcggcggcttctcgagtcctccccgacgcgtcctctaggccagcgagccccgcgctctccggtgacggaccatgtcggcggcgggagcgggcgcgggcgtagaggcgggcttctccagcgaggagctgctctcgctccgtttcccgctgcaccgcgcctgccgcgacggggacctggccacgctctgctcgctgctgcagcagacaccccacgcccacctggcctctgaggactccttctatggctggacgcccgtgcactgggccgcgcatttcggcaagttggagtgcttagtgcagttggtgagagcgggagccacactcaacgtctccaccacacggtacgcgcagacgccagcccacattgcagcctttgggggacatcctcagtgcctggtctggctgattcaagcaggagccaacattaacaaaccggattgtgagggtgaaactcccattcacaaggcagctcgctctgggagcctagaatgcatcagtgcccttgtggcgaatggggctcacgtcgacctgagaaatgccagtggcctgacagcagcagacattgcacaaacccagggtttccaagagtgtgcccagtttctcttgaacctccagaattgtcatctgaaccatttctataacaatggcatcttaaatgggggtcatcagaatgtatttcctaatcatattagtgtgggaacaaatcgaaagagatgcttggaagactcagaagactttggagtaaagaaagctagaactgaagctcaaagcttggattctgccgtgccactcacgaatggcgacacagaagacgatgctgacaaatgcacgttgatagggagtttgctgttgtaacagtgggagtggacagtttcctgtta

SEQ ID NO: 183660 - DNA, 1201 bp, Homo Sapiens
  misc_feature (1144)..(1154): n is a, c, g, or t
ttggcctgctgcagagagcacagcccttgcctggagcccaggaaccccatccttgcttcatctcagttcttcatgggcttcactcttcccactcacggaagggaggtagctcagggacctccactgtgggacccttgagacgcttccactctgattcagaaacacacttctacctctttactgttaactcttaacagatgcagtcagcagtttctgggcacttctctcagtaggtgcctcatgctgacttctccagtagggtttcaggacaaactaccaaggaattgcctcagcctcctaccagtcctccctcacccaccttctgtctaggttcacttggtttgtcatcaggaactgagcaggtccaggactcagctttctgcttcagcctaagccagtactccttgtttgaggtaaaagccttaaaatttagctccctagctcttgattagaagcaatttggagtaagtgtgttttgatttaggcagggtagcttgggatacctttttaaaaacaccagatattaaaatgtctggcaaggttagaatcagactagatgatttgcttctaaaaattagtttcagtgagtcccagggactaattaaggtttattttaaaaagtgtctaccttggtacgcagccacctcctgcatgctgtgcatgttattgggacttgtattataggtgatggtatgtgagaatccagttgggactcgctgttgccatcctctttgttgtatctggttttcatcactagactcagcaacccttctcaccttaactgccaccttccctacactctcagtttacagaggccactgggcctctggctgcagaatacaaagtcccgggctgttagaggagtcctttcctctctgcctgccctttcctgtccctccctcgaattctctctccccgtaagtgatgctggaaaagtcataggactggcaaagcaactgtttaaaccctttgtaaccggggccttgcccccacctcctgtcttttctccttgccttccccactcctgtgtcctcccatctatcctgtctttcctttcctcctctcagtgtcctcagcacccacaaggaattttcctatcactgtgaactttgctggtacagaggaataatatctgccttcaccnnnnnnnnnnnggaccatagctagccagtcatttcttaaacctcccttcctaaaatct

SEQ ID NO: 183661 - DNA, 1101 bp, Homo Sapiens
tattattttacatataattaatgatcagagagaaataacagttgctgagaacgtaaatttatgttgtactttagaattgaacagatacaaccacagattcataccaaatgcattacttttagattattaacatattcttctacataatttcatttcacatatatggagtccaaccaagatacatctggcatagtaagttttcatcagtagcttcttgtataaggtaatgcacatgtccttcaatagataacggcagtcctgtcactctatttcgagtcttgattacaccttgtagtcgctgctcaatgtcaagaacatgggtcttggccttttcattgacaacttctccagtttcattcagtggcgctttggaatgccctttcactggtttactccattccacaagaggatcatgtagaaaagtctttaagacactcattaaaggctctcgctgatcacgcatcagcctcattgtaacttcacatgctcttcgaaaaagaccctctgttcccataggacccattccattaaccatattatgagtcaggcgaaatggcacaatttctggaacttcaaaggtttctcccttattgaaaagacaattgaaatctacatgtacgcattcaccagtcaaagaatcaaagagaatattttcaccatgacggtctccaagccccagaatataaccaaccattgacattactgcagtggaacggcagtaagctgatctactactgtaccatgatgtaggatcagggaatgttctcagaaaccactcatgaaaaataggaggatgcctgggcaggagaaattctcggaatactttgagtttttcagataaagctgctgactttggtagcatacactggcgaagttcttttcctgtcatatacactcctgcaaggaagagtgatatccattaatcacatcagccaaatgaaaaaaggggcaaagttttttttgttaaaattggacaagaaacatctacttttattcaaattgttattgaaaaacaagaataaaggaacatttttcaattaagcatacataaagttactgattgtataataaaataataaaccacattatcttcccttaata

SEQ ID NO: 183662 - DNA, 1362 bp, Homo Sapiens
actttgtacaaaaaagttgggtgaggggttacttccgggtcggacggcgctagctgcagcatcggagtgtggcagtgctgggctggccggcgggctgggctgcggcccgcgcgcggccggcgatgcaggggggcaactccggggtccgcaagcgcgaagaggagggcgacggggctggggctgtggctgcgccgccggccatcgactttcccgccgagggcccggaccccgaatatgacgaatctgatgttccagcagaaatccaggtgttaaaagaacccctacaacagccaaccttcccttttgcagttgcaaaccaactcttgctggtttctttgctggagcacttgagccacgtgcatgaaccaaacccacttcgttcaagacaggtgtttaagctactttgccagacgtttatcaaaatggggctgctgtcttctttcacttgtagtgacgagtttagctcattgagactacatcacaacagagctattactcacttaatgaggtctgctaaagagagagttcgtcaggatccttgtgaggatatttctcgtatccagaaaatcagatcaagggaagtagccttggaagcacaaacttcacgttacttaaatgaatttgaagaacttgccatcttaggaaaaggtggatacggaagagtatacaaggtcaggaataaattagatggtcagtattatgcaataaaaaaaatcctgattaagggtgcaactaaaacagtttgcatgaaggtcctacgggaagtgaaggtgctggcaggtcttcagcaccccaatattgttggctatcacaccgcgtggatagaacatgttcatgtgattcagccacgagcagacagagctgccattgagttgccatctctggaagtgctctccgaccaggaagaggacagagagcaatgtggtgttaaaaatgatgaaagtagcagctcatccattatctttgctgagcccaccccagaaaaagaaaaacgctttggagaatctgacactgaaaatcagaataacaagtcggtgaagtacaccaccaatttagtcataagagaatctggtgaacttgagtcgaccctggagctccaggaaaatggcttggctggtttgtctgccagttcaattgtggaacagcagctgccactcagcgtaattcccacctagaggagagtttcacatccaccgaagaatcttccgaagaaaatgtcaactttttgggtcagacagaggcacagtaccacctgatgctgcacatccagatgcagctgtgtgagctctcgctgtgggattggatagtcgagagaacaagcggggccgggagtatgtggacgagtctgcctgtccttatgtt

SEQ ID NO: 183663 - DNA, 1610 bp, Homo Sapiens
ctttgtacaaaaaagttggctaaaacagtttgcatgaaggtcctacgggaagtgaaggtgctggcaggtcttcagcaccccaatattgttggctatcacaccgcgtggatagaacatgttcatgtgattcagccacgagacagagctgccattgagttgccatctctggaagtgctctccgaccaggaagaggacagagagcaatgtggtgttaaaaatgatgaaagtagcagctcatccattatctttgctgagcccaccccagaaaaagaaaaacgctttggagaatctgacactgaaaatcagaataacaagtcggtgaagtacaccaccaatttagtcataagagaatctggtgaacttgagtcgaccctggagctccaggaaaatggcttggctggtttgtctgccagttcaattgtggaacagcagctgccactcaggcgtaattcccacctagaggagagtttcacatccaccgaagaatcttccgaagaaaatgtcaactttttgggtcagacagaggcacagtaccacctgatgctgcacatccagatgcagctgtgtgagctctcgctgtgggattggatagtcgagagaaacaagcggggccgggagtatgtggacgagtctgcctgtccttatgttatggccaatgttgcaacaaaaatttttcaagaattggtagaaggtgtgttttacatacataacatgggaattgtgcaccgagatctgaagccaagaaatatttttcttcatggccctgatcagcaagtaaaaataggagactttggtctggcctgcacagacatcctacagaagaacacagactggaccaacagaaacgggaagagaacaccaacacatacgtccagagtgggtacttgtctgtacgcttcacccgaacagttggaaggatctgagtatgatgccaagtcagatatgtacagcttgggtgtggtcctgctagagctctttcagccgtttggaacagaaatggagcgagcagaagttctaacaggtttaagaactggtcagttgccggaatccctccgtaaaaggtgtccagtgcaagccaagtatatccagcacttaacgagaaggaactcatcgcagagaccatctgccattcagctgctgcagagtgaacttttccaaaattctggaaatgttaacctcaccctacagatgaagataatagagcaagaaaaagaaattgcagaactaaagaagcagctaaacctcctttctcaagacaaaggggtgagggatgacggaaaggatgggggcgtgggatgaaagtggacttaacttttaaggtagttaactggaatgtaaatttttaatctttattagggtatagttggtacaatgcttcgttgtatttagtaagcctttacaagactttaaagatgtcagagtgccccaagctgccgttccttcccttcctgccccacaagctccttttcctgaatttcctacctaaatattaaccatatgcctagtctctgaaactaaaaacttggacctcatcctcaattattttctcctttcaactctgttgaccctctgtctggtcttcctctagaagtaccgcagaaattgatgtg

SEQ ID NO: 183664 - DNA, 1363 bp, Homo Sapiens
ttgggtataaaaaaatttaacccatccagacactactttgatgtatcttttaaagtggtgacataaatggagttttctcctaagttgcgaattcttccagcactatttcatgttgggcagtgggcaacccaccagaacaaatcagccctcctgagaaaacctttacaagaagttagctattccttttccacatcaaagattgagtctgcttttgactttgctctgcctagataaaggtcacatacttttgatccctaatcatctattcatattttacttcccagcatagcgtgggatttccttaggtaggtatcctatgttcttttttataggatgtgaccgcgtgcctgccagaatgggaggatgggcatttttaccttgccaagtactatgacaaattgatgcccatggtcacagacaacaaaatggaaaagcaaggtgatctcatccggtatatagttcttcattttggcagatctctacaatatggaaatcagttcatatatcagtcaatgccacgaatgttaactctatggcttgattatggtacaaaggcatatgaatgggaaaaagctggccgctccgatcgtgtacaaatgaggaatgatttgggtaaaataaacaaggttatcacagagcatacaaactatttagctccatatcaatttttgactgctttttcacaattgatctctcgaatttgtcattctcacgatgaagtttttgttgtcttgatggaaataatagccaaagtatttctagcctatcctcaacaagcaatgtggatgatgacagctgtgtcaaagtcatcttatcccatgcgtgtgaacagatgcaaggaaatcctcaataaagctattcatatgaaaaaatccttagagaagtttgttggagatgcaactcgcctaacagataagcttctagaattgtgcaataaaccggttgatggaagtagttccacattaagcatgagcactcattttaaaatgcttaaaaagctggtagaagaagcaacatttagtgaaatcctcattcctctacaatcagtcatgatacctacacttccatcaattctgggtacccatgctaaccatgctagccatgaaccatttcctggacattgggcctatattgcagggtttgatgatatggtggaaattcttgcttctcttcagaaaccaaagaagatttctttaaaaggctcagatggaaagttctacatcatgatgtgtaagccaaaagatgacctgagaaaggattgtagactaatggaattcaattccttgattaataagtgcttaagaaaagatgcagagtctcgtagaagagaacttcatattcgaacatatgcagttattccact

SEQ ID NO: 183665 - DNA, 995 bp, Homo Sapiens
gagcaatgcttttttataatgccaactttgtacaaaaaagttggggtaaaataaacaaggttatcacagagcatacaaactatttagctccatatcaatttttgactgctttttcacaattgatctctcgaatttgtcattctcacgatgaagtttttgttgtcttgatggaaataatagccaaagtatttctagcctatcctcaacaagcaatgtggatgatgacagctgtgtcaaagtcatcttatcccatgcgtgtgaacagatgcaaggaaatcctcaataaagctattcatatgaaaaaatccttagagaagtttgttggagatgcaactcgcctaacagataagcttctagaattgtgcaataaaccggttgatggaagtagttccacattaagcatgagcactcattttaaaatgcttaaaaagctggtagaagaagcaacatttagtgaaatcctcattcctctacaatcagtcatgatacctacacttccatcaattctgggtacccatgctaaccatgctagccatgaaccatttcctggacattgggcctatattgcagggtttgatgatatggtggaaattcttgcttctcttcagaaaccaaagaagatttctttaaaaggctcagatggaaagttctacatcatgatgtgtaagccaaaagatgacctgagaaaggattgtagactaatggaattcaattccttgattaataagtgcttaagaaaagatgcagagtctcgtagaagagaacttcatattcgaacatatgcagttattccactaaatgatgaatgtgggattattgaatgggtgaacaacactgctggtttgagacctattctgaccaaactatataaagaaaagggagtgtatatgacaggaaaagaacttcgccagtgtatgctaccaaagtcagcagctttatctgaaaaactcaaagtattccgagaatttctcctgcccaagcatcctcctattttt

SEQ ID NO: 183666 - DNA, 1231 bp, Homo Sapiens
  misc_feature (165)..(193): n is a, c, g, or t
ttggtgcaaagaaagtgaagaaacggaatccttggtcagatgatgaatccaagtcagaaagtgatttggaagaaacagaacctgtggttattccaagagattctttgcttaggagagcagcagccgaaagacctaaatacacatttgatttctcagaagaagagnnnnnnnnnnnnnnnnnnnnnnnnnnnnncaataatgatttagaggaattgaaagttaaagcatctcccataacaaatgatggggaagatgaatttgttccttcagatgggttagataaagatgaatatacattttcaccaggcaaatcaaaagccactccagaaaaatctttgcatgacaaaaaaagtcaggattttggaaatctcttctcatttccttcatattctcagaagtcagaagatgattcagctaaatttgacagtaatgaagaagattctgcttctgttttttcaccatcatttggtctgaaacagacagataaagttccaagtaaaacggtagctgctaaaaagggaaaaccgtcttcagatacagtccctaagcccaagagagccccaaaacagaagaaagtagtagaggctgtaaactctgactcggattcagaatttggcattccaaagaagactacaacaccaaaaggtaaaggccgaggggcaaagaaaaggaaagcatctggctctgaaaatgaaggcgattataaccctggcaggaaaacatccaaaacaacaagcaagaaaccgaagaagacatcttttgatcaggattcagatgtggacatcttcccctcagacttccctactgagccaccttctctgccacgaaccggtcgggctaggaaagaagtaaaatattttgcagagtctgatgaagaagaagatgatgttgattttgcaatgtttaattaagtgcccaaagagcacaaacatttttcaacaaatatcttgtgttgtccttttgtcttctctgtctcagacttttgtacatctggcttattttaatgtgatgatgtaattgacggttttttattattgtggtaggccttttaacattttgttcttacacatacagttttatgctcttttttactcattgaaatgtcacgtactgtctgattggcttgtagaattgttatagactgccgtgcattagcacagattttaattgtcatgggttacaaactacagacctgcttttttgaaatgaaatttaaacatttaaaaatggg

SEQ ID NO: 183667 - DNA, 3278 bp, Homo Sapiens
  misc_feature (2997)..(3025): n is a, c, g, or t
ttggatgggtttttattaattgccttattgaaaatccaacttttgattctcagactaaggaaaacatgactctgcagcccaaaagttttgggtctaaatgccagctgtcagaaaaattttttaaagcagcctctaattgtggcattgtagaaagtatcctgaactgggtgaaatttaaggctcagactcagctgaataagaagtgttcatcagtaaaatacagtaaaatcaaaggtattcccaaactggatgatgctaatgatgctggtggtaaacattccctggagtgtacactgatattaacagagggagactctgccaaatcactggctgtgtctggattaggtgtgattggacgagacagatacggagtttttccactcaggggcaaaattcttaatgtacgggaagcttctcataaacagatcatggaaaatgctgaaataaataatattattaaaatagttggtctacaatataagaaaagttacgatgatgcagaatctctgaaaaccttacgctatggaaagattatgattatgaccgatcaggatcaagatggttctcacataaaaggcctgcttattaatttcatccatcacaattggccatcacttttgaagcatggttttcttgaagagttcattactcctattgtaaaggcaagcaaaaataagcaggaactttccttctacagtattcctgaatttgacgaatggaaaaaacatatagaaaaccagaaagcctggaaaataaagtactataaaggattgggtactagtacagctaaagaagcaaaggaatattttgctgatatggaaaggcatcgcatcttgtttagatatgctggtcctgaagatgatgctgccattaccttggcatttagtaagaagaagattgatgacagaaaagaatggttaacaaattttatggaagaccggagacagcgtaggctacatggcttaccagagcaatttttatatggtactgcaacaaagcatttgacttataatgatttcatcaacaaggaattgattctcttctcaaactcagacaatgaaagatctataccatctcttgttgatggctttaaacctggccagcggaaagttttatttacctgtttcaagaggaatgataaacgtgaagtaaaagttgcccagttggctggctctgttgctgagatgtcggcttatcatcatggagaacaagcattgatgatgactattgtgaatttggctcagaactttgtgggaagtaacaacattaacttgcttcagcctattggtcagtttggaactcggcttcatggtggcaaagatgctgcaagccctcgttatattttcacaatgttaagcactttagcaaggctactttttcctgctgtggatgacaacctccttaagttcctttatgatgataatcaacgtgtagagcctgagtggtatattcctataattcccatggttttaataaatggtgctgagggcattggtactggatgggcttgtaaactacccaactatgatgctagggaaattgtgaacaatgtcagacgaatgctagatggcctggatcctcatcccatgcttccaaactacaaaaactttaaaggcacgattcaagaacttggtcaaaaccagtatgcagtcagtggtgaaatatttgtagtggacagaaacacagtagaaattacagagcttccagttagaacttggacacaggtatataaagaacaggttttagaacctatgctaaatggaacagataaaacaccagcattaatttctgattataaagaatatcatactgacacaactgtgaaatttgtggtgaaaatgactgaagagaaactagcacaagcagaagctgctggactgcataaagtttttaaacttcaaactactcttacttgtaattccatggtactttttgatcatatgggatgtctgaagaaatatgaaactgtgcaagacattctgaaagaattctttgatttacgattaagttattacggtttacgtaaggagtggcttgtgggaatgttgggagcagaatctacaaagcttaacaatcaagcccgtttcattttagagaagatacaagggaaaattactatagagaataggtcaaagaaagatttgattcaaatgttagtccagagaggttatgaatctgacccagtgaaagcctggaaagaagcacaagaaaaggcagcagaagaggatgaaacacaaaaccagcatgatgatagttcctccgattcaggaactccttcaggcccagattttaattatattttaaatatgtctctgtggtctcttactaaagaaaaagttgaagaactgattaaacagagagatgcaaaagggcgagaggtcaatgatcttaaaagaaaatctccttcagatctttggaaagaggatttagcggcatttgttgaagaactggataaagtggaatctcaagaacgagaagatgttctggctggaatgtctggaaaagcaattaaaggtaaagttggcaaacctaaggtgaagaaactccagttggaagagacaatgccctcaccttatggcagaagaataattcctgaaattacagctatgaaggcagatgccagcaaaaagttgctgaagaagaagaagggtgatcttgatactgcagcagtaaaagtggaatttgatgaagaattcagtggagcaccagtagaaggtgcaggagaagaggcattgactccatcagttcctataaataaaggtcccaaacctaagagggagaagaaggagcctggtaccagagtgagaaaaacacctacatcatctggtaaacctagtgcaaagaaagtgaagaaacggaatccttggtcagatgatgaatccaagtcagaaagtgatttggaagaaacagaacctgtggttattccaagagattctttgcttaggagagcagcagccgaaagacctaaatacacatttgatttctcagaagaagagnnnnnnnnnnnnnnnnnnnnnnnnnnnnncaataatgatttagaggaattgaaagttaaagcatctcccataacaaatgatggggaagatgaatttgttccttcagatgggttagataaagatgaatatacattttcaccaggcaaatcaaaagccactccagaaaaatctttgcatgacaaaaaaagtcaggattttggaaatctcttctcatttccttcatattctcagaagtcagagatgattcagctaaatttgacagtaatgagaagattctgcttc

SEQ ID NO: 183668 - DNA, 1814 bp, Homo Sapiens
  misc_feature (263)..(291): n is a, c, g, or t
aaaaacagaagcagaatcttcttcattactgtcaaatcagctgaatcatcttctgacttctgagaataagaaggaaatgagaagagatttccaaaatctgactttttttgtcatgcaaaagatttttctggagtggctttggatttgcctggtgaaaatgtatattcatctttatctaacccatctgaaggaacaaaattcatcttccccatcatttgttatgggagatgctttaactttcaattcctctaaatcattattgnnnnnnnnnnnnnnnnnnnnnnnnnnnnnctcttcttctgagaaatcaaatgtgtatttaggtctttcggctgctgctctcctaagcaaagaatctcttggaataaccacaggttctgtttcttccaaatcactttctgacttggattcatcatctgaccaaggattccgtttcttcactttctttgcactaggtttaccagatgatgtaggtgtttttctcactctggtaccaggctccttcttctccctcttaggtttgggacctttatttataggaactgatggagtcaatgcctcttctcctgcaccttctactggtgctccactgaattcttcatcaaattccacttttactgctgcagtatcaagatcacccttcttcttcttcagcaactttttgctggcatctgccttcatagctgtaatttcaggaattattcttctgccataaggtgagggcattgtctcttccaactggagtttcttcaccttaggtttgccaactttacctttaattgcttttccagacattccagccagaacatcttctcgttcttgagattccactttatccagttcttcaacaaatgccgctaaatcctctttccaaagatctgaaggagattttcttttaagatcattgacctctcgcccttttgcatctctctgtttaatcagttcttcaactttttctttagtaagagaccacagagacatatttaaaatataattaaaatctgggccgaaaggagttcatgaatcggaggaactatcatcatgctggttttgtgtttcatcctcttctgctgcctgtaaaaaataacaaactgtatattaaagtcttgtatagtatcaaattaatgttgaattttattgaataattagtttaaaattctacaagtgctacactataaatgctacatcttcaggatggtggggttattttggattacctataaaaatatatttccttataaaaagtttaaaattttctaaagacgcacaataagatcttcagaaggaatggtatacactatccctatttatccaggaatatgatgaaaaattaactgatttcctcaggtactcagtaacaaaatgagaggataccacattttaaagttaagagagtagaattaatgttttatcactgcatcttgtcagatttttatactggtgagtgaatgaacaatctgaaatacaaaataaataccagttatgaaaattattttacagttataataaatatgttaaggtacattcactcgctgagggtgaattcttaataaaaacttctctaaagccagaatattcatgtcaggactcagagaaagtccacttaagaatttaagagttggtgagttagagtaagaatttcgtcagggttttgctgaaattttattcatcaggcccttgtctatagaaacagctgcaacaaaaaaattattttgtgctaatattaaatttcaaaatacaatgaatttaataaaagttattttaggtgatatcacctttaaattttttaaaataacaatagccattaaatccaa

SEQ ID NO: 183669 - DNA, 925 bp, Homo Sapiens
ttggcttctgaagccaaaattaaacattttgatggtgaagattacacatgcataacattccaaccagatctgtccaaatttaagatggaaaaacttgacaaggatattgtggccctcatgactagaagggcatatgatttggctggttcgtgtagaggggtcaaggtcatgtttaatggaaagaaattgcctgtaaatggatttcgcagttatgtagatctttatgtgaaagacaaattggatgaaactggggtggccctgaaagttattcatgagcttgcaaatgaaagatgggatgtttgtctcacattgagtgaaaaaggattccagcaaatcagctttgtaaatagtattgcaactacaaaaggtggacggcacgtggattatgtggtagatcaagttgttggtaaactgattgaagtagttaagaaaaagaacaaagctggtgtatcagtgaaaccatttcaattgccttattgaaaatccaacttttgattctcagactaaggaaaacatgactctgcagcccaaaagttttgggtctaaatgccagctgtcagaaaaattttttaaagcagcctctaattgtggcattgtagaaagtatcctgaactgggtgaaatttaaggctcagactcagctgaataagaagtgttcatcagtaaaatacagtaaaatcaaaggtattcccaaactggatgatgctaatgatgctggtggtaaacattccctggagtgttttgctgatatggaaaggcatcgcatcttgtttagatatgctggtcctgaagatgatgctgccataccttgggcatttagtaagaagaagattgatgacagaaaagaatggttaacaaattttatggaagaccggagacagcgtaggctacatggcttaccagagcaatttttatatggtactgca

SEQ ID NO: 183670 - DNA, 3812 bp, Homo Sapiens
  misc_feature (3151)..(3215): n is a, c, g, or t
ttggcaaacataggatgttttggcgagagatgtattcagtggaggaagctgagcaacttatgactctcatctctgctgcacgagaatatgagatagagttcatctatgcgatctcacctggattggatatcactttttctaaccccaaggaagtatccacattgaaacgtaaattggaccaggtttctcagtttgggtgcaaatcatttgctttgctttttgatgatatagaccataatatgtgtgcagcagacaaagaggtattcagttcttttgctcatgcccaagtctccatcacaaatgaaatctatcagtacctaggagagccagaaactttcctcttctgtcccacagaatactgtggcactttctgttatccaaatgtgtctcagtctccatatttaaggactgtgggtgaaaagcttctacctggaattgaagtgctttggacaggtcccaaagttgtttctaaagaaattccagtagagtccatcgaagaggtttctaagattattaagagagctccagtaatctgggataacattcatgctaatgattatgatcagaagagactgtttctgggcccgtacaaaggaagatccacagaactcatcccacggttaaaaggagtcctcactaatccaaattgtgaatttgaagccaactacgttgctatccacacccttgccacctggtacaaatcaaacatgaatggagtgagaaaagatgtagtgatgactgacagtgaagatagtactgtgtccatccagataaaattagaaaatgaaggcagtgatgaagatattgaaactgatgtactctatagtccacagatggctctaaagctagcattaacagaatggttgcaagagtttggtgtgcctcatcaatacagcagtaggcaagttgcacacagtggagctaaagcaagtgtagttgatgggactcctttagttgcagcaccctctttaaatgccacaaccgtagtaacaacagtttatcaggagcccattatgagccagggagcagccttgagtggtgagcctactactctgaccaaggaagaagaaaagaaacagcctgatgaagaacccatggacatggtggtggaaaaacaagaagaaacggaccacaagaatgacaatcaaatactgagtgaaattgttgaagcgaaaatggcagaggaattgaaaccaatggacactgataaagagagcatagctgaatcaaaatccccagagatgtccatgcaagaagattgtattagtgacattgcccccatgcaaactgatgaacagacaaacaaggagcagtttgtgccaggtccaaatgaaaagcctttgtacactgcggaaccagtgaccctggaggatttgcagttacttgctgatctattctaccttccttacgagcatggacccaaaggagcacagatgttacgggaatttcaatggcttcgagcaaatagtagtgttgtcagtgtcaattgcaaaggaaaagactctgaaaaaattgaagaatggcggtcacgagcagccaagtttgaagagatgtgtggactagtgatgggaatgttcactcggctctccaattgtgccaacaggacaattctttatgacatgtactcctatgtttgggatatcaagagtataatgtctatggtgaagtcttttgtacagtggttagggtgtcgtagtcattcttcagcacaattcttaattggagaccaagaaccctgggcctttagaggtggtctagcaggagagttccagcgtttgctgccaattgatggggcaaatgatctcttttttcagccacctccactgactcctacctccaaagtttatactatcagaccttattttcctaaggatgaggcatccgtgtacaagatttgcagagaaatgtatgacgatggagtgggtttaccctttcaaagtcagcctgatcttattggagacaagttagtaggagggctgctttccctcagcctggattactgctttgtcctagaagatgaagatggcatatgtggttatgccttgggcactgtagatgtgaccccctttattaaaaaatgtaaaatttcctggatccccttcatgcaggagaagtataccaagccaaatggtgacaaggaactctctgaggctgagaaaataatgttgagtttccatgaagaacaggaagtactgccagaaactttccttgctaatttcccttctctgataaagatggacattcacaaaaaagtaactgacccaagtgtggccaaaagcatgatggcttgcctcctgtcttcactgaaggctaatggctcccggggagctttctgtgaagtgagaccagatgataaaagaattctggaattttacagcaagttaggatgttttgaaattgcaaaaatggaaggatttccaaaggatgtggttatacttggtcggagcctgtgacatttgttgacactgtgaactgtccaaaagtctcttaactgcaccttgtgaatggtagttgaggtcttcatacagttcagcctctagaatggtaacaaatcagccaattggattcgaaacaaagaagactatgtaaaactcacccatcacactttgagaccttttacatgggcttatacagggagagagtcttcaataaatgtagtcagcactattttctgcatccagtgtggttgcgtttctcacctgagagtaatcaagataacatctgtcatcttccttggtttattgagtgaaatgcctctcagtcttaggggacatggcagagatgaaagaaagaaagagtgggtttcagaagtgtcaggtggagtgattccaagtgggatgggttgtggcattagtttaagctgaataaataatttcattttggggcagttattctgctttttgtaaagccgtggccaattgtctcctgtaatgactgttggttcaggcatgttgtactttgtagggacaaatgtgcatttgtttgtggcaaaagcctacaattgacaaacttgtaaatttctttgtatataaactagctgtaacctgactatcctttgtgtttactgtttttgtaaatttttttcctctataaatgaaagggtgttggttcagaatggcactttgaataatgtaaaccagtgaaaagtggnnnnnnnnnnnnnnnnnnnnnnnnnnnnnnnnnnnnnnnnnnnnnnnnnnnnnnnnnnnnnnnnnaaagtgcctcccacctaggcgtaggccatgaccatttggggtacgagagcctaattttgtaggacttaatctgttgaaaagtgcagttacttctggaaattaacctcaatattaggtcagcatgtgaaatgttggatttgacatgtcaggtagggttcagggactgattggtcccatttgccctcaggtcagttgtttaatctcaagacctgttactactgattttattaaatcagagtctttaattcttgcatgtttgtatctaatttctgaacgaatgagcacactttaaccagttatttacagttacctttttcctttaaccggattgtgaaagcttcatgtattttaatttagattctgtgtttttaagggttctgagcatgaagctggcagatagtcagcaggactcattttttcatcatggctggctgatttctccatagattgataacagtattttgttatcttgcttctctgtagttttgcatcagctgtttaactttgagctgagtgagggagaggggtaaagagaagaaacttaagttttctttcacagaactccacaattgtgggctttgagagagccctaaagca

SEQ ID NO: 183671 - DNA, 1398 bp, Homo Sapiens
  misc_feature (1079)..(1133): n is a, c, g, or t
ctttgtacaaagaacaggaagtactgccaccaaaaaattccttgctaatttcccttctctgataaagatggacattcacaaaaaagtaactgacccaagtgtggccaaaagcatgatggcttgcctcctgtcttcactgaaggctaatggctcccggggagctttctgtgaagtgagaccagatgataaaagaattctggaattttacagcaagttaggatgttttgaaattgcaaaaatggaaggatttccaaaggatgtggttatacttggtcggagcctgtgacatttgttgacactgtgaactgtccaaaagtctcttaactgcaccttgtgaatggtagttgaggtcttcatacagttcagcctctagaatggtaacaaatcagccaattggattcgaaacaaagaagactatgtaaaactcacccatcacactttgagactactcactggttggaagaatatagtattgcagcaaatcctgtatgaaagagagatgtgggcttcctttttgagtcttgtgttaggtgctgagaccttttacatgggcttatacagggagagagtcttcaataaatgtagtcagcactattttctgcatccagtgtggttgcgtttctcacctgagagtaatcaagataacatctgtcatcttccttggtttattgagtgaaatgcctctcagtcttaggggacatggcagagatgaaagaaagaaagagtgggtttcagaagtgtcagggtggagtgattccaagtgggatggttgtggcattagtttaagctgaataaataatttcaatttggggcagttattctgctttttgtaaagccgtggccaattgtctcctgtaatgactgttggttcaggcatgttgtactttgtagggacaaatgtgcatttgtttgtggcaaaagcctacaattgacaaacttgtaaatttctttgtatataaactagctgtaacctgactatcctttgtgtttactgtttttgtaaatttttttcctctataaatgaaagggtgttggttcagaatggcactttgaataatgtaaaccagtgaaaagtggannnnnnnnnnnnnnnnnnnnnnnnnnnnnnnnnnnnnnnnnnnnnnnnnnnnnnnattatttttaaagtgcctcccacctaggcgtaggccatgaccatttggggtacgagagcctaattttgtaggacttaatctgttgaaaagtgcagttacttctggaaattaacctcaatattagtcagcatgtgaaatgttggatttgacatgtcaagtagggttcagggactgattggtcccatttgccctcaggtcagttgtttaatctcaagacctgttactactgattttattaaatcagagtctttaattcttgcatgtt

SEQ ID NO: 183672 - DNA, 981 bp, Homo Sapiens
aaattgaaattatttatcagcttaaactaatgccacaaccatcccacttggaatcactccacctgacacttctgaaacccactctttctttcttcatctctgccatgtcccctaagactgagaggcatttcactcaataaacccaaggaagatgacagatgttatcttgattactctcaggtgagaaacgcaaccacactggatgcagaaaatagtgctgactacatttattgaagactctctccctgtataagcccatgtaaaaggtctcagcacctaacacaagactcaaaaaggaagcccacatctctctttcatacaggatttgctgcaatactatattcttccaaccagtgagtagtctcaaagtgtgatgggtgagttttacatagtcttctttgtttcgaatccaattggctgatttgttaccattctagaggctgaactgtatgaagacctcaactaccattcacaaggtgcagttaagagacttttggacagttcacagtgtcaacaaatgtcacaggctccgaccaagtataaccacatcctttggaaatccttccatttttgcaatttcaaaacatcctaacttgctgtaaaattccagaattcttttatcatctggtctcacttcacagaaagctccccgggagccattagccttcagtgaagacaggaggcaagccatcatgcttttggccacacttgggtcagttacttttttgtgaatgtccatctttatcagagaagggaaattagcaaggaaagtttctggcagtacttcctgttcttcatggaaactcaacattattttctcagcctcagagagttccttgtcaccatttggcttggtatacttctcctgcatgaaggggatccaggaaattttacattttttaataaagggggtcacatctacagtgcccaaggcataaccacatatgccgatcttcatcttcccaacttttttgtacaaag

SEQ ID NO: 183673 - DNA, 1017 bp, Homo Sapiens
gtgaaaatgcttcagctagaattataggataatcctgtgtgagataatttacatagtgactggaagagttattaaatattgctttcttgttgctaagttctgtagttgggttagatatctaatgcgtaactattgtgaaagtcaagagattctaatttttccagaaaataatgttgagtttccatgaagaacaggaagtactgccagaaactttccttgctaatttcccttctctgataaagatggacattcacaaaaaagtaactgacccaagtgtggccaaaagcatgatggcttgcctcctgtcttcactgaaggctaatggctcccggggagctttctgtgaagtgagaccagatgataaaagaattctggaattttacagcaagttaggatgttttgaaattgcaaaaatggaaggatttccaaaggatgtggttatacttggtcggagcctgtgacatttgttgacactgtgaactgtccaaaagtctcttaactgcaccttgtgaatggtagttgaggtcttcatacagttcagcctctagaatggtaacaaatcagccaattggattcgaaacaaagaagactatgtaaaactcacccatcacactttgagactactcactggttggaagaatatagtattgcagcaaatcctgtatgaaagagagatgtgggcttcctttttgagtcttgtgttaggtgctgagaccttttacatgggcttatacagggagagagtcttcaataaatgtagtcagcactattttctgcatccagtgtggttgcgtttctcacctgagagtaatcaagataacatctgtcatcttccttggtttattgagtgaaatgcctctcagtcttaggggacatggcagagatgaaagaaagaaagagtgggtttcagaagtgtcaagggtggagtgattccaagtgggatggttgtggcatttagtttaagctgaataaataatttcaattttggggcaggttattctgcttttttgtaaagcc

SEQ ID NO: 183674 - DNA, 1099 bp, Homo Sapiens
ttggctagggtttccggtggcctggactctttccctctgggagggtggcggcttggatgctacctgctctgcggggctggggaggggcagtcgggccagacttgtgtccagccactggaacccctctctgcgtatggccagcgcctctggcctgagttgacggagctcttcctgtggccagacatctacgtgtgcatgatctcctatgcacacaacgtggcggcccagggcaagtacatagctattgccagcactactgtggagaccacggaccctgaaaaggaggtggagccggctctggagctgttggagcccattgaccagaagtgagggactgggctgagcccaagggggagagggagggagcccagcagctgggcttagggaccaggaagggcatggcccattgtgaggcctgtcccctcccctctgtctgcccctcaggtttgtggctatcagtgacttgtatgagcccattgatgatggttgtgagagccaggtaagcagctcgtcccagccctgggctcctggctgcccgcccaggatacctgtctgactcaccctgggcgctgggctctggctgtttccaggtgttctgttcctgctcctacgatgccaccacacactttgagacaacctgcaacgacatcaaagacatctacaaacgcatggctggcacggcctttgactttgagaacatgaagcgcaaacagaacgacgtctttggagaagctgagcagtgattgtggccgcccccagcccctgctgccccagcctgtgtctgttctcctcgagggctccagcatcctctgcttcccccaccacgttcccatcacccacctcattgatccactgaccaaatccttaaccctagcgatggcttgggagatggggggttggatagcatcctctttcttggcccttccttatcctaggaaaagagggttcctctccttgtgtgtgtctcttccccccacccctaattcttctgctctgtttgggaagacgtggaggaaaaggtgacttctgcccccaccgctcttacccccactgtagtgacctttggagatgcccccacctccccccaccaactctcgcg

SEQ ID NO: 183675 - DNA, 1181 bp, Homo Sapiens
ttggcaccacgcactgtaaggtgggctcggtggtggccgtgggctggatccgctcccgcaaggctgtggactggcgcctctttcggaacatcttcgtggcctggttcgtgaccgtccctgtggctgggctgttcagcgctgctgtcatggctcttctcatgtatgggatccttccatatgtgtgatttgtcttcttccagctgcaaacagctaaagggatggtctggtgttggcgtgtgggagacatgtgtgctcgtgccgcacatacacatcctggccgtgcacggctctctcatgaccagctctctgcctcccttccaggaggctccatcccacactgttcacccaggctgcggagactcaccttcccgagctaacttaactactgtacataataatatgtattaaactggtatcgtggtgatataatgtggtgcagttacttatatattaaatatctattgtatccatagaataggcagcattatttcaaacatattcaagttgggagtggagatcattgcctagaagtcaatattcaataaatcttgtacataactatttcgatggcaaatgttaagccttctaaaaggaaagtgtagattggaaaatgattttttttccaaatgatgtttttgccttctaatatactgtaaggtaatgagcttcagaacaggcaacctgaccctgcagaggtcgcgtgctgtgggatgacagcgggacgggagctcacaagtgctttcactgaagatttgttcatatactgtgtattgattgttgtgtaatatatcatcattgcttttgtaaatacgtaaaactgtaattttttaatggtgtgcttcccttatacttttttgatcagagaattttggaaagtaccaaagaagcaggggaatcattggccagtgttacgttttcacattgtctgtctcccaccctcactgatcacgcctgccccagagcagtgtgtggcggtgacaccgtcacccagcatgcgccacgccgtggctcccaccagcagtgccaccgccaccacaccccagataccacccaccttgcagtggcctttccttgtcatcatactagagaatgcacatgtgttggtgagggcgtgtggctgagcactacctgtccagtccagagccagtttctatcccaattctccctgcagcctgaaaaaa

SEQ ID NO: 183676 - DNA, 1047 bp, Homo Sapiens
tttgtacaaaaaagttggcagcattatttcaaacatattcaagttgggaggggagatcattgcctagaagtcaatattcaataaatcttgtacataactatttcgatggcaaatgttaagccttctaaaaggaaagtgtagattggaaaatgattttttttccaaatgatgtttttgccttctaatatactgtaaggtaatgagcttcagaacaggcaacctgaccctgcagaggtcgcgtgctgtgggatgacagcgggacgggagctcacaagtgctttcactgaagatttgttcatatactgtgtattgattgttgtgtaatatatcatcattgcttttgtaaatacgtaaaactgtaattttttaatggtgtgcttcccttatacttttttgatcagagaattttggaaagtaccaaagaagcaggggaatcattggccagtgttacgttttcacattgtctgtctcccaccctcactgatcacgcctgccccagagcagtgtgtggcggtgacaccgtcacccagcatgcgccacgccgtggctcccaccagcagtgccaccgccaccacaccccagatcccacccaccttgcagtggcctttccttgtcatcagagtagagaatgcacaggtgttggtgagggcgtgtggctgagcactacatgtcaagtccagagtcagtttctatcccaattctccctgcagcctgaagaacggatccttgtctccaatgtcagcacaaaggaggctttttctgtgctttgacattctagcacttcagggatgagagggagggagaatcctggatgctggatggagtatttctctgaggcccacacaaagctggacacccccaggctctactccatcccattggagtctcttctttttttgatagcgggagggaggaagtacgactaatgttggagcctgaaactatggaaatgctgctaaaatttttatattgacaaacattttcttggtacttcattgtcatttttcattaatcaaccatattaaatttataataaaaaatgcccct

SEQ ID NO: 183677 - DNA, 1150 bp, Homo Sapiens
  misc_feature (175)..(203): n is a, c, g, or t
  misc_feature (915)..(987): n is a, c, g, or t
cagtttacattatctctacattgatttgatggaaagatggtcatatgcgatatgtggtataaatttcttcaatctatggagaatacggaaatggtaaagttgactgttttacttatgtttttgcagtaagaagctaaacatccagtatcagaagcatcagtacttttactctttnnnnnnnnnnnnnnnnnnnnnnnnnnnnncctgtcatgagccctctgtcttttgctgctactttcagattctctgtgacaaaagactgttacttttcactgaattctaatgagttgacgtaaataatcagaacaatttcttaaatgcaaaattggtctggtatctgtctaaattggtcaatacaagtgttattctggaatcatgtaaaaatcacttactttcataactgtttagaaccccaaatgttttccctttgaaggggaacatctgtggaatatgattttgaatagaggacttctatgaaatatatttcaaatcttaaaaatatttttaatacttcctaaagtggtataggatttaccctcgctgactatgccttccatttaagaacagtcttgcatttgtggcttttcattttccttacagctctaattttatttaaaaagcctgaatacacaaatgactgctgccttacttagcattaaacagtactattttttaaaccatgtatacagctcaacagcaagattaataagttataatacacacatatcactgacagattcatctttttgttttttagaattcacgaaataaactgtattctggtaaatcccctccccgcaacaagagtgtaatgtacctacattgaggtgtttaaatatttctccaacagttttcattgaattacattatgaaaacactaggcttcaagccaggtactaataaatatttaatttnnnnnnnnnnnnnnnnnnnnnnnnnnnnnnnnnnnnnnnnnnnnnnnnnnnnnnnnnnnnnnnnnnnnnnnnngggaaggcgcccgtgtcagccggacatggccgagatttcatagtcactggccgaggtgaggggcttgcccatcatccggatgttttttgcactgggcttgtcaaagtacttgaccagggcaggctcagttaagagggaggccaacttttttgtacaaagttgg

SEQ ID NO: 183678 - DNA, 2963 bp, Homo Sapiens
ttggctaaaacgtgatcttgatgccagggcaaagagtgagagataccgtgcacttttccggctgcccaaagatgaaaaattagatggccacacagactgcactctctggactccatttaacaaaatgcacattttggggcaaatgtttgtgtccacaaattacatctgttttaccagcaaggaggagaacttatgtagcctcattatcccgctccgtgaggtgacaattgtggaaaaggcagacagctccagtgtgctccccagtcccttatccatcagcacccgaaacaggatgaccttcctatttgccaacttgaaagatagagactttctagtgcagaggatctcagatttcctgcaacagactacttccaaaatatattctgacaaggagtttgcaggaagttacaacagttcagatgatgaggtgtactctcgacccagcagcctcgtctcctccagcccccagagaagcacgagctctgatgctgatggagagcgccagtttaacctaaatggcaacagcgtccccacagccacacagaccctgatgaccatgtatcggcggcggtctcccgaggagttcaacccgaaattggccaaagagtttctgaaagagcaagcctggaagattcactttgctgagtatgggcaagggatctgcatgtaccgcacagagaaaacgcgggagctggtgttgaagggcatcccggagagcatgcgtggggagctctggctgctgctgtcaggtgccatcaatgagaaggccacacatcctgggtactatgaagacctagtggagaagtccatggggaagtataatctcgccacggaggagattgagagggatttacaccgctcccttccagaacacccagcttttcagaatgaaatgggcattgctgcactaaggagagtcttaacagcttatgcttttcgaaatcccaacatagggtattgccaggccatgaatattgtcacttcagtgctgctgctttatgccaaagaggaggaagctttctggctgcttgtggctttgtgtgagcgcatgctcccagattactacaacaccagagttgtgggtgcactggtggaccaaggtgtctttgaggagctagcacgagactacgtcccacagctgtacgactgcatgcaagacctgggcgtgatttccaccatctccctgtcttggttcctcacactatttctcagtgtgatgccttttgagagtgcagttgtggttgttgactgtttcttctatgaaggaattaaagtgatattccagttggccctagctgtgctggatgcaaatgtggacaaactgttgaactgcaaggatgatggggaggccatgaccgttttgggaaggtatttagacagtgtgaccaataaagacagcacactgcctcccattcctcacctccactccttgctcagcgatgatgtggaaccttaccctgaggtagacatctttagactcatcagaacttcctacgagaaattcggaactatccgggcagatttgattgaacagatgagattcaaacagagactgaaagtgatccagacgctggaggatactacgaaacgcaacgtggtacgaaccattgtgacagaaacttcctttaccattgatgagctggaagaactttatgctcttttcaaggcagaacatctcaccagctgctactggggcgggagcagcaacgcgctggaccggcatgaccccagcctgccctacctggaacagtatcgcattgacttcgagcagttcaagggaatgtttgctcttctctttccttgggcatgtggaactcactctgacgttctggcctcccgcttgttccagttattagatgaaaatggagactctttgattaacttccgggagtttgtctctgggctaagtgctgcatgccatggggacctcacagagaagctcaaactcctgtacaaaatgcacgtcttgcctgagccatcctctgatcaagatgaaccagattctgcttttgaagcaactcagtacttctttgaagatattaccccagaatgtacacatgttgttggattggatagcagaagcaaacagggtgcagatgatggctttgttacggtgagcctaaagccagacaaagggaagagagcaaattcccaagaaaatcgtaattatttgagactgtggactccagaaaataaatctaagtcaaagaatgcaaaggatttacccaaattaaatcaggggcagttcattgaactgtgtaagacaatgtataacatgttcagcgaagaccccaatgagcaggagctgtaccatgccacggcagcagtgaccagcctcctgctggagattggggaggtcggcaagttgttcgtggcccagcctgcaaaggagggcgggagcggaggcagtgggccgtcctgccaccagggcatcccaggcgtgctcttccccaagaaagggccaggccagccttacgtggtggagtctgttgagcccctgccggccagcctggcccccgacagcgaggaacactcccttggaggacaaatggaggacatcaagctggaggactcctcgccccgggacaacggggcctgctcctccatgctgatctctgacgacgacaccaaggacgacagctccatgtcctcatactcggtgctgagtgccggctcccacgaggaggacaagctgcactgcgaggacatcggagaggacacggtcctggtgcggagcggccagggcacggcggcactgccccggagcaccagcctgggaccgggactgggccatcaccttcgagcagttcctggcctccctcttaactgagcctgccctggtcaagtactttgacaagcccgtgtgcatgatggccaggattaccagtgcaaaaaacatccggatgatgggcaagccccctcacctccggccagtgactatgaaattctccggccatgtccgg

SEQ ID NO: 183679 - DNA, 1361 bp, Homo Sapiens
  misc_feature (406)..(434): n is a, c, g, or t
  misc_feature (1188)..(1217): n is a, c, g, or t
caaaggaaatgagaccatgattatgaattcaacaatcagaagaaaaaatcgtccaacatctgtaaaaagcaaaatcataacagtaataaaaaagaagcaagaattcaaagtgcaggtgcgctagctttcatttccacatccattcaggaaatagagcatactattcttttatataaagtgacaagttctgtttttaaaacattcagttacattatcttgcagattttttttcagtttacattatctctacattgatttgatggaaagatggtcatatgcgatatgtggtataaatttcttcaatctatggagaatacggaaatggtaaagttgactgttttacttatgtttttgcagtaagaagctaaacatccagtatcagaagcatcagtacttttactctttnnnnnnnnnnnnnnnnnnnnnnnnnnnnncctgtcatgagccctctgtctttgctgctactttcagattctctgtgacaaaagactgttacttttcactgaattctaatgagttgacgtaaataatcagaacaatttcttaaatgcaaaattggtctggtatctgtctaaattggtcaatacaagtgttattctggaatcatgtaaaaatcacttactttcataactgtttagaaccccaaatgttttccctttgaaggggaacatctgtggaatatgattttgaatagaggacttctatgaaatatatttcaaatcttaaaaatatttttaatacttcctaaagtggtataggatttaccctcgctgactatgccttccatttaagaacagtcttgcatttgtggcttttcattttccttacagctctaattttatttaaaaagcctgaatacacaaatgactgctgccttacttagcattaaacagtactattttttaaaccatgtatacagctcaacagcaagattaataagttataatacacacatatcactgacagattcatctttttgttttttagaattcacgaaataaactgtattctggtaaatcccctccccgcaacaagagtgtaatgtacctacattgaggtgtttaaatatttctccaacagttttcattgaattacattatgaaaacactaggcttcaagccaggtactaataaatatttaatttaaaagaaagaaagaaaaaactcaacacagaagaacataaaaaannnnnnnnnnnnnnnnnnnnnnnnnnnnnngggaaggcgcccgtgtcagccggacatggccgagatttcatagtcactggccgaggtgaggggcttgcccatcatccggatgttttttgcactgggcttgtcaaagtacttgaccagggcaggctcagttaagagggaggccaa

SEQ ID NO: 183680 - DNA, 2084 bp, Homo Sapiens
  misc_feature (1255)..(1279): n is a, c, g, or t
  misc_feature (1526)..(1534): n is a, c, g, or t
ttaagttaaaggaaggataaaagtttagtcaactgctctgaacagtggcagagttgggtgagaagtgggagatgaaggcagaaataagacaaagaagaaaggcaaagaaggcttcaactctgattgaaaatgagtggagaatcaaacaaagttgagaacagatatgatataggtacagtgagatacttgaaactagaatttgatagttgatagttatagaagctcaattaaatcatcttgaagtggaattagacaaagcatctacattttaatggagaaccagtattacagtgaccaggtaactcggcatggtattatcacttaaaaatttttcctaaataccatgaagtcggtagaagacctttgcatcagaccatgttctttgaagcttaaaaaagtccctgactgactaggaaagacagcacagtgctccaaaaagaaaccctgcagagatgtattaataccaaaaactccatttgaccctggacaggcccaggattcgggattcttcacaatgaggggaatggaccaggtttcttccaagcaaaacattctatcgttttgttgacaatgaattaaattgaaattgtttagaacaatcccaattttggtggggaaggaaaggaggataagttaagcaagataaagaaagctcacagaaacttcatgcagaggtacagcattaaagttctttgtttcctaattaatgttgtatgcagaagtattctgtaaactaaattttcctgacagaaaagttcccacatcctcaacagatgagaatgattgcattatttgggatccttgatcaatacgaaccacatactgtcccttctcaaagactaagttccttatttttcacccaaatcctatatattgaaagccaaccaaggtgctaaatgttaaccactagtcaagttaggaatgtctgaagaaaatatattaaccttgacataaagaagatgtttttggtcaaatttcagacatgtattattataaattaataactggctccatccaccaggttaaagatgaagggagggcctaagatgtctctagagtttatatacacacaagtgagtgtcactgttttgttttgtttttgacctagttttattaaatattgcttccttggggtgtgtttataacaactcccagaacatttcatgtaaggattcaaagcggtcatattaaaatacagcttcaatataaagtttatcacagttttacagtattcaaaaatgacagacctgccttnnnnnnnnnnnnnnnnnnnnnnnnnggactattacacccaaaacataagaaaacaattaaataaacaagtttggcattttcataactttatagtataaaacagaatattaaatttattactggcaaacggacactgatttatttcctttgaaatgtgtcccatttaaacacactatacaagttcattatacaaaagatggatgatcattttgatgaaagaagtgcaccctgaaaatttttgccagtttagaatatttagctcttaaagtttnnnnnnnnngtccttttccttttttaaactgaaggctgaattcagattttttttgttgtctcatctgtcagccttcctggtttaaaaacaatagtgtctatggacgcccaccagggggcagtgtaagattagccattaaatcacgaacagctgcaaatattgtgcattcaccttgtcgtggtggattcatctctgcaaacctcttcagaatgttgctgaccatcatgggagcagcaacagaagagttctgctgtctgggaatgtctgcctgctgggttgtacctgaagccatgtcataaatgattggaactataatactaacaggttcttggggagggaccgatgttttctgagttagttgaagaaaaaaatagcattttggatttcagcaccacagcaggcgtcccaggaggtgcaatcggcggcgcgctgggagggatcgtcaggcaaaactgaacattccattttagctgtgttgcttggtcagggaacagctccagcttcataatgtgcacacaatccctgaggatgtgtgtaggagctcctaatagcttgccaa

SEQ ID NO: 183681 - DNA, 1491 bp, Homo Sapiens
  misc_feature (1281)..(1289): n is a, c, g, or t
ttggccatcaccagcgtcatttgttccaactcctcccccatcctcgcatggaatctcaataggaccaggggccagttttgctagtccacatggaactcttgaccctagttccccatacactatggtgtcaccaagtggacgagcagggaactggccaggatctcctcaagtgtctggcccctcaccagcagcacgcatgcctggaatgtcaccagccaacccctcactacattctccggttccagatgcttctcattcccctcgagctggaacaagttctcaaacaatgccaacaaacatgcctccacctcgtaaactacctcagcgctcttgggcggcatccatacctaccatcctcactcacagtgccttgaacattttactgctgccctctccaactccaggccttgtgcccggcctggcaggtagttacctttgttctccacttgagagattccttggatcagtcatcatgagacgacatcttcaaagaattattcaacaagaaacgctgcagctgataaattctaatgaacccggagtgatcatgtttaagactgatgcactgaaatgcagagtagctcttagtcccaaaaccaaccaaacgcttcagctaaaagtgacacctgaaaatgcaggacagtggaaacctgatgaacttcaagttttggagaaattctttgaaacaagagttgcaggaccaccatttaaagctaatacgttaatagccttcaccaagctattaggagctcctacacacatcctcagggattgtgtgcacattatgaagctggagctgttccctgaccaagcaacacagctaaaatggaatgttcagttttgcctgacgatccctcccagcgcgccgccgattgcacctcctgggacgcctgctgtggtgctgaaatccaaaatgctattttttcttcaactaactcagaaaacatcggtccctccccaagaacctgttagtattatagttccaatcatttatgacatggcttcaggtacaacccagcaggcagacattcccagacagcagaactcttctgttgctgctcccatgatggtcagcaacattctgaagaggtttgcagagatgaatccaccacgacaaggtgaatgcacaatatttgcagctgttcgtgatttaatggctaatcttacactgccccctggtgggcgtccatagacactattgtttttaaaccaggaaggctgacagatgagacaacaaaaaaaatctgaattcagccttcagtttaaaaaaggaaaaggacnnnnnnnnnaaactttaagagctaaatattctaaactggcaaaaattttcagggtgcacttctttcatcaaaatgatcatccatcttttgtataatgaacttgtatagtgtgtttaaatgggacacatttcaaaggaaataaatcagtgtccgtttgccagtaataaatttaatattctgttttatactataaagttatgaaatgccaaac

SEQ ID NO: 183682 - DNA, 1583 bp, Homo Sapiens
  misc_feature (282)..(344): n is a, c, g, or t
ttggcatctaatcctgcctggtgtagtcactgactcctggcccctttgatccctgttctaattccttgaatctgtaatactgaccttctaacctccctctccccttacatattaaaaccgtgattccttaaagctttgacacttaccacctcccatgcctcctgactatttcctccccatcatccccaaccccaaaccttgctcttccagtatgagatgttctgacaactccccgcccccatgtcttccaatgtccccccatcttcctttcctccatgctcnnnnnnnnnnnnnnnnnnnnnnnnnnnnnnnnnnnnnnnnnnnnnnnnnnnnnnnnnnnnnnncctgacactttttcttttcccctgagttgcttctgttttccatctacttcttttactttcttgatctctggttctttgacatctgtgttctcctctctcgctctttttctgcctgtatctgtccatctgatgcctctcttttcctggctccatctctgtatttccctgtctttctcttgcccttctttctctgtggcccgggccccagttctgaaccagctggaggagttgctgagcgacatgaaggcggacgtgacccgcctgccagccacgctgtcccgaataccccccatcgcagcccgccttcagatgtccgagcgcagcatcctcagccggctggccagcaagggcacggagcctcaccccacaccggcctacccgccgggtccctacgctacacctccggggtacggggcggccttcagcgccgcacccgtaggggccctggccgccgcaggcgccaattacagccagatgcctgcagggtccttcatcacagccgccaccaacggccctccagtgcttgtgaagaaggagaaggaaatggtgggggcattggtgtcagacgggctggatcggaaggagccccgagccggggaggtgatctgtatagacgactgactggatcccaggcctgcccttcacccaggccccgtccccgaggccgacccccagctcaagcgctggggcctgctgccagccctccaccttccccaccccttgggccatcactgggctaggaacccctttgcccctctctgcagctcctctcttcaagaagggccctttgtctttctccactcccacacacctttcccaccaagccttgaagactgtgctggtgagaagaagtctgggtgggagatggctggcagggtcttccaagtaccttcctcccacactgccaagtatacacaacttcccagtaaatggttgtggggaggaaggaggtggagcctccccagccgtttccctgcagaatcagctctgtctcatgtggaagtggagaatcagccttgcctggcctttaggaacttttgtggggaagagagctttgaagagaggagggggactttagagagggatgaaaatgagccctgggagggaggaagggacgaggaggggtggctgcatgttaccgtcccctacctctccccacgtggagggtggagcagttatgagggaggaagtcaactgctgttcagcctcagaataaaggtgccgttcactggctcagtt

SEQ ID NO: 183683 - DNA, 2029 bp, Homo Sapiens
ttggccatggaggaggcggtgcgaacggcttcagccccgaatgctcgcatctcccactggacggcgacgaaggcggtggccgtgcgagcgcaggactgggcggcctgtgtgggggtgtgagccgcggtgcccaaggctgcgccggcgaggggaagccgcgcggccggccggccgactagggctggagctactcggccagggtttaagactttaaatgagaataaagggtggtatttacgaggaaatgagagtgaataagtcatctctaacctctcccagcctttttttcataagagagaccatattaaacttacatgtttgaagactgcttcattctgcctctagtaccagcggtttctctgttctgtgatcaatgtgattcacaggaactccttaagtaacaaacgaaatgagccaggggcgtggaaaatatgacttctatattggtctgggattggctatgagctccagcattttcattggaggaagtttcattttgaaaaaaaagggcctccttcgacttgccaggaaaggctctatgagagcaggtcaaggtggccatgcatatcttaaggaatggttgtggtgggctggactgctgtcaatgggagctggtgaggtggccaacttcgctgcgtatgcgtttgcaccagccactctagtgactccactaggagctctcagcgtgctagtaagtgccattctttcttcatactttctcaatgaaagacttaatcttcatgggaaaattgggtgtttgctaagtattctaggatctacagttatggtcattcatgctccaaaggaagaggagattgagactttaaatgaaatgtctcacaagctaggtgatccaggttttgtggtctttgcaacccttgtggtcattgtggccttgatattaatcttcgtggtgggtcctcgccatggacagacaaacattcttgtgtacataacaatctgctctgtaatcggcgcgttttcagtctcctgtgtgaagggcctgggcattgctatcaaggagctgtttgcagggaagcctgtgctgcggcatcccctggcttggattctgctgctgagcctcatcgtctgtgtgagcacacagattaattacctaaatagggccctggatatattcaacacttccattgtgactccaatatattatgtattctttacaacatcagttttaacttgttcagctattctttttaaggagtggcaagatatgcctgttgacgatgtcattggtactttgagtggcttctttacaatcattgtggggatattcttgttgcatgcctttaaagacgtcagctttagtctagcaagtctgcctgtgtcttttcaaaagacgagaaagcaatgaatggcaatctctctaatatgtatgaagttcttaataataatgaagaaagcttaacctgtggaatcgaacaacacactggtgaaaatgtctcccgaagaaatggaaatctgacagctttttaagaaaggtgtaattaaaggttaatctgtgattgttatgaagtgaatttgaatatcatcagaatgtgtctgaaaaaacattgtcctcaaataatgttctttaaaggcaatctttttaaagatttcactaatttggaccaagaaattacttttcttgtatttaaacaaacaatggtagctcactaaaatgacctcagcacatgacgatttctattaacattttattgttgtagaagtattttacattttcatcccttctccaaaagccgaatgcactaatgacagttttaagtctatgaaaatgctttattttttcattggtgatgaaagtctgaaatgtgcatttgtcatccccactccatcaatccctgaccatgtaaggcttttttattttaaaaaaacagagttatcccaatacattatcctgtgatttaccttacctacaaaagtggctcctgtttgtttgatgatgattggttttatttttgaaatatttattaagggaaaactaagttactgaatgaaggaacctctttcttac

SEQ ID NO: 183684 - DNA, 1010 bp, Homo Sapiens
ctttgtacaaaaaagttgggatacatttctacatcttcaaccatgttgacatcaaaatatactatcatgttgttgaaactgggtccatgggagcaagattagtggctgctaaacttgaaccgaaaagcttcaaacatacccatatagataaaccagactgctcagggccccccatggacataagtaacaaggcttctggggagataaaaattgcctatacttactctgttagcttcgaggaagatgataagatcagatgggcgtctagatgggactatattctggagtctatgcctcatacccacattcagtggtttagcattatgaattccctggtcattgttctcttcttatctggaatggtagctatgattatgttacggacactgcacaaagatattgctagatataatcagatggactctacggaagatgcccaggaagaatttggctggaaacttgttcatggtgatatattccgtcctccaagaaaagggatgctgctatcagtctttctaggatccgggacacagattttaattatgacctttgtgactctatttttcgcttgcctgggatttttgtcacctgccaaccgaggagcgctgatgacgtgtgctgtggtcctgtgggtgctgctgggcacccctgcaggctatgttgctgccagattctataagtcctttggaggtgagaagtggaaaacaaatgttttattaacatcatttctttgtcctgggattgtatttgctgacttctttataatgaatctgatcctctggggagaaggatcttcagcagctattccttttgggacactggttgccatattggccctttggttctgcatatctgtgcctctgacgtttattggtgcatactttggttttaagaagaatgccattgaacacccagttcgaaccaatcagattccacgtcagattcctgaacagtcgttctacacgaagcactttgcctgggtattatcttggggagggattttgcccctt

SEQ ID NO: 183685 - DNA, 1066 bp, Homo Sapiens
ctttgtacaaaaaagttgggctctgttgcggtccgcttcggtttctgttgcgggacccggggtgtctcctagcgcaaccggaactagccttctgggggccggcttcctttatctctggcggccttgtagtcgtctccgagactccccacccctccttccctcttgaccccctaggtttgattgccctttccccgaaacaactatcatgagcgcgaggctgccggtgttgtctccacctcggtggccgcggctgttgctgctgtcgctgctcctgctgggggcggttcctggcccgcgccggagcggcgctttctacctgcccggcctggcgcccgtcaacttctgcgacgaagaaaaaaagagcgacgagtgcaaggccgaaatagaactatttgtgaacagacttgattcagtggaatcagttcttccttatgaatacacagcgtttgatttttgccaagcatcagaaggaaagcgcccatctgaaaatcttggtcaggtactattcggggaaagaattgaaccttcaccatataagtttacgtttaataagaaggagacctgtaagcttgtttgtacaaaaacataccatacagagaaagctgaagacaaacaaaagttagaattcttgaaaaaaagcatgttattgaattatcaacatcactggattgtggataatatgcctgtaacgtggtgttacgatgttgaagatggtcagaggttctgtaatcctggatttcctattggctgttacattacagataaaggccatgcaaaagatgcctgtgttattagttcagatttccatgaaagagatacattttacatcttcaaccatgttgacatcaaaatatactatcatgttgttgaaactgggtccatgggagcaagattagtggctgctaaacttgaaccgaaaaagcttcaaacatacccatatagataaaccagactgctcagggccccccatggacataagtaacaaggcttctggggagataaaaattgcctatacttactctgttagcttcgaggaagatgatagatcagatgggcgtctagatgg

SEQ ID NO: 183686 - DNA, 1203 bp, Homo Sapiens
tcccaaaaggaatagctgctgaagatccttctccccagaggatcagattcattataaagaagtcagcaaatacaatcccaggacaaagaaatgatgttaataaaacatttgttttccacttctcacctccaaaggacttatagaatctggcagcaacatagcctgcaggggtgcccagcagcacccacaggaccacagcacacgtcatcagcgctcctcggttggcaggtgacaaaaatcccaggcaagcgaaaaatagagtcacaaaggtcataattaaaatctgtgtcccggatcctagaaagactgatagcagcatcccttttcttggaggacggaatatatcaccatgaacaagtttccagccaaattcttcctgggcatcttccgtagagtccatctgattatatctagcaatatctttgtgcagtgtccgtaacataatcatagctaccattccagataagaagagaacaatgaccagggaattcataatgctaaaccactgaatgtgggtatgaggcatagactccagaatatagtcccatctagacgcccatctgatcttatcatcttcctcgaagctaacagagtaagtataggcaatttttatctccccagaagccttgttacttatgtccatggggggccctgagcagtctggtttatctatatgggtatgtttgaagcttttcggttcaagtttagcagccactaatcttgctcccatggacccagtttcaacaacatgatagtatattttgatgtcaacatggttgaagatgtaaaatgtatctctttcatggaaatctgaactaataacacaggcatcttttgcatggcctttatctgtaatgtaacagccaataggaaatccaggattacagaacctctgaccatcttcaacatcgtaacaccacgttacaggcatattatccacaatccagtgatgttgataattcaataacatgctttttttcaagaattctaacttttgtttgtcttcagctttctctgtatggtatgtttttgtacaaacaagcttacaggtctccttcttattaaacgtaaacttatatggtgaaggttcaattctttccccgaatagtacctgaccaagattttcagatgggcgctttccttctgatgcttggcaaaaatcaaacgcggtgtattcataagccaacttttttgtacaaagtt

SEQ ID NO: 183687 - DNA, 911 bp, Homo Sapiens
ttggcacgtgggcgccggctgccggggcggcgatcttagggaactagggtcacctggagagccgcccaccgtctctgcccgctcgactcctccgcccgggccgctcggccggtccagccgcggccggcgcctggctgtgaggtggattcccggcccagtctgaccatctccctccagtttttccacttcgttcggaccttctcataactatgtccaccctctacgtctcccctcacccagatgccttccccagcctccgagccctcatagccgctcgctatggggaggctggggagggtcccggatggggaggagcccacccccgcatctgtctccagccacccccgactagcaggactccctttcccccaccccgcctgccggccctggagcaggggcccggtgggctctgggtgtggggggccacggctgtggcccagctgctgtggccagcaggcctggggggcccagggggcagccgggcggctgtccttgtccaacagtgggtcagttacgccgacacggagttaataccagctgcctgtggagcaacgctgccggccctgggactccgaagctcggcccaggacccccaggctgtgctgggggccctgggcagggccctgagccccttggaggagtggcttcggctgcacacctacttggccggggaggcccccactctggctgacctggcggctgtcacagccttgctgctgcctttccgatacgtcctagacccacctgcccgccggatctggaataatgtgactcgctggtttgtcacgtgtgtccggcagccagaattccgagccgtgctaggagaagtggttctatactcaggagccaggcctctctctcatcagccaggccccgaggctcctgccctccaaagacagctgctcagctca

SEQ ID NO: 183688 - DNA, 1321 bp, Homo Sapiens
ttgggttcctggttgccggctgaaataacctgctctccaaaatgtccacaaaagtgacttaagtcaggttcccccaaaccagacaccaagacaagaatccatgtgtgtgtgactgaaggaagtgctgggagagccccagctgcagcctggatgtgaactgcaactccaaagtgtgtccagactcaaggcaagggcactaggctttccagacctcctactaagtcattgatccagcactgccctgccaggacataaatccctggcacctcttgctctctgcaaaggagggcaaagcagcttcaggagcccttgggagtcctccaaagagagtctagggtacaggtccgaaagtagaagaacacagaaggcaggccaggggcactgtgagatggtaaaagagatctgaagggatccagacgtgtacagaagggccatgctgttattactcttacacaaggaggcagccctcgagccacagggtccagctgttggctataatagcctaccggtctctgatgatcaccatgtttctggaattcaagccaggaagaagcagcaatctgtcttctggattaaaactgaagatcaacctactttcaacttactaagaaaggggatcatggacattgaagcatatcttgaaagaattggctataagaagtctaggaacaaattggacttggaaacattaactgacattcttcaacaccagatccgagctgttccctttgagaaccttaacatccattgtggggatgccatggacttaggcttagaggccatttttgatcaagttgtgagaagaaatcggggtggatggtgtctccaggtcaatcatcttctgtactgggctctgaccactattggttttgagaccacgatgttgggagggtatgtttacagcactccagccaaaaaatacagcactggcatgattcaccttctcctgcaggtgaccattgatggcaggaactacattgtcgatgctgggtttggacgctcataccagatgtggcagcctctggagttaatttctgggaaggatcagcctcaggtgccttgtgtcttccgtttgacggaagagaatggattctggtatctagaccaaatcagaagggaacagtacattccaaatgaagaatttcttcattctgatctcctagaagacagcaaataccgaaaaatctactcctttactcttaagcctcgaacaattgaagattttgagtctatgaatacatacctgcagacatctccatcatctgtgtttactagtaatcattttgttccttgcagaccccagatggggttcactgtttgg

SEQ ID NO: 183689 - DNA, 961 bp, Homo Sapiens
ttttcagcacttttctatttctccctcactcagagtcttgaactctattagatctgtatgtcctataattgaatctcctatgggtgagggtgaagcccaccaaacagtgaaccccatctggggtctgcaaggaacaaaatgatttactagtaaacacagatgatggagatgtctgcaggtatgtattcatagactcaaaatcttcaattgttcgaggcttaagagtaaaggagtagatttttcggtatttgctgtcttctaggagatcagaatgaagaaattcttcatttggaatgtactgttcccttctgatttggtctagataccagaatccattctcttccgtcaaacggaagacacaaggcacctgaggctgatccttcccagaaattaactccagaggctgccacatctggtatgagcgtccaaacccagcatcgacaatgtagttcctgccatcaatggtcacctgcaggagaaggtgaatcatgccagtgctgtattttttggctggagtgctgtaaacataccctcccaacatcgtggtctcaaaaccaatagtggtcagagcccagtacagaagatgattgacctggagacaccatccaccccgatttcttctcacaacttgatcaaaaatggcctctaagcctaagtccatggcatccccacaatggatgttaaggttctcaaagggaacagctcggatctggtgttgaagaatgtcagttaatgtttccaagtccaatttgttcctagacttcttatagccaattctttcaagatatgcttcaatgtccatgatcccctttcttagtaagttgaaagtaggttgatcttcagttttaatccagaagacagattgctgcttcttcctggcttgaattcaggttatttcagccggcaaccaggaactagactgaatgcgaatcctcccccaacttttttgtacaaagttggc

SEQ ID NO: 183690 - DNA, 1360 bp, Homo Sapiens
  misc_feature (1209)..(1236): n is a, c, g, or t
actttgtacaaaaaagttggattcagtctaccttcctggttgccggctgaaataacctgaattcaagccaggaagaagcagcaatctgtcttctggattaaaactgaagatcaacctactttcaacttactaagaaaggggatcatggacattgaagcatatcttgaaagaattggctataagaagtctaggaacaaattggacttggaaacattaactgacattcttcaacaccagatccgagctgttccctttgagaaccttaacatccattgtggggatgccatggacttaggcttagaggccatttttgatcaagttgtgagaagaaatcggggtggatggtgtctccaggtcaatcatcttctgtactgggctctgaccactattggttttgagaccacgatgttgggagggtatgtttacagcactccagccaaaaaatacagcactggcatgattcaccttctcctgcaggtgaccattgatggcaggaactacattgtcgatgctgggtttggacgctcataccagatgtggcagcctctggagttaatttctgggaaggatcagcctcaggtgccttgtgtcttccgtttgacggaagagaatggattctggtatctagaccaaatcagaagggaacagtacattccaaatgaagaatttcttcattctgatctcctagaagacagcaaataccgaaaaatctactcctttactcttaagcctcgaacaattgaagattttgagtctatgaatacatacctgcagacatctccatcatctgtgtttactagtaaatcattttgttccttgcagaccccagatggggttcactgtttggtgggcttcaccctcacccataggagattcaattataaggacaatacagatctaatagagttcaagactctgagtgaggaagaaatagaaaaagtgctgaaaaatatatttaatatttccttgcagagaaagcttgtgcccaaacatggtgatagattttttactatttagaataaggagtaaaacaatcttgtctatttgtcatccagctcaccagttatcaactgacgacctatcatgtatcttctgtacccttaccttattttgaagaaaatcctagacatcaaatcatttcacctataaaaatgtcatcatatataattaaacagctttttaaagaaacataaccacaaaccttttcannnnnnnnnnnnnnnnnnnnnnnnnnnngtcttttaaagatggcctgtggttatcttggaaattggtgatttatgctagaaagcttttaatgttggtttattgttgaattcctagaaaagttttatgggtagatgagtaaataaaatattgt

SEQ ID NO: 183691 - DNA, 1453 bp, Homo Sapiens
  misc_feature (1058)..(1073): n is a, c, g, or t
ttggctctgctctatagttgtgaaatgaagagtgaaaacaaatttgtttgactattttaaaattatattagaccttaagctgttttagcaagcattaaagcaaatgtatggctgccttttgaaatatttgatgtgttgcctggcaggatactgcaaagaacatggtttattttaaaatttataaacaagtcacttaaatgccagttgtctgaaaaatcttataaggttttacccttgatacggaatttacacaggtagggagtgtttagtggacaatagtgtaggttatggatggaggtgtcggtactaaattgaataacgagtaaataatcttacttgggtagagatggcctttgccaacaaagtgctgggattacaggcttgagcaaccatgtttggcctttcttttaaatttgttgatgttttttgaagcattaagtcattacttattagcaagttactattttgtttttttgtcattggtggtaggactaagaaggaaacagatattttaaatactcacaacatgtgattcattttctgataaaatatttgtctaataaaacagaggcaagataatttaatcaaaagaaattaagaaaattttccaaaaatgttagtttactagtaatttttctaagtctacttattaaataacttaagggaaactgtaaatatattttgcaaattgttgttcaaaagataattggaaaaaattgaatatattgtaggatttgaatatacagcctacttttatgtcacctctaccttcaaaactacatataatttattttaggagttggatttgttatgtctgttgcagtgaggacttgtgattcactggtatgaagaattttttgatgtttatattagtaacaaaattatacaaggatagaatctcatctagaaaatgcaaactattgttgaaaagcagttagcatttccacacaaccgctgtccccagagataactgctgttttcattttaatgttatccttttagaccttttctctatttacaaaaatgttacgtgtttctatgtgtacatagttttgggnnnnnnnnnnnnnnnnacgtaagtggcagacactttattgcacatgaaatttgtaatttttttctatttaagtacacatttggaaattatcctctgacttttggatttttaactaaatatgttggacgtgttcctttatatatttaagttcagcacagaaactttcctacctttttgtggaagataaaatattaaaactgctttcaaaactacaaattgacttaaactgctatagtaattttcaattaaatttcattatacctggagtttgaacgttaagggtttttatcatatactgtaattcaaaaatttacctaaatctcagtgtaaaattcttttttttcttattactatgaaatggatggaataggaggggggaacacaactagcaagaac

SEQ ID NO: 183692 - DNA, 2185 bp, Homo Sapiens
ttggggaaaggcgagaaagaagctgtctccatcttgtctgtatccgctgctcttgtgacgttgtggagatggggagcgtcctggggctgtgctccatggcgagctggataccatgtttgtgtggaagtgccccgtgtttgctatgccgatgctgtcctagtggaaacaactccactgtaactagattgatctatgcacttttcttgcttgttggagtatgtgtagcttgtgtaatgttgataccaggaatggaagaacaactgaataagattcctggattttgtgagaatgagaaaggtgttgtcccttgtaacattttggttggctataaagctgtatatcgtttgtgctttggtttggctatgttctatcttcttctctctttactaatgatcaaagtgaagagtagcagtgatcctagagctgcagtgcacaatggattttggttctttaaatttgctgcagcaattgcaattattattggggcattcttcattccagaaggaacttttacaactgtgtggttttatgtaggcatggcaggtgccttttgtttcatcctcatacaactagtcttacttattgattttgcacattcatggaatgaatcgtgggttgaaaaaatggaagaagggaactcgagatgttggtatgcagccttgttatcagctacagctctgaattatctgctgtctttagttgctatcgtcctgttctttgtctactacactcatccagccagttgttcagaaaacaaggcgttcatcagtgtcaacatgctcctctgcgttggtgcttctgtaatgtctatactgccaaaaatccaagaatcacaaccaagatctggtttgttacagtcttcagtaattacagtctacacaatgtatttgacatggtcagctatgaccaatgaaccagaaacaaattgcaacccaagtctactaagcataattggctacaatacaacaagcactgtcccaaaggaagggcagtcagtccagtggtggcatgctcaaggaattataggactaattctctttttgttgtgtgtattttattccagcatccgtacttcaaacaatagtcaggttaataaactgactctaacaagtgatgaatctacattaatagaagatggtggagctagaagtgatggatcactggaggatggggacgatgttcaccgagctgtagataatgaaagggatggtgtcacttacagttattccttctttcacttcatgcttttcctggcttcactttatatcatgatgacccttaccaactggtacaggtatgaaccctctcgtgagatgaaaagtcagtggacagctgtctgggtgaaaatctcttccagttggattggcatcgtgctgtatgtttggacactcgtggcaccacttgttcttacaaatcgtgattttgactgagtgagacttctagcatgaaagtcccactttgattattgcttatttgaaaacagtattcccaatttttgtaaagttgtgtatgtttttgcttcccatgtaacttctccagtgttctggcatgaattagattttactgcttgtcattttgttattttcttaccaagtgcattgatatgtgaagtagaatgaattgcagaggaaagttttatgaatatggtgatgagttagtaaaagtggccattattgggcttattctctgctctatagttgtgaaatgaagagtaaaaacaaatttgtttgactattttaaaattatattagaccttaagctgttttagcaagcattaaagcaaatgtatggctgccttttgaaatatttgatgtgttgcctggcaggatactgcaaagaacatggtttattttaaaatttataaacaagtcacttaaatgccagttgtctgaaaaatcttataaggttttacccttgatacggaatttacacaggtagggagtgtttagtggacaatagtgtaggttatggatggaggtgtcggtactaaattgaataacgagtaaataatcttacttgggtagagatggcctttgccaacaaagtgaactgttttggttgttttaaactcatgaagtatgggttcagtggaaatgtttggaactctgaaggatttagacaaggttttgaaaaggataatcatgggttagaaggaagtgtttgaaagtcactttgaaagttagtt

SEQ ID NO: 183693 - DNA, 1069 bp, Homo Sapiens
ttggctatcaacctgttttgttggactcctaaaagtgctacttacagacagcatgctcaacctccaaagccatcttctgacagcagtggaggcagaagttcggcaccttatttctctgctgagtgtccagatcctccaaagacagatctgtcaagagaatccatcccattaaatgacctgaagtcagaagtatcaccacggatttcagcagaggacctgattgacttgtgtgagctcacagtgacaggccacttcaaaacacccagcaagaaaacaaagtccagtaaaccaaagctcctggtggttgacatccggaatagtgaagactttattcgtggtcacatttcaggaagcatcaacattccattcagtgctgccttcactgcagaaggggagcttacccagggcccttacactgctatgctccagaacttcaaagggaaggtcattgtcatcgtggggcatgtggcaaaacacacagctgagtttgcagctcaccttgtgaagatgaaatatccaagaatctgtattctagatggtggcattaataaaataaagccaacaggcctcctcaccatcccatctcctcaaatatgaagaaccaagagtgtgactgccaaaacttagtgtggcatcagcaccaacagcacagttcttcatatccacgccactctcagacaaaactagatgtccagattgttgcatttccgtaaagtttgtcacgagacattttttaaaatctcataacccacatgttcagttatccatgcaagaaacttgactctacatgtattgctgaaagaattttcttaacagtgaaatctgatcatatatttttaccacactgccacataaagcccaagaaattcagctgacaagacagatttagcattttcaagaaatcccatttgccctgaaaaagctgtcctccattgtactgaacagacagtcctgtcgattgtgttatttagaaacatacactgaatgtgggctgaaatcatcatctttccataatgaaaactgagaaactattcacaaatgcattccttataaataaatgctacattta

SEQ ID NO: 183694 - DNA, 1580 bp, Homo Sapiens
  misc_feature (323)..(354): n is a, c, g, or t
  misc_feature (1032)..(1071): n is a, c, g, or t
  misc_feature (1200)..(1220): n is a, c, g, or t
ttggctaaaattatactttcactaatttttattttttgtttaagattgctgatatgctttattcacttttacaggccctagatggtcagaatatttataatgcctgctgtaccctaaggattgatttttccaaacttgtgaatttgaatgtaaaatacaacaatgataaaagtagggattatactcgacctgatcttccatctggggatggacaacctgcattggacccagctattgctgcagcatttgccaaggagacatccctcttagggcttcctgttgcagctgttccaggagctctgagtcctttggccattccaaannnnnnnnnnnnnnnnnnnnnnnnnnnnnnnngccgagtgggtatgcctggagtctcagctggtggcaatacagtcctgttggttagcaatttaaatgaagaggtgtttatggagatgtgcagcgtgtgaagattttatacaataagaaagacagcgctctaatacagatggctgatggaaaccaatcacaacttgccatgaatcatcttaatggacagaaaatgtatggaaaaattattcgtgttactctgtctaaacatcagactgtacagctacctcgagagggacttgatgatcaagggctaacaaaagattttggtaattccccattgcatcgttttaagaaacctggatccaaaaattttcaaaacatttttcctccttctgccacccttcacctatctaatatccctccatcagtagcagaagaggatctacgaacactgttcgctaacactgggggcactgtgaaagcatttaagttttttcaagatcacaaaatggctcttcttcagatggcaacagtggaagaagctattcaggccttgattgatcttcataattataaccttggagaaaaccatcatctgagagtgtctttctccaagtcaacaatttaaaaatgggaagatgaagattgggggtgaatcacattgttcaatgtcatcacctatttgactgttcagaaaagtggggaccagagtttgannnnnnnnnnnnnnnnnnnnnnnnnnnnnnnnnnnnnnnnccatgctgttatcattccttggttataaaatgaaatggcatatgtaaaggcagagttgttaactgctatatttcatctgttctatagggaagccattttgtctgtttaaaatttcagtttaattttgcnnnnnnnnnnnnnnnnnnnnncctttcaacttagttgacatacgtgccttaaaaaggaaaactagtgttgctattgtgcatttactaaaaaaaaggaattggttgtttagggcacactgttatatgggaattaaaatatgtttaggcaggggtgtgtaaaaaggttaagtttttgtttctcctgcttggaacttattttgaattactggcttgtcacctttttttctatttaatcaaataagatacatgatattgaaagaataaagcagcatttttagtttttactaccttaggctttattgctttgaaaacaacattggccttttgtatctcacaattctggtctagattcagttatgaatgtaggcattagttaaaatt

SEQ ID NO: 183695 - DNA, 1286 bp, Homo Sapiens
  misc_feature (951)..(990): n is a, c, g, or t
  misc_feature (1119)..(1133): n is a, c, g, or t
ttgggcactttggcttaaagttgaatagtaaatcttttgctatttttctttgctatttaaaactctccatagacacaaaatttgttttaatgcatgctaatttattttgcatggtctttaatttaatatcattcacatagctttgagggtttatcaaaaattattcttttcaaaattcactgttcaaaatcttgatcttctttattcatttgtgagaatgatgagattgagtgatcatgttgatgtctgaatgtttcattgatatgtcagaaagataatctttaggtgacttccacataaaattaattccatttttggattacctctctgtggctccaaaaaaggtgtttatggagatgtgcagcgtgtgaagattttatacaataagaaagacagcgctctaatacagatggctgatggaaaccaatcacaacttgccatgaatcatcttaatggacagaaaatgtatggaaaaattattcgtgttactctgtctaaacatcagactgtacagctacctcgagagggacttgatgatcaagggctaacaaaagattttggtaattccccattgcatcgttttaagaaacctggatccaaaaattttcaaaacatttttcctccttctgccacccttcacctatctaatatccctccatcagtagcagaagaggatctacgaacactgttcgctaacactgggggcactgtgaaagcatttaagttttttcaagatcacaaaatggctcttcttcagatggcaacagtggaagaagctattcaggccttgattgatcttcataattataaccttggagaaaaccatcatctgagagtgtctttctccaagtcaacaatttaaaaatgggaagatgaagattgggggtgaatcacattgttcaatgtcatcacctatttgactgttcagaaaagtggggaccagagtttgannnnnnnnnnnnnnnnnnnnnnnnnnnnnnnnnnnnnnnnccatgctgttatcattccttggttataaaatgaaatggcatatgtaaaggcagagttgttaactgctatatttcatctgttctatagggaagccattttgtctgtttaaaatttcagtttaattttgcnnnnnnnnnnnnnnncctttcaacttagttgacatacgtgccttaaaaaggaaaactagtgttgctattgtgcatttactagaaaaaaggaattggttgtttagggcacactgttatatgggaatttaaaatatgtttaggcaggggtgtgtaaaaaggttaagtttt

SEQ ID NO: 183696 - DNA, 1737 bp, Homo Sapiens
ttgggggggagtcggaggaggtggcggcgctggagctcctcccggggaccagcgacccggggagcgagcacgtcgctccgcaccgctcttcctccagccgctgagccgtcccttctcgccatgtcccagagcaggcaccgcgccgaggccccgccgctggagcgcgaggacagtgggaccttcagtttggggaagatgataacagctaagccagggaaaacaccgattcaggtattacacgaatacggcatgaagaccaagaacatcccagtttatgaatgtgaaagatctgatgtgcaaatacacgtgcccactttcaccttcagagtaaccgttggtgacataacctgcacaggtgaaggtacaagtaagaagctggcgaaacatagagctgcagaggctgccataaacattttgaaagccaatgcaagtatttgctttgcagttcctgaccccttaatgcctgacccttccaagcaaccaaagaaccagcttaatcctattggttcattacaggaattggctattcatcatggctggagacttcctgaatataccctttcccaggagggaggacctgctcataagagagaatatactacaatttgcaggctagagtcatttatggaaactggaaagggggcatcaaaaaagcaagccaaaaggaatgctgctgagaaatttcttgccaaatttagtaatatttctccagagaaccacatttctttaacaaatgtagtaggacattctttaggatgtacttggcattccttgaggaattctcctggtgaaaagatcaacttactgaaaagaagcctccttagtattccaaatacagattacatccagctgcttagtgaaattgccaaggaacaaggttttaatataacatatttggatatagatgaactgagcgccaatggacaatatcaatgtcttgctgaactgtccaccagccccatcacagtctgtcatggctccggtatctcctgtggcaatgcacaaagtgatgcagctcacaatgctttgcagtatttaaagataatagcagaaagaaagtaaatctggagcaacttaaaaaatctttcagtagcacataaaaagttcccctctggccccttcccaagtaaaacttttaccgtagtgtttatgtcttgtttctaaatctcttcatagattccatcaacactccagatttaattatctcctcatagttgttattaagctctttttaatggcttcaactttgtatcagtatactgtatttataaactttgtaccacaagagagagtgtagcacccattttacagtgccatgcacatcagagaaagaaactgcatgtttgttgttgatgatgaaataaaaatgctagcgacagtctttcttactggtgcttaagctcttctttgcacaaagctttataaagggaattcaaaggaagccctttagaattagagtcttgagggacagcactaacaggcctttattaagtatgattgattgttaaatttcagggaacatgattggtctgctgtgtatttgaattcatgtaacaaagaactgttacgatgggattctgctcattttattaaaaagctactgacttgactgtcatcctgttcttgttagccattgtgaataagattttaatgttgataattctgttatttacatatctctaatttactttgaaattcaaaggtgaaaataaaaaatgatggcctaagtaaaattta

SEQ ID NO: 183697 - DNA, 1496 bp, Homo Sapiens
  misc_feature (155)..(164): n is a, c, g, or t
  misc_feature (384)..(394): n is a, c, g, or t
  misc_feature (886)..(936): n is a, c, g, or t
  misc_feature (1062)..(1082): n is a, c, g, or t
  misc_feature (1167)..(1187): n is a, c, g, or t
ttggatagaaagagttctatggagactttgctgttactgcttctctttgtgcagtgttagtattcaccctgggcagtgagtgccatgctttttggtgagggcagatcccagcacctattgaattaccatagagtaatgatgtaacagtgcaagannnnnnnnnnaagtgacataattgtccagttataagcgtatttagactgtggccatatatgctgtatttctttgtagaataaatggtttctcattaaactctaaagattagggaaaatggatatagaaaatcttagtatagtagaaagacatctgcctgtaattaaactagtttaagggtggaaaaatgcccatttttgctaattatcaatgggatatgattggttcagnnnnnnnnnnnccagagttgttgtttgccaagctaatctgcctggttttatttatatcttgttattaatgtttcttctccaattctgaaatacttttgagtatggctatctatacctgccttttaagtttgaaactaactcatagattgcaaatattggttagtatttaactacatctgcctcggctcacaaattccgattagacctttatccagctagtgccaaataattgatcagatgctgaattgagaataagaatttgaggtctacattcttggttgttaatttagagcgtttggttaaagtatgtccttcagctgactccagtataatctcctctgctcattaaactgattccaggagattggatttgctgtgactagatacagatggagcaaatgtcctaacagagaaatagaggtgatgctgctaaagggagaaatgccaggcggacaaagttcagtgtcgggaattttccccgtgacattcactggggcatgagnnnnnnnnnnnnnnnnnnnnnnnnnnnnnnnnnnnnnnnnnnnnnnnnnnnattcagctagaatttctggtgggttgatggtagggtataatgtgtctgtgttgcttcaaattggtctgaaaggctatcctgctgaaagtcctgctttcctatctagcatttattcctctggcaaannnnnnnnnnnnnnnnnnnnnaaagtaaacttgtgtattgagtcttaactgtatttcagtattttccagccttatgtgttacattattccaatgatacccaacagnnnnnnnnnnnnnnnnnnnnnaacaaaatttcacagttctgtaatgtaggcacttttattttcattgtgatttatatataaggtaatgtagggttatatttgggagtgactgcaagcatttttccatctgtgtgcaactaactgactctgttattgatcccttctcctgccctttcccaggtaaattaaattggtcatggtagatttttttcatagatttgaaaaacttttaggttgttaccaagtatgaagtataaatctggggaagagggttttatttacattttacggtgggtaagaaagccaccttgttaacaaattttttacttt

SEQ ID NO: 183698 - DNA, 1827 bp, Homo Sapiens
  misc_feature (52)..(91): n is a, c, g, or t
  misc_feature (1601)..(1610): n is a, c, g, or t
ttggcgcagagtggagcggggctgggagcaaagcgctgagggagctcggtannnnnnnnnnnnnnnnnnnnnnnnnnnnnnnnnnnnnnnnccgtccccagagaaccatggagtctggcagtaccgccgccagtgaggaggcacgcagccttcgagaatgtgagctctacgtccagaagcataacattcaagcgctgctcaaagattctattgtgcagttgtgcactgctcgacctgagagacccatggcattcctcagggaatactttgagaggttggagaaggaggaggcaaaacagattcagaatctgcagaaagcaggcactcgtacagactcaagggaggatgagatttctcctcctccacccaacccagtggttaaaggtaggaggcgacgaggtgctatcagcgctgaggtctacacggaggaagatgcggcatcctatgttagaaaggttataccaaaagattacaagacaatggccgctttagccaaagccattgaaaagaatgtgctgttttcacatcttgatgataatgagagaagtgatatttttgatgccatgttttcggtctcctttatcgcaggagagactgtgattcagcaaggtgatgaaggggataacttctatgtgattgatcaaggagagacggatgtctatgttaacaatgaatgggcaaccagtgttggggaaggagggagctttggagaacttgctttgatttatggaacaccgagagcagccactgtcaaagcaaagacaaatgtgaaattgtggggcatcgaccgagacagctatagaagaatcctcatgggaagcacactgagaaagcggaagatgtatgaggaattccttagtaaagtctctattttagagtctctggacaagtgggaacgtcttacggtagctgatgcattggaaccagtgcagtttgaagatgggcagaagattgtggtgcagggagaaccaggggatgagttcttcattattttagaggggtcagctgctgtgctacaacgtcggtcagaaaatgaagagtttgttgaagtgggaagattggggccttctgattattttggtgaaattgcactactgatgaatcgtcctcgtgctgccacagttgttgctcgtggccccttgaagtgcgttaagctggaccgacctagatttgaacgtgttcttggcccatgctcagacatcctcaaacgaaacatccagcagtacaacagttttgtgtcactgtctgtctgaaatctgcctcctgtgcctcccttttctcctctccccaatccatgcttcactcatgcaaactgctttattttccctacttgcagcgccaagtggccactggcatcgcagcttcctgtctgtttatatattgaaagttgcttttattgcaccattttcaatttggagcattaactaaatgctcatacacagttaaataaatagaaagagttctatggagactttgctgttactgcttctctttgtgcagtgttagtattcaccctgggcagtgagtgccatgctttttggtgagggcagatcccagcacctattgaattaccatagagtaatgatgtaacagtgcaagannnnnnnnnnaaagtgacataattgtccagttataagcgtatttagactgtggccatatatgctgtatttctttgtagaataaatggtttctcattaaactctaaagattagggaaaatggatatagaaaatcttagtatagtagaagacatctgcctgtaattaaactagtttaatggtggaaaatgcccatttttgctaattatcaatgggatatgattggttca

SEQ ID NO: 183699 - DNA, 1923 bp, Homo Sapiens
ttggttttggtctgaaacccacttggcccaggaaagagaaaaggttgtatgttttgtgttggtgtttcctattttctgcactggaggggaggggactgttgaggttctgtcttttttcttcttttcctcttccctcttcacatcacttggcttcctttcctctctgatgaccgtccgcctatggggttctgacttcactttcctcagcgggtctccagtcccctgacccagctctaaaggcacttaggacccagggaacatttctcacgtgcacattcccctaagagccaccagactgcttcctgccagcctgtgcttgcggcagggagccggggcagggcagaggtgaacttgaagttcaggacttgactctcccacaggtggtgagctggtggctctctggtgagctagtgtctccacagcctgtctccaaggcctcccctatgtacatttcagtgagctcactttgatttttaatcccaccacaagcacatactaattttatttatgattcaaatgtgactcgtgcctgcccatccctgtaatagatggaaggtcagccccggcttaaccacagagcactggcccttcatggctgagctcagagctctggcctcctgctcagactaaaggcacctcctctggcctcacccaagcctcttctaaaaaccatgttgaatgaatccacgttctggaaccccgaggcgggagaagtagggagctgttcgtttaagcagcatacacctaaattgggggtttaaacattaagtaggagcttggggtggaagagggacagccggctgggccacctgagcagaaggtggtaatgaaacacctcagctgggctcttgggagaccttaggaagcaggagaggcaacacctctggctactgatggtgtggcaagttcagaagaggtggtggtggggtaggcgtgatgtcagcagaagccctgcaggctgggtgggcaggacacgtggtgggggccactgaaaccaggcctaggagggagaacaagttccaaaggtgccgactggaagaagggggtaaaagtttgctttggtgagtgagaaaaggctggggcgtgtgatccatcccctcacgtttcagaacttccaggctttctacctcgactctcaccacagccagcacatacacctaggctgtttttccttcctccacacctgagggacgcagcaacagctaggatctgcattttcaggttccgagcctgacccctggaactgaccagcgctcgattgtcagccttggcctggggttttgaccttgccagtgaagtttcggttttgaagtgattaaatgtcacttcctcatcagtttcacttctggaggttttcttatcctactccctggtgccagggacgtacctgggagtttgaatcaggcccatttgagcgtggcagccgtgttgggtgaaggtccggggctcggtgaggcactgggggggttttcgggaggaaaatgaaaatgcttctagaatgagtgaaccacatcatagctctcactgttctgatttttcaatagctactttttttagcagacaccagagccacactcaaatggctaagtaggttatgacctctctggattatttttgaatgcccaactgttgcattcaagttttctgactaataagaaattaagcattcatccttcgtatcactgcagaagcaacagtgggggcacagggagggaactcttgacactgagccactaaaatatggactaattttttggacaaatcttcaaacggactgtgctactgtatttgtctcaaagctaccaagtttgtgcaataagtggaagggatgtcatccttcttcaataaatgctgaatgacattcaagctgattttctagaccactgagaaaatctttatttacataaatttcaataaaatttg

SEQ ID NO: 183700 - DNA, 2380 bp, Homo Sapiens
ttggcgacgtttcgcgccaatttcggttggccggccacagtccaccgcgcggagattggctcagcttccccaggagcaagacctctgagcccgccaagcgcggccgcacggccctcggcagcgatggcactgaaggactacgcgctagagaaggaaaaggttaagaagttcttacaagagttctaccaggatgatgaactcgggaagaagcagttcaagtatgggaaccagttggttcggctggctcatcgggaacaggtggctctgtatgtggacctggacgacgtagccgaggatgaccccgagttggtggactcaatttgtgagaatgccaggcgctacgcgaagctctttgctgatgccgtacaagagctgctgcctcagtacaaggagagggaagtggtaaataaagatgtcctggacgtttacattgagcatcggctaatgatggagcagcggagtcgggaccctgggatggtccgaagcccccagaaccagtaccctgctgaactcatgcgcagatttgagctgtattttcaaggccctagcagcaacaagcctcgtgtgatccgggaagtgcgggctgactctgtggggaagttggtaactgtgcgtggaatcgtcactcgtgtctctgaagtcaaacccaagatggtggtggccacttacacttgtgaccagtgtggggcagagacctaccagccgatccagtctcccactttcatgcctctgatcatgtgcccaagccaggagtgccaaaccaaccgctcaggagggcggctgtatctgcagacacggggctccagattcatcaaattccaggagatgaagatgcaagaacatagtgatcaggtgcctgtgggaaatatccctcgtagtatcacggtgctggtagaaggagagaacacaaggattgcccagcctggagaccacgtcagcgtcactggtattttcttgccaatcctgcgcactgggttccgacaggtggtacagggtttactctcagaaacctacctggaagcccatcggattgtgaagatgaacaagagtgaggatgatgagtctggggctggagagctcaccagggaggagctgaggcaaattgcagaggaggatttctacgaaaagctggcagcttcaatcgccccagaaatatacgggcatgaagatgtgaagaaggcactgctgctcctgctagtcgggggtgtggaccagtctcctcgaggcatgaaaatccggggcaacatcaacatctgtctgatgggggatcctggtgtggccaagtctcagctcctgtcatacattgatcgactggcgcctcgcagccagtacacaacaggccggggctcctcaggagtggggcttacggcagctgtgctgagagactccgtgagtggagaactgaccttagagggtggggccctggtgctggctgaccagggtgtgtgctgcattgatgagttcgacaagatggctgaggccgaccgcacagccatccacgaggtcatggagcagcagaccatctccattgccaaggccggcattctcaccacactcaatgcccgctgctccatcctggctgccgccaaccctgcctacgggcgctacaaccctcgccgcagcctggagcagaacatacagctacctgctgcactgctctcccggtttgacctcctctggctgattcaggaccggcccgaccgagacaatgacctacggttggcccagcacatcacctatgtgcaccagcacagccggcagcccccctcccagtttgaacctctggacatgaagctcatgaagcgttacatagccatgtgccgcgagaagcagcccatggtgccagagtctctggctgactacatcacagcagcatacgtggagatgaggcgagaggcttgggctagtaaggatgccacctatacttctgcccggaccctgctggctatcctgcgcctttccactgctctggcacgtctgagaatggtggatgtggtggagaaagaagatgtgaatgaagccatcaggctaatggagatgtcaaaggactctcttctaggagacaaggggcagacagctaggactcagagaccagcagatgtgatatttgccaccgtccgtgaactggtctcagggggccgaagtgtccggttctctgaggcagagcagcgctgtgtatctcgtggcttcacacccgcccagttccaggcggctctggatgaatatgaggagctcaatgtctggcaggtcaatgcttcccggacacggatcacttttgtctgattccagcctgcttgcaaccctgggggcctcttgttccctgctggcccgccccttgggaaggggcagtgatgcctttgaggggaaggaggagcccctc

SEQ ID NO: 183701 - DNA, 772 bp, Homo Sapiens
  misc_feature (108)..(121): n is a, c, g, or t
tgtacaaagaagaagagcaaaaggagcgggagaaggaagccgagcgggaacggaaccgacagctggagcgagagaaacgtcgggagcacagtcgggagagggacaggnnnnnnnnnnnnnnaagggagcgggacaggggggaccgagatcgggatagggaaagggaccgagaacgaggcagggaaagggatcgcagggacaccaagcgccacagcagaagccggagtcggagcacacctgtgcgggaccggggtgggcgccgctagctgggaaaacactagagctgcaggtaccagccactcggccccagggggttatggccacagagggataggcacagtctccaccaccctggagccaagggtctttcacatcacctatccctacatacataccaaatggaaaagtggccatccttttccccccaaacacacccccttaacctatctcttgggacttagcccgaccctccctctcatttcccattaagtctgagaggcaagagctaggttaggcaaggaggtggttggccagagatggggaacagccaggtgccccagtcctctgatttttcctccatcctgcttaccacctccctgggtacttacagccttctcttgggaacagccggggccaggactgggtcacctatgagctgaatcagcatctcctcctgagtcccagggcccctgcagttcccagtctcttctgtcctgcagcccttgcctctttcccacaggttccactttatatccacctttccttttgttca

SEQ ID NO: 183702 - DNA, 1081 bp, Homo Sapiens
ccaactttgtacaaaaaagttggggcctgtctcctttgtcaagtccttcagacaccaaagcagaatctccagcagagaaagtgccagaggagagtgtcctgcctctggttcagaaaagcacactggctgactactcagcccagaaggatcttgaacctgagtcagacagatctgctcagcccctccctctaaaaattgaggaattagcactggccaaaggaatcactgaagaatgtctgaaacagccatctttggaacagaaggaaggcagaagagcttctcatacccttctcccaagccacagattgaaacagtcagctgattcatcctctagccggtcctcctcatcttcctcctccagttctagatcaagatctcgctctcctgacagttcaggttctcggtctcattcaccgctcagatccaagcagagagatgtagcccaggcacgtactcatgccaaccctcgtggtagacccaagatgggctccagatcaacatcagagtccagatcaaggtcacgttcacgttctcgttcagcatcaagcaacagcagaaaatctctgagccctggagtctccagggacagcagcaccagctatactgaaaccaaagatccctcttctggtcaggaggttgcaactccaccagtgccacaactgcaggtctgtgagccaaaggagaggacttccacctcctcatcctctgtccaagcaaggcgtctgagtcagcctgaatcagctgaaaagcatgtgacccagagttacagcctgagcgggggagcccaaagaagtgtgaagctgaagaggcagagccaccagctgccacacagccccaaacctcagagactcagacctctcatctgccagaatcagaaagaattcatcacactgttgaggagaaggaggaagtgaccatggacacaagtgaaaacagacctgaaaatgatgttccagaacctcccatgcctattgcagaccaagtcagcaatgatgaccgcccggagggcagtgttgaagatgaggagaagaaagagagctcgctgcccaaatcattcaagaggaagatctccgttgtctca

SEQ ID NO: 183703 - DNA, 1503 bp, Homo Sapiens
  misc_feature (272)..(321): n is a, c, g, or t
ggagctgccttggtctttgggaaaaggtcatccagcagcttggcaggtggttcctcctgggctttctctttcttctcactcttgttttctttagacttcgcacgttccatgcgacgggcggtcacgggaccttgatcgggaacgagcccttctcgaactttgtcccgatcccatacacgctccgatcgagtccgctcccgccgctccatttcccgttcccgttatgcccactgttcccgcactgcccgttcctgctcccgctgctctgcccnnnnnnnnnnnnnnnnnnnnnnnnnnnnnnnnnnnnnnnnnnnnnnnnnncgtggtattccctgctcctctgtcttagtttcagagggacggtccaccaagaggcctcggtgataatccagctcatcttgctcggcatagtcagcacaaaggaatttgggattggactggggccatttgaccccgtgcagagctgtgcgggtggcaacagcttcctctactgttgagtacgttacaaagcaatgagatttgatcttgtcaatccagaaggcctcttccaccaaggttcctgtgcgccccaacaactcctttagctggcctaaagtgaaaggacggaccaaattggagatatggacaatgttgctaatcttgccccggggtggggagggcacctgggcagttcggactgggtcatcaatggtaatggaaactccggacttctgctggctaatggaacgtcgagttaaggtatctcctaaagtcactttctttacttcatgctctgcaggtgggggcaaggccacctctactgacacctggggaggtacaggaggttctgcttcaggttccttctcttcttcctcttcttccctctgcccattctcctggccctctgcaggtactacctgagtgactgtccggcatattttcagccccttgtcatgggtcccatcatcgccattacgctctgtctcatcctcagagatgcgagagtcatcagcatgaagatccacaacagcctcctgccccgccaggggtttgatgtcggggatgaggctctttagtgattcagtggtgatactgatggaaggtttcttctgtgtggtggctgtgctggctccccagcgtcgtttccgaccaggctggcccccctctgtgtcactgtttccagctggcacccccttggtagctgagacaacggagatcttcctcttgaatgatttgggcagcgagctctctttcttctcctcatcttcaacactgccctccgggcggtcatcattgctgacttggtctgcaataggcatgggaggttctggaacatcattttcaggtctgttttcacttgtgtccatggtcacttcctccttctcctcaggcaaaccccgagttcggctggattggtctctctggagaaggaggaagagggccaggctgctggtagtggctggctctattgtattggcggagcggcagcgatcagccggagacatgcaggggagccatctccaa

SEQ ID NO: 183704 - DNA, 1548 bp, Homo Sapiens
  misc_feature (746)..(754): n is a, c, g, or t
  misc_feature (1049)..(1063): n is a, c, g, or t
actttgtacaaaaaagttgggttgtattaaaaatagatatataagaaaaaattctttcacttgatgtttgttagaccagaaagtgtgtgtgttctgtagctcagttcccagacagctttttaggtagtggaggaggtggcttcatgtggcacttgggcatttatattccacttgggagggtcaggctgtggccttctggagcaggtggcttgttaaggaatgctagcagggcatggcacgtgagctccggaatagatgtcttcatcacttcttccactgtgtgttgacactgttttccttacctatttcctcagatccccagctttctcctctgctatgcattttcttcacagtgcagcttgcagtccgttgctgaaaatgattataagccctgcataatgttaagctttattgtgattacgtgtatgtttcttctttcttttaagcagacccatacctttccagggtcaaagtacagaatagaatacattgatacaaagtacagaaaaatactttgatttttatccatttcttttactctgtgtaaagacttgagaagtctaattcacaggcaaaccaatacagaattgactgcagttgaacagactagaagtatttgtgggaggagtgacatgaagcatgagttatctgattttttttgtagctgctatatattttaagccttcatttgcaattcatgtaacagttgtgtcataaattacacaataaagcagtcctgttcaaannnnnnnnnaacgtggcttgtagaatttttaaaaaagtgatcttaggtttgttttttcatgcgggatgcagatgggtgctatcagagcctctcccacaccactatagtgtaataatgttattattactctacactgaaacgtattcagagttagatattattttagcttcagttgttctttagaggctttcaaatgtaccgatgatactgtttcttgcactgaatatataaacactccacagtgtttatattgggaagatattgggaaggaaatatatttgtaaaagatgaaggctgtatctannnnnnnnnnnnnnnaaactggttcacttaaattcttttgaggatgggatgtatttttcttgctgttcagtgctttttccttttcatctgttgttctgtggtcacagtgaccttagctacatagcaaactttcccaaatgtattgattacaaataaacagttgttacttagcaagacctgaaaatatgtctgcaggtttctccttgaagcaaatgtgtgggatcattgcatttccagaaatctgcctccttcaccctccgttgacagtatatgtcatgcctcactttcttctagctgagctttaaatcattagagcttaaattgtcagatcgttcattgcctttccagggttatttagtaaagtttgttgaaaacaaaaacgccttttcttggttctttttttcagttattttgaaggtccagcatcctgattaaatgtctgacacattaatgaatgaccagcagccagcttttcagctcttaaaaagacacttatattt

SEQ ID NO: 183705 - DNA, 1248 bp, Homo Sapiens
  misc_feature (280)..(305): n is a, c, g, or t
  misc_feature (787)..(848): n is a, c, g, or t
ttggctttaggccagctaaaggagttgttggggcgcacaggaaccttggtggaagaggccttctggattgacaagatcaaatctcattgctttgtaacgtactcaacagtagaggaagctgttgccacccgcacagctctgcacggggtcaaatggccccagtccaatcccaaattcctttgtgctgactatgccgagcaagatgagctggattatcaccgaggcctcttggtggaccgtccctctgaaactaagacagaggagcagggaataccacggnnnnnnnnnnnnnnnnnnnnnnnnnnggtccagccaccacagcacccccgggcagagcagcgggagcaggaacgggcagtgcgggaacagtgggcagaacgggaacgggaaatggagcggcgggagcggactcgatcagagcgtgaatgggatcgggacaaagttcgagaagggccccgttcccgatcaaggtcccgtgaccgccgccgcaaggaacgtgcgaagtctaaagaaaagaagagtgagaagaaagagaaagcccaggaggaaccacctgccaagctgctggatgaccttttccgaaagaccaaggcagctccctgcatctattggctcccactgactgacagccagatcgttcagaaagaggcagagcgggccgaacgggccaaggagcgggagaagcggcgaaaggagcaagaagaagaagagcaaaaggagcgggagaaggaagccgagcgggaacggaaccgacagctggagcgagagaaacgtcgggagcacagtnnnnnnnnnnnnnnnnnnnnnnnnnnnnnnnnnnnnnnnnnnnnnnnnnnnnnnnnnnnnnntagggaaagggaccgagaacgaggcagggaaagggatcgcagggacaccaagcgccacagcagaagccggagtcggagcacacctgtgcgggaccggggtgggcgccgctagctgggaaaacactagagctgcaggtaccagccactcggccccagggggttatggccacagagggataggcacagtctccaccaccctggagccaagggtctttcacatcacctatccctacatacataccaaatggaaaagtggccatccttttccccccaaacacacccccttaacctatctcttgggacttagcccgaccctccctctcatttcccattaagtctgagaggcagagctagtttaggcaaggaggtggttggccagagatgggacagccaggtgccc

SEQ ID NO: 183706 - DNA, 1837 bp, Homo Sapiens
  misc_feature (1610)..(1673): n is a, c, g, or t
ttggcgcctctctctttactgcggcgcggggcaagatcatggaagggaagtggttgctgtgtatgttactggtgcttggaactgctattgttgaggctcatgatggacatgatgatgatgtgattgatattgaggatgaccttgacgatgtcattgaagaggtagaagactcaaaaccagataccactgctcctccttcatctcccaaggttacttacaaagctccagttccaacaggggaagtatattttgctgattcttttgacagaggaactctgtcagggtggattttatccaaagccaagaaagacgataccgatgatgaaattgccaaatatgatggaaagtgggaggtagaggaaatgaaggagtcaaagcttccaggtgataaaggacttgtgttgatgtctcgggccaagcatcatgccatctctgctaaactgaacaagcccttcctgtttgacaccaagcctctcattgttcagtatgaggttaatttccaaaatggaatagaatgtggtggtgcctatgtgaaactgctttctaaaacaccagaactcaacctggatcagttccatgacaagaccccttatacgattatgtttggtccagataaatgtggagaggactataaactgcacttcatcttccgacacaaaaaccccaaaacgggtatctatgaagaaaaacatgctaagaggccagatgcagatctgaagacctattttactgataagaaaacacatctttacacactaatcttgaatccagataatagttttgaaatactggttgaccaatctgtggtgaatagtggaaatctgctcaatgacatgactcctcctgtaaatccttcacgtgaaattgaggacccagaagaccggaagcccgaggattgggatgaaagaccaaaaatcccagatccagaagctgtcaagccagatgactgggatgaagatgcccctgctaagattccagatgaagaggccacaaaacccgaaggctggttagatgatgagcctgagtacgtacctgatccagacgcagagaaacctgaggattgggatgaagacatggatggagaatgggaggctcctcagattgccaaccctagatgtgagtcagctcctggatgtggtgtctggcagcgacctgtgattgacaaccccaattataaaggcaaatggaagcctcctatgattgacaatcccagttaccagggaatctggaaacccaggaaaataccaaatccagatttctttgaagatctggaacctttcagaatgactccttttagtgctattggtttggagctgtggtccatgacctctgacattttttttgacaactttatcatttgtgctgatcgaagaatagttgatgattgggccaatgatggatggggcctgaagaaagctgctgatggggctgctgagccaggcgttgtggggcagatgatcgaggcagctgaagagcgcccgtggctgtgggtagtctatattctaactgtagcccttcctgtgttcctggttatcctcttctgctgttctggaaagaaacagaccagtggtatggagtataagaaaactgatgcacctcaaccggatgtnnnnnnnnnnnnnnnnnnnnnnnnnnnnnnnnnnnnnnnnnnnnnnnnnnnnnnnnnnnnnnnngagaaacttgaagagaaacagaaaagtgatgctgaagaagatggtggcactgtcagtcaagaggaggaagacagaaaacctaaagcagaggaggatgaaattttgaacagatcaccaagaaacagaagccacgaagagagtgaaacaatcttaagagcttgatc

SEQ ID NO: 183707 - DNA, 1548 bp, Homo Sapiens
  misc_feature (512)..(520): n is a, c, g, or t
  misc_feature (912)..(973): n is a, c, g, or t
  misc_feature (1384)..(1396): n is a, c, g, or t
aaaagaagttgccctttagttgttctcctgttggtggccatttaggtggattgtcacttttgctttcagagtcactgctgctgtaataatccttgtacatgtctgggtgtatgttgtgagtatttctctaggtagttatctagaagtgaattgctggttgatgatcatgtgcgttttattttaaatcaccactgaagaagtacgtactgacttatgctcccactctcattagcagttgctaagagtggaggctgttgaatgggccaggaacttgaggggttggtttggaccaaggtcatgggtgacagtagaaattggaagtagttggaatcctgcagtcttagaggcagagtgcgtaaaataatctgtagcatttgttatttattttcctgttgcttatttcaagtttcatgaagttggcatttctctccattgttcatgcaaaatttctcttacggtagattcaccataaacttttgttgatcattatctgaaatgattttctgaaacannnnnnnnnctagggaatctggaaacccaggaaaataccaaatccagatttctttgaagatctggaacctttcagaatgactccttttagtgctattggtttggagctgtggtccatgacctctgacattttttttgacaactttatcatttgtgctgatcgaagaatagttgatgattgggccaatgatggatggggcctgaagaaagctgctgatggggctgctgagccaggcgttgtggggcagatgatcgaggcagctgaagagcgcccgtggctgtgggtagtctatattctaactgtagcccttcctgtgttcctggttatcctcttctgctgttctggaaagaaacagaccagtggtatggagtataagaaaactgatgcacctcaaccggatnnnnnnnnnnnnnnnnnnnnnnnnnnnnnnnnnnnnnnnnnnnnnnnnnnnnnnnnnnnnnnagaagagaaacttgaagagaaacagaaaagtgatgctgaagaagatggtggcactgtcagtcaagaggaggaagacagaaaacctaaagcagaggaggatgaaattttgaacagatcaccaagaaacagaaagccacgaagagagtgaaacaatcttaagagcttgatctgtgatttcttctccctcctcccctgcaagagtggtcctaggagaggacctggcacaccttaggttgacattcagaaaacttcaagacatcaccatcagcaggctccagttgaacactagtctgtgtaactttaaacatctagcagtaaatacttgcagttgtgatataaaggaccctgtttctgtagaaaagaaaacatttaacataatggttgtgaaatgtaacatgaagcaaactaacnnnnnnnnnnnnnaacatctttgtttttaaaatagaatgatagaactttgccagtctttaagatcttggcttaatttaatgtattaatctgttttgtgcaaacataataccaccatttaaaaatgttagggagatgagttgcagtttttataatagatttttttt

SEQ ID NO: 183708 - DNA, 1043 bp, Homo Sapiens
  misc_feature (958)..(983): n is a, c, g, or t
cctccaaatatgatttctttaagttaaccttttaccaaaactccagccagaggtaacctgtaggtattacggtttgaactagcagaggtcctgagaccatctaactgttgggtctatttcttggggacagcagctaccaagggggtgccagctggaaacagtgacacagaggggggccagcctggtcggaaacgacgctggggagccagcacagccaccacacagaagaaaccttccatcagtatcaccactgaatcactaaaggaggctgttgtggatcttcatgctgatgactctcgcatctctgaggatgagacagagcgtaatggcgatgatgggacccatgacaaggggctgaaaatatgccggacagtcactcaggtagtacctgcagagggccaggagaatgggcagagggaagaagaggaagaagagaaggaacctgaagcagaacctcctgtacctccccaggtgtcagtagaggtggccttgcccccacctgcagagcatgaagtaaagaaagtgactttaggagataccttaactcgacgttccattagccagcagaagtccggagtttccattaccattgatgacccagtccgaactgcccaggtgccctccccaccccggggcaagattagcaacattgtccatatctccaatttggtccgtcctttcactttaggccagctaaaggagttgttggggcgcacaggaaccttggtggaagaggccttctggattgacaagatcaaatctcattgctttgtaacgtactcaacagtagaggaagctgttgccacccgcacagctctgcacggggtcaaatggccccagtccaatcccaaattcctttgtgctgactatgccgagcaagatgagctggattatcaccgaggcctcttggtggaccgtccctctgaaactaagacagaggagcagggaataccacggnnnnnnnnnnnnnnnnnnnnnnnnnnggtccagccaccacagcacccccgggcagagcagcgggagcaggaacgggcagtgcggga

SEQ ID NO: 183709 - DNA, 2017 bp, Homo Sapiens
  misc_feature (893)..(904): n is a, c, g, or t
  misc_feature (1959)..(1968): n is a, c, g, or t
ttgggtatattttccatggatatgttctgtcttaactagaatgcaattcttaaaagtagagaccatgtttcccccaaactccctcacacgttaaaaagttgctggtgcatttaaaaaaagggaatattttcatagggtaatttacaatcttagcaacttgtgatagagtacagagcagcagccttggagtcagtctacttggatagccttccatcttcatgaatccttggtttcttatcctcagaatggggctagtgtgccataggccagtagattgtttgggattaagcaagattaagaaatcacagtgtctgatccttttttaagaaaatgtttatgggttagattgagaaaagtgtatgtttatagaaaacaataaagactaaactgaattagagtaggcataattccaccacctctgagacaaccattcttcttggtgcattttcttctcatcattttcctcatttttttcctcaaataagttaccctcagtctggctgatcttgaaaatatggtgaacttttattattttttaaatgtgctaattataatgaatttcttttcaatcaataggaggatgaaattttgaacagatcaccaagaaacagaaagccacgaagagagtgaaacaatcttaagagcttgatctgtgatttcttctccctcctcccctgcaagagtggtcctaggagaggacctggcacaccttaggttgacattcagaaaacttcaagacatcaccatcagcaggctccagttgaacactagtctgtgtaactttaaacatctagcagtaaatacttgcagttgtgatataaaggaccctgtttctgtagaaaagaaaacatttaacataatggttgtgaaatgtaacatgaagcaaactaacnnnnnnnnnnnnaacatctttgtttttaaaatagaatgatagaactttgccagtctttaagatcttggcttaatttaatgtattaatctgtttgtgcaaacataataccaccatttaaaaatgttagggagatgagttgcagtttttataatagattttttttaaagtttggtattgtaaaacattcacacctctgtccctcaaaattgataattacgtttaaagtgcagtcatttgtggttagaatcttgttttgtttgcttccattattgagttcctcctaaggaaattgaggagagggactgaatagaagcccaaattcatataaaagttgcgtttaagttgtattaaaaatagatatataagaaaaaattctttcacttgatgtttgttagaccagaaagtgtgtgtgttctgtagctcagttcccagacagctttttaggtagtggaggaggtggcttcatgtggcacttgggcatttatattccacttgggagggtcaggctgtggccttctggagcaggtggcttgttaaggaacgctagcagggcatggcacgtgagctccggaatagatgtcttcatcacttcttccactgtgtgttgacactgttttccttacctatttcctcagatccccagctttctcctctgctatgcattttcttcacagtgcagcttgcagtccgttgctgaaaatgattataagccctgcataatgttaagctttattgtgattacgtgtatgtttcttctttcttttaagcagacccatacctttccagggtcaaagtacagaatagaatacattgatacaaagtacagaaaaatactttgatttttatccatttcttttactctgtgtaaagactttagaagtctaattcacaggcaaaccaatacagaattgactgcagttgaacagactagaagtatttgtgggaggagtgacatgaagcatgagttatctgattttttttgtagctgctatatattttaagccttcatttgcaattcatgtaacagttgtgtcataaattacacaataaagcagtcctgttcaaannnnnnnnnnaacgtggcttgtagaatttttaaaaaagtgatcttaggtttgttttttc

SEQ ID NO: 183710 - DNA, 2356 bp, Homo Sapiens
  misc_feature (430)..(509): n is a, c, g, or t
  misc_feature (901)..(912): n is a, c, g, or t
  misc_feature (1967)..(1975): n is a, c, g, or t
  misc_feature (2271)..(2285): n is a, c, g, or t
actttgtacaaaaaagttggattgacaatcccagttaccagggaatctggaaacccaggaaaataccaaatccagatttctttgaagatctggaacctttcagaatgactccttttagtgctattggtttggagctgtggtccatgacctctgacattttttttgacaactttatcatttgtgctgatcgaagaatagttgatgattgggccaatgatggatggggcctgaagaaagctgctgatggggctgctgagccaggcgttgtggggcagatgatcgaggcagctgaagagcgcccgtggctgtgggtagtctatattctaactgtagcccttcctgtgttcctggttatcctcttctgctgttctggaaagaaacagaccagtggtatggagtataagaaaactgatgcacctcaaccggatgnnnnnnnnnnnnnnnnnnnnnnnnnnnnnnnnnnnnnnnnnnnnnnnnnnnnnnnnnnnnnnnnnnnnnnnnnnnnnnnnaaacagaaaagtgatgctgaagaagatggtggcactgtcagtcaagaggaggaagacagaaaacctaaagcagaggaggatgaaattttgaacagatcaccaagaaacagaaagccacgaagagagtgaaacaatcttaagagcttgatctgtgatttcttctccctcctcccctgcaagagtggtcctaggagaggacctggcacaccttaggttgacattcagaaaacttcaagacatcaccatcagcaggctccagttgaacactagtctgtgtaactttaaacatctagcagtaaatacttgcagttgtgatataaaggaccctgtttctgtagaaaagaaaacatttaacataatggttgtgaaatgtaacatgaagcaaactaacnnnnnnnnnnnnaacatctttgtttttaaaatagaatgatagaactttgccagtctttaagatcttggcttaatttaatgtattaatctgtttgtgcaaacataataccaccatttaaaaatgttagggagatgagttgcagtttttataatagattttttttaaagtttggtattgtaaaacattcacacctctgtccctcaaaattgataattacgtttaaagtgcagtcatttgtggttagaatcttgttttgtttgcttccattattgagttcctcctaaggaaattgaggagagggactgaatagaagcccaaattcatataaaagttgcgtttaagttgtattaaaaatagatatataagaaaaaattctttcacttgatgtttgttagaccagaaagtgtgtgtgttctgtagctcagttcccagacagctttttaggtagtggaggaggtggcttcatgtggcacttgggcatttatattccacttgggagggtcaggctgtggccttctggagcacgtggcttgttaaggaacgctagcagggcatggcacgtgagctccggaatagatgtcttcatcacttcttccactgtgtgttgacactgttttccttacctatttcctcagatccccagctttctcctctgctatgcattttcttcacagtgcagcttgcagtccgttgctgaaaatgattataagccctgcataatgttaagctttattgtgattacgtgtatgtttcttctttcttttaagcagacccatacctttccagggtcaaagtacagaatagaatacattgatacaaagtacagaaaaatactttgatttttatccatttcttttactctgtgtaaagacttgagaagtctaattcacaggcaaaccaatacagaattgactgcagttgaacagactagaagtatttgtgggaggagtgacatgaagcatgagttatctgattttttttgtagctgctatatattttaagccttcatttgcaattcatgtaacagttgtgtcataaattacacaataaagcagtcctgttcaaannnnnnnnnaacgtggcttgtagaatttttaaaaaagtgatcttaggtttgttttttcatgcgggatgcagatgggtgctatcagagcctctcccacaccactatagtgtaataatgttattattactctacactgaaacgtattcagagttagatattattttagcttcagttgttctttagaggctttcaaatgtaccgatgatactgtttcttgcactgaatatataaacactccacagtgtttatattggggaagatattgggaaggaaatatatttgtaaaagatgaaggctgtatctannnnnnnnnnnnnnnaaagtttgttcacttaaattcttttgaggatgggatgtatatttcttgctgttcagtgctttttccttttc

SEQ ID NO: 183711 - DNA, 1111 bp, Homo Sapiens
  misc_feature (260)..(315): n is a, c, g, or t
  misc_feature (774)..(835): n is a, c, g, or t
ttggaaaggagttgttggggcgcacaggaaccttggtggaagaggccttctggattgacaagatcaaatctcattgctttgtaacgtactcaacagtagaggaagctgttgccacccgcacagctctgcacggggtcaaatggccccagtccaatcccaaattcctttgtgctgactatgccgagcaagatgagctggattatcaccgaggcctcttggtggaccgtccctctgaaactaagacagaggagcagggaatnnnnnnnnnnnnnnnnnnnnnnnnnnnnnnnnnnnnnnnnnnnnnnnnnnnnnnnngggcagagcagcgggagcaggaacgggcagtgcgggaacagtgggcagaacgggaacgggaaatggagcggcgggagcggactcgatcagagcgtgaatgggatcgggacaaagttcgagaagggccccgttcccgatcaaggtcccgtgaccgccgccgcaaggaacgtgcgaagtctaaagaaaagaagagtgagaagaaagagaaagcccaggaggaaccacctgccaagctgctggatgaccttttccgaaagaccaaggcagctccctgcatctattggctcccactgactgacagccagatcgttcagaaagaggcagagcgggccgaacgggccaaggagcgggagaagcggcgaaaggagcaagaagaagaagagcaaaaggagcgggagaaggaagccgagcgggaacggaaccgacagctggagcgagagaaacgtcgggagcacagtnnnnnnnnnnnnnnnnnnnnnnnnnnnnnnnnnnnnnnnnnnnnnnnnnnnnnnnnnnnnnntagggaaagggaccgagaacgaggcagggaaagggatcgcagggacaccaagcgccacagcagaagccggagtcggagcacacctgtgcgggaccggggtgggcgccgctagctgggaaaacactagagctgcaggtaccagccactcggccccagggggttatggccacagagggataggcacagtctccaccaccctggagccaagggtctttcacatcacctatccctacatacataccaaatggaaaagtggccatccttttccctccaaac

SEQ ID NO: 183712 - DNA, 1135 bp, Homo Sapiens
  misc_feature (364)..(375): n is a, c, g, or t
  misc_feature (778)..(841): n is a, c, g, or t
gaattttttcttatatatctattttttaatacaactaaacgcaacttttatatgaatttgggcttctattcagtccctctcctcaatttccttaggaggaactcaataatggaagcaaacaaaacaagattctaaccacaaatgactgcactttaaacgtaattatcaattttgagggacagaggtgtgaatgttttacaataccaaactttaaaaaaaatctattataaaaactgcaactcatctccctaacatttttaaatggtggtattatgtttgcacaaacagattaatacattaaattaagccaagatcttaaagactggcaaagttctatcattctattttaaaaacaaagatgttnnnnnnnnnnnngttagtttgcttcatgttacatttcacaaccattatgttaaatgttttcttttctacagaaacagggtcctttatatcacaactgcaagtatttactgctagatgtttaaagttacacagactagtgttcaactggagcctgctgatggtgatgtcttgaagttttctgaatgtcaacctaaggtgtgccaggtcctctcctaggaccactcttgcaggggaggagggagaagaaatcacagatcaagctcttaagattgtttcactctcttcgtggctttctgtttcttggtgatctgttcaaaatttcatcctcctctgctttaggttttctgtcttcctcctcttgactgacagtgccaccatcttcttcagcatcacttttctgtttctcttcaagttnnnnnnnnnnnnnnnnnnnnnnnnnnnnnnnnnnnnnnnnnnnnnnnnnnnnnnnnnnnnnnnncttcacatccggttgaggtgcatcagttttcttatactccataccactggtctgtttctttccagaacagcagaagaggataaccaggaacacaggaagggctacagttagaatatagactacccacagccacgggcgctcttcagctgcctcgatcatctgccccacaacgcctggctcagcagccccatcagcagctttcttcaggccccatccatcattggcccaatcatcaactattcttcgatcagcacaaatgataaagttgtcaaaaaccaacttttttgtacaaag

SEQ ID NO: 183713 - DNA, 1656 bp, Homo Sapiens
  misc_feature (370)..(381): n is a, c, g, or t
  misc_feature (793)..(853): n is a, c, g, or t
agtgaaagaattttttcttatatatctatttttaatacaacttaaacgcaacttttatatgaatttgggcttctattcagtccctctcctcaatttcttaggaggaactcaataatggaagcaaacaaaacaagattctaaccacaaatgactgcactttaaacgtaattatcaattttgagggacagaggtgtgaatgttttacaataccaaactttaaaaaaaatctattataaaaactgcaactcatctccctaacatttttaaatggtggtattatgtttgcacaaacagattaatacattaaattaagccaagatcttaaagactggcaaagttctatcattctattttaaaaacaaagatgttnnnnnnnnnnnngttagtttgcttcatgttacatttcacaaccattatgttaaatgttttcttttctacagaaacagggtcctttatatcacaactgcaagtatttactgctagatgtttaaagttacacagactagtgttcaactggagcctgctgatggtgatgtcttgaagttttctgaatgtcaacctaaggtgtgccaggtcctctcctaggaccactcttgcaggggaggagggagaagaaatcacagatcaagctcttaagattgtttcactctctttgtggctttctgtttcttggtgatctgttcaaaatttcatcctcctctgctttaggttttctgtcttcctcctcttgactgacagtgccaccatcttcttcagcatcacttttctgtttctcttcaagtttctcttctcnnnnnnnnnnnnnnnnnnnnnnnnnnnnnnnnnnnnnnnnnnnnnnnnnnnnnnnnnnnnnatccggttgaggtgcatcagttttcttatactccataccactggtctgtttctttccagaacagcagaagaggataaccaggaacacaggaagggctacagttagaatatagactacccacagccacgggcgctcttcagctgcctcgatcatctgccccacaacgcctggctcagcagccccatcagcagctttcttcaggccccatccatcattggcccaatcatcaactattcttcgatcagcacaaatgataaagttgtcaaaaaaaatgtcagaggtcatggaccacagctccaaaccaatagcactaaaaggagtcattctgaaaggttccagatcttcaaagaaatctggatttggtattttcctgggtttccagattccctggtaactgggattgtcaatcataggaggcttccatttgcctttataattggggttgtcaatcacaggtcgctgccagacaccacatccaggagctgactcacatctagggttggcaatctgaggagcctcccattctccatccatgtcttcatcccaatcctcaggtttctctgcgtctggatcaggtacgtactcaggctcatcatctaaccagccttcgggttttgtggcctcttcatctggaatcttagcaggggcatcttcatcccagtcatctggcttgacagcttctggatctgggatttttggtctttcatcccaatcctcgggcctccggtcttctgggtcctcaatttcacgtgaaggatttacaggagagagtcatgtcattgagccaacttttttgtacaaag

SEQ ID NO: 183714 - DNA, 1856 bp, Homo Sapiens
ttgggtctccagagaagatggctcgtcttcacctagtatcttgacattgacagccattcgccaccatgtccttggaactatcaccaccgacaaaatgatggatgtcactgtgactatcaagtcttccatcgacagtgaacccgccttggtcttaggccctctgaagtctgtgcaggagctgcggagggagcagcagctggctgagatcgaggcccgcaggcaggagagggagaaaaacggcaatgaggaaggtgaagaaagaatgaccaagcctcccgtgcaggagatggtagatgagttacaaggccccttctcgtatgatttctcttactgggcgcggtctggagagaaaatcactgttacaccgtcatctaaagagctgctcttttatcccccttcaatggaagccgttgtcagtggagaaagctgcccagggaagctgatcgagatccacgggaaggcaggcctgtttttagaaggccagatccaccccgagttggaaggagtcgagattgtcatcagtgaaaagggggcaagttcaccgctgatcacagtctttactgatgacaaaggtgcctacagtgttggccccctgcacagtgacctggagtacacggtgacctcacagaaggagggctatgttctgactgcagtggaaggaaccatcggagacttcaaggcctatgccctggcaggcgtaagctttgagataaaagctgaggatgaccagcccctcccgggagtcctcttatccctgagtggtggcctgtttcgttccaacctcttgacccaggacaacggcattctgacattctcaaacctgagccctggccagtattacttcaaacccatgatgaaggagttccggtttgagccatcctcacagatgatcgaggtgcaggaaggccagaacctgaagatcaccatcacggggtaccgaaccgcttacagttgctatggcacagtgtcttccttaaacggagagcccgaacaaggggttgccatggaagcggtgggccagaacgactgcagcatttacggagaagacaccgtgacagacgaagagggcaagttcagattacgtggattgctgccgggatgtgtgtaccacgttcagctcaaggcagaaggcaacgaccacattgagcgggcgctcccccaccatagggtgattgaggttgggaataatgacatcgatgatgtaaacatcatagttttccggcagattaatcaatttgatttaagtggaaatgtgatcacttcctctgaataccttcctacgttatgggtcaagctttacaaaagcgaaaacctcgacaatccaatccagacagtttcccttggccagtccctgttcttccatttccccccactgctcagagatggcgagaactatgttgtgcttctggactccacactccccagatcccagtatgactacatcttgcctcaagtttctttcaccgcagtgggctaccataaacacatcaccttgatttttaatcccacgaggaagctgcctgaacaggacatcgcacaaggatcctacattgccctgccattgacgctgctggttctgctggccggttacaaccatgacaagctcattcctttgctgctgcagttgacaagccggctacagggagtcggcgcgctcggccaggcagcctctgacaatagcggcccagaagatgcaaagagacaagccaagaaacagaagacaaggcggacgtgaggaggaaggggacagttgcagtctcacttgggacaggccacagccaggggtccggccactacccgcccgtgggataaaagccaaaagcatgcgtcagctaacttcagcctgtgctgctggg

SEQ ID NO: 183715 - DNA, 2425 bp, Homo Sapiens
ataaaagagcagctctttagatgacggtgtaacagtgattttctctccagaccgcgcccagtaagagaaatcatacgagaaggggccttgtaactcatctaccatctcctgcacgagaggcttggtcattctttcttcaccttcctcattgccgtttttctccctctcctgcctgcgggcctcgatctcagccagctgctgctccctccgcagctcctgcacagacttcagagggcctaagaccaaggcgggttcactgtcgatggaagacttgatagtcacagtgacatccatcattttgtcggtggtgatagttccaaggacatggtggcgaatggctgtcaatgtcaagatactaggtgaagacgtgtcataggtgtagaacgcttgctcaaaccggtggcaggagcgaggggtcactttgtacacaccaggcttggacaggcagaatcggttgactcctttggagaggttataaatccccacattctcacgcccatttccatcctgataaaattccagagtgatggcgtgagacagggaacatctcagcatgtagcccgtctgcctgaactcaactgcagacatgtcatcctccagcacttccacctccaggctcttgttcttccagcaccaatcctcatgcatgatgcttattttgtattttccagggagcacgttgtcaaaggtgaaagtcatggcgttgaccttgccggagagctggaggctccgcttctcaccctggcggctcagggactgtagagtcaccagcaagtcaccacaggtgtccaaacaagagactttcccagaaactgatgccaagaactgtacaaaggccacatccatcatgggcctgttggtcacagtaagaggaaatgtctggggtttcaacgtcagccctgctctggtttctgcctcaggaaccatcacctgcactttgtaagtccctggttttgctttaaaacaaaatgatccatgagcatctgtctccacggtgaccaaagacttgtccttgtcttgagatgacaggacaactttgtatttattcatctgcttgacggtgtcggggaagcgaatgattgatatctgaccacagacactgaaccctgttgcaataatgtcagccagctgaggtgtgttcggtgcaattttgatggtgaccgtttcaaagtagaggtgctctttctgagcatggatggtgtatgtccctgtggttatgttctcaaggcggaatgagccatcagcttttgttttaactttgatttggttattcagggtgactactgcttctggaacaccatctccttcgggtccgttcaagaccctcccggtgacggagaatcccatgacgtggaacacgggctcgattttcaagctgtcatgctccactgtgaagtcaagtctggaaggcgccacatcaaaggtaatcctctcccctcgatagaacggaatcacagtgtagcccccacttggcaaggaatagaaagagaacgagccatcttctctggagaccgtgtagcacaaatacaccagactctcgtcttggggctggaacccaggcactggtgagacattgcagcccaggacatcctctttagttactaaagaagaaaagagaagaaacttcacccctttcatgggctccccatcacttcggacagagccagacacattgtagccagcaactatgaggggactggccgcattggcattggagttggttacacgcactgtggtgcttgcctctttcaacgcccaggttggatgagttgcgaggatttcataatctccaggcagaactttaaaaaatgcaaactttccgccaggctgtgtaactgtggactggatctttgcttcggtcccagtgtttctcagagacacctgaactcccgcaggacccaggggctgccctttgctgaggaccttgccattcacagagaacccagtgaagacaaagttgatgtccccaccctttgtgcagatgtcactgactccatccacatggagctccacggtcgtcggctcaaaactccaccctaggggaggctcaatcttcagaatgaaatcccccttatcatacaaagggatcataaagtaaccattattaggggcacagtctgtctggtatttcaaagtcccatgcttggtgtacagctttatctcgatgagagagtagttgatctccacgtccgacttgacgaagccaccgcagcccaccacgatgtcctccgagccgtgcgccggccccacgccgctcagcagcagcaccaccgcggcggtgaccaccgcgggccccagcggccccgcgccctggcccaccagcatggcccgacctcccccagctagacccaccgccggcagccgggtcccgcccctcacactgcacgccgcaggctccttcctcctcctaggccggcggccccaa

SEQ ID NO: 183716 - DNA, 1209 bp, Homo Sapiens
ccaactttgtacaaaaaagttggtccctgaatccataaaggtatatggcgccattttcaacataaaagataaaaaccctttcaacatggaggtgctggtagatgcctggccagattaccagatcgtcattacccggcctcagaaacaggagatgaaagatgaccaggatcattataccaacacttaccacatcttcaccaaagctcctgacaaattagaggaagtcctgtcatactccaatgtaatcagctgggagcaaactttgcagatccaaggttgccaagagggcttggatgaagcaataagaaaggttgcaacttcaaaatcagtgcaggtagattacatgaaaaccatcctctttataccggaattaccaaagaaacacaagacctcaagtaatgacaagatggagttatttgaagtggatgatgataacaagaaaggaaacttttcaaacatgttcttagatgcttcacatgcaggtcttgtgaatgaacactgggcctttgggaaaaatgagaggagcttgaaatatattgaacgctgcctccaggattttctaggatttggtgtgctgggtccagagggccagcttgtctcttggattgtgatggaacagtcctgtgagttgagaatgggttatactgtccccaaatacagacaccaaggcaacatgttgcaaattggttatcatcttgaaaagtatctttctcagaaagaaatcccattttatttccatgtggcagataataatgagaaaagcctacaggcactgaacaatttggggtttaagatttgtccttgtggctggcatcagtggaaatgcacccccaagaaatattgttgattgattccactgtccatttcaaatctttcttatcagtaaaaaaacattaattcaaacacaagcattgtgatctacattagcacaaaatgcaactgattatctaggatctgtgtattacttaagctcacccttaacagttttaccttccttctcctctgtattcttacagaaaattagaagctcaattttatggtctcataatttcctttatgacagacatctcagaattaaaatcacccaaagccaatcattagtgccaagataaccctttaacggcaacactttcttaaatgaagactatttctttcatgaaaaaattcacttttatgactttcttgttaaaataaaaagtctgcttttaa

SEQ ID NO: 183717 - DNA, 1096 bp, Homo Sapiens
atagagcaatgcttttttataatgccaactttgtacaaaaaagttggttggctgctcaatacggaacatattctcagtcctcctctggtctacaaagcctgtgatttcttgtctatggacagaacgtctggtttaatctacaggaacccataagttcctgaagctttatgcttaacagtgacaacgtgagtcagttgaattttattgtgtttcagtccatagagtattagctacagaaacctttccattgccatactgagaaagtgcagcaggcagtgtgcctacaggtctacaaagaaacttcagatcatcttcttgagggaaagaagctgaagtgctacataagatgcttgtgcttcataactctcagaagctgcagattctgtataaatccttagaaaagagcatccctgaatccataaaggtatatggcgccattttcaacataaaagataaaaaccctttcaacatggaggtgctggtagatgcctggccagattaccagatcgtcattacccggcctcagaaacaggagatgaaagatgaccaggatcattataccaacacttaccacatcttcaccaaagctcctgacaaattagaggaagtcctgtcatactccaatgtaatcagctgggagcaaactttgcagatccaaggttgccaagagggcttggatgaagcaataagaaaggttgcaacttcaaaatcagtgcaggtagattacatgaaaaccatcctctttataccggaattaccaaagaaacacaagacctcaagtaatgacaagatggagttatttgaagtggatgatgataacaagaaaggaaacttttcaaacatgttcttagatgcttcacatgcaggtcttgtgaatgaacactgggcctttgggaaaaatgagaggagcttgaaatatattgaacgctgcctccaggattttctaggatttggtgtgctgggtccagagggccagcttgtctcttggattgtgatggaacagtcctgtgagttgagaatgggttatactgtccccaatacagacaccaaaggcaacatgttgcaaattgggttatcatcttgaaaagtatccttt

SEQ ID NO: 183718 - DNA, 970 bp, Homo Sapiens
tttgtacaaaaaagttggggaaaattgacttaatattgttctagaatagcctttcagctacaagaggttatatataaatcaaaagcttcttgagtaaaacttcttagaattgtagaagctgctcaatacggaacatattctcagtcctcctctggtctacaaagcctgtgatttcttgtctatggacagaacgtctggtttaatctacaggaacccataacttcctgaagctttatgcttaacagtgacaacgtgagtcagttgaattttattgtgtttcagtccgtagagtattagctacagaaacctttccattgccatactgagaaactgcagcaggcagtgtgcctacaggtctacaaagaaacttcagatcatcttcttgagggaaagaagctgaagtgctacataagatgcttgtgcttcataactctcagaagctgcagattctgtataaatccttagaaaagagcatccctgaatccataaaggtatatggcgccattttcaacataaaagataaaaaccctttcaacatggaggtgctggtagatgcctggccagattaccagatcgtcattacccggcctcagaaacaggagatgaaagatgaccaggatcattataccaacacttaccacatcttcaccaaagctcctgacaaattagaggaagtcctgtcatactccaatgtaatcagctgggagcaaacttttgcagatccaaggttgccaagagggcttgggatgaagcaataagaaaggttgcaacttcaaaatcagtgcaggtagattacatgaaaaccatcctctttataccggaattaccaaagaaacacaagacctcaagtaatgacaagatggagttatttgaagtggatgatgataacaacgaaggaaacttttcaaacatgttcttagatgcttcacatgcaggtcttgtgaatgaacactgggcctttgggaaaatg

SEQ ID NO: 183719 - DNA, 971 bp, Homo Sapiens
actttgtacaaaaaagttggctgctcaatacggaacatattctcagtcctcctctggtctacaaagcctgtgatttcttgtctatggacagaacgtctggtttaatctacaggaacccataagttcctgaagctttatgcttaacagtgacaacgtgagtcagttgaattttattgtgtttcagtccatagagtattagctacagaaacctttccattgccatactgagaaagtgcagcaggcagtgtgcctacaggtctacaaagaaacttcaggtatatggcgccattttcaacataaaagataaaaaccctttcaacatggaggtgctggtagatgcctggccagattaccagatcgtcattacccggcctcagaaacaggagatgaaagatgaccaggatcattataccaacacttaccacatcttcaccaaagctcctgacaaattagaggaagtcctgtcatactccaatgtaatcagctgggagcaaactttgcagatccaaggttgccaagagggcttggatgaagcaataagaaaggttgcaacttcaaaatcagtgcaggtagattacatgaaaaccatcctctttataccggaattaccaaagaaacacaagacctcaagtaatgacaagatggagttatttgaagtggatgatgataacaagaaaggaaacttttcaaacatgttcttagatgcttcacatgcaggtcttgtgaatgaacactgggcctttgggaaaaatgagaggagcttgaaatatattgaacgctgcctccaggattttctaggatttggtgtgctgggtccagagggccagcttgtctcttggattgtgatggaacagtcctgtgagttgagaatgggttatactgtccccaaatacagacaccaaggcaacatgttgcaaattggttatcatcttgaaagtatctttctcagaagaatcccattttattccatg

SEQ ID NO: 183720 - DNA, 1172 bp, Homo Sapiens
  misc_feature (249)..(376): n is a, c, g, or t
ttggattctcagtcctcctctggtctacaaagcctgtgatttcttgtctatggacagaacgtctggtttaatctacaggaacccataagttcctgaagctttatgcttaacagtgacaacgtgagtcagttgaattttattgtgtttcagtccatagagtattagctacagaaacctttccattgccatactgagaaagtgcagcaggcagtgtgcctacaggtctacaaagaaacttcagagtctcannnnnnnnnnnnnnnnnnnnnnnnnnnnnnnnnnnnnnnnnnnnnnnnnnnnnnnnnnnnnnnnnnnnnnnnnnnnnnnnnnnnnnnnnnnnnnnnnnnnnnnnnnnnnnnnnnnnnnnnnnnnnnnncagatcatcttcttgagggaaagaagctgaagtgctacataagatgcttgtgcttcataactctcagaagctgcagattctgtataaatccttagaaaagagcatccctgaatccataaaggtatatggcgccattttcaacataaaagataaaaaccctttcaacatggaggtgctggtagatgcctggccagattaccagatcgtcattacccggcctcagaaacaggagatgaaagatgaccaggatcattataccaacacttaccacatcttcaccaaagctcctgacaaattagaggaagtcctgtcatactccaatgtaatcagctgggagcaaactttgcagatccaaggttgccaagagggcttggatgaagcaataagaaaggttgcaacttcaaaatcagtgcaggtagattacatgaaaaccatcctctttataccggaattaccaaagaaacacaagacctcaagtaatgacaagatggagttatttgaagtggatgatgataacaagtgagattttaccttttgcttcccaaattccttgatagaattactgagttgccacaaaggctgtacttggaaatgtaggatttgagactaaattatgatgggctacacaattgcatgggtaaagaaagggagttatgttagcaactgtgtactgagcatggacatagccttcattagacaaggtctttatgcatattatttcacttagggctcacaacgtccttctgaaagggtaatggacatcatggtgacatcaaaacatgtttactgaaactat

SEQ ID NO: 183721 - DNA, 1148 bp, Homo Sapiens
ggtgggggtggggaagccatgacacccgcctgcagccgcatgatcagggggttgtaggggaatggcgtggaacctgcggacgagggcctgtcctcccacacgcggttggtgagcggcgtccggcggttgcagtctccctccgagtgcactgaggagacagagggtggccggtccccagatgccaggcccggggccggggacttggcttttcggctgctgggtctgccagagaccttggccttcccgccgccacctgttccggtgatggcgggcatattgaagatctccgtcccaggctggctgatattgtattcaggctcattccggttgtgggtgttcagcttcttgttgatctcttgcttcttggacttgaccatggcggagttgctctcggtcagcttgctgaagaaggctggcggctggctggtgttgcctggagacttggagcccatcctgctgggctccgtctgttccccatcccggtacagcagcgggtacacagcactccgggagtgccctggctccgtcatgccctccggtggggacacaggttcaataccgtcctcaccaccacccaagaccgacgtcttgtttggctctggagacctcttgcccccttcgctgtggggggagccacgggccggggcaccatggtccgggggcgggaggtagaggtcactgggtgggcggcggaggtccaggacggggcagctggccccagggaaggagtagaggggggcgggcaggggtgcgctgagctgctgtgggtggtgccgggtgtagtcctgtgtgatgccctcactgatgtgctgggccagggtgaccacccgctggtgacctttgacccctggggcggtctggagcagcgggctggacgagggctggctctcaggcagcggccgcaggtgtgggaggtgggcggcctccccgccaagcttcacggggcctggctgcttgggccgcagctccccctccaggtggctcttgtcgagctcttccaggtgcttggggagccccttgtcgtgggtcagactgggtgagctcacagggctgacgggctccaccccttcggggctgtagctgctgccgtggtaacccagagaacggagttccagttcctggatggaaaagggtttactttgagccaa

SEQ ID NO: 183722 - DNA, 2712 bp, Homo Sapiens
  misc_feature (2352)..(2367): n is a, c, g, or t
ttggccctcgatcccggagactgaggccactgggcagccgtggaccttctcggacggctgcggcgatccattccttcccgctgtggtggtgtgtgatcctgtaaaattaaatcttccaagatgatctggtatatattaattataggaattctgcttccccagtctttggctcatccaggcttttttacttcaattggtcagatgactgatttgatccatactgagaaagatctggtgacttctctgaaagattatattaaggcagaagaggacaagttagaacaaataaaaaaatgggcagagaagttagatcggctaactagtacagcgacaaaagatccagaaggatttgttgggcatccagtaaatgcattcaaattaatgaaacgtctgaatactgagtggagtgagttggagaatctggtccttaaggatatgtcagatggctttatctctaacctaaccattcagagacagtactttcctaatgatgaagatcaggttggggcagccaaagctctgttacgtctccaggatacctacaatttggatacagataccatctcaaagggtaatcttccaggagtgaaacacaaatcttttctaacggctgaggactgctttgagttgggcaaagtggcctatacagaagcagattattaccatacggaactgtggatggaacaagccctaaggcaactggatgaaggcgagatttctaccatagataaagtctctgttctagattatttgagctatgcggtatatcagcagggagacctggataaggcacttttgctcacaaagaagcttcttgaactagatcctgaacatcagagagctaatggtaacttaaaatattttgagtatataatggctaaagaaaaagatgtcaataagtctgcttcagatgaccaatctgatcagaaaactacaccaaagaaaaaaggggttgctgtggattacctgccagagagacagaagtacgaaatgctgtgccgtggggagggtatcaaaatgacccctcggagacagaaaaaactcttttgccgctaccatgatggaaaccgtaatcctaaatttattctggctccagctaaacaggaggatgaatgggacaagcctcgtattattcgcttccatgatattatttctgatgcagaaattgaaatcgtcaaagacctagcaaaaccaaggctgagccgagctacagtacatgaccctgagactggaaaattgaccacagcacagtacagagtatctaagagtgcctggctctctggctatgaaaatcctgtggtgtctcgaattaatatgagaatacaagatctaacaggactagatgtttccacagcagaggaattacaggtagcaaattatggagttggaggacagtatgaaccccattttgactttgcacggaaagatgagccagatgctttcaaagagctggggacaggaaatagaattgctacatggctgttttatatgagtgatgtgtctgcaggaggagccactgtttttcctgaagttggagctagtgtttggcccaaaaaaggaactgctgttttctggtataatctgtttgccagtggagaaggagattatagtacacggcatgcagcctgtccagtgctagttggcaacaaatgggtatccaataaatggctccatgaacgtggacaagaatttcgaagaccttgtacgttgtcagaattggaatgacaaacaggcttccctttttctcctattgttgtactcttatgtgtctgatatacacatttcctagtcttaactttcaggagtttacaattgactaacactccatgattgattcagtcatgaacctcatcccatgtttcatctgtggacaattgcttactttgtgggttcttttaaaagtaacacgaaatcatcatattgcataaaaccttaaagttctgttggtatcacagaagacaaggcagagtttaaagtgaggaattttatatttaaagaactttttggttggataaaaacataatttgagcatccagttttagtatttcactacatctcagttggtgggtgttaagctagaatgggctgtgtgataggaaacaaatgccttacagatgtgcctaggtgttctgtttacctagtgtcttactctgttttctggatctgaagactagtaataaactaggacactaactgggttccatgtgattgccctttcatatgatcttctaagttgatttttttcctcccaagtcttttttaaagaaagtatactgtattttaccaaccccctctcttttcttttagctcctctgtggtgaattaaacgtacttgagttaaaatatttcgannnnnnnnnnnnnnnnaatggaaagtcctgcataacaacactgggccttcttaactaaaatgctcaccacttagcctgtttttttatcccttttttaaaatgacagatgattttgttcaggaattttgctgtttttcttagtgctaataccttgcctcttattcctgctacagcagggtggtaatattggcattctgattaaatactgtgccttaggagactggaagtttaaaaatgtacaagtcctttcagtgatgagggaattgattttttttaaaagtctttttcttagaaagccaaaatgtttgtttttttaagattctgaaatgtgttgtgacaacaatgacctatttatgatctt

SEQ ID NO: 183723 - DNA, 603 bp, Homo Sapiens
aagactgcttcctttcaatcatgaatagatacatatcaaaataaactgcctcgtttaaatacacactgaaaaataatatatttggagcaaagtgctcctgagaacggttaaaagaaacagaaatatcggtaaaaaggagaaggcatttaacatttgggaaggggggtgtcaaaatgtccctaagttattgtaacatattaagaaatttataaaactagttaaagtagttaaaatttcacatattaaaccatgtagatttggttaaagtaaaaaggctttcagagattacttacaataatgagttaacagtgcaaattccatgttgtttcatgagaatcttacaatgtgcttttctcccccccaaaaggaaatttttaaacactctccagttttaacacaaacaaaagataaatatttatgaaggaaaacaaattccacagcattccatacagatttccaagcagtctgatgattcacaacaggcatccatgatgccacagtccatatcacaagggcagttacaatcatcccccatctcgtcaccacagcaacagcagcaggcttctgaggtgcagatgccacatgacgcttgtcccaggccaa

SEQ ID NO: 183724 - DNA, 1217 bp, Homo Sapiens
  misc_feature (889)..(922): n is a, c, g, or t
ataaaagccaactttgtacaaaaaagttggctttcatctaatttggggtatcactgagctgaagacaaagagaagggggagaaaacctagcagaccaccatgtgctatgggaagtgtgcacgatgcatcggacattctctggtggggctcgccctcctgtgcatcgcggctaatattttgctttactttcccaatggggaaacaaagtatgcctccgaaaaccacctcagccgcttcgtgtggttcttttctggcatcgtaggaggtggcctgctgatgctcctgccagcatttgtcttcattgggctggaacaggatgactgctgtggctgctgtggccatgaaaactgtggcaaacgatgtgcgatgctttcttctgtattggctgctctcattggaattgcaggatctggctactgtgtcattgtggcagcccttggcttagcagaaggaccactatgtcttgattccctcggccagtggaactacacctttgccagcaccgagggccagtaccttctggatacctccacatggtccgagtgcactgaacccaagcacattgtggaatggaatgtatctctgttttctatcctcttggctcttggtggaattgaattcatcttgtgtcttattcaagtaataaatggagtgcttggaggcatatgtggcttttgctgctctcaccaacagcaatatgactgctaaaagaaccaacccaggacagagccacaatcttcctctatttcattgtaatttatatatttcacttgtattcatttgtaaaactttgtattagtgtaacatactccccacagtctacttttacaaacgcctgtaaagactggcatcttcacaggatgtcagtgtttaaatttagtaaacttcnnnnnnnnnnnnnnnnnnnnnnnnnnnnnnnnnnaaggaatgaggaaacaaaccaccctctgggggtaatttacagactgagtgacagtactcagtatatctgagataaactctataatgttttggataaaaataacattccaatcactattgtatatatgtgcatgtattttttaaattaaagatgtctagttgctttttataagaccaagaagagaaaatccgacaacctggtaaagatttttgttttcactgcttgtatgatgtttcccattcatacacctataaatctctaacaagaggccctttgaactgccttgtgttctgtg

SEQ ID NO: 183725 - DNA, 1338 bp, Homo Sapiens
  misc_feature (950)..(983): n is a, c, g, or t
caatgctttttctataatagccaactttgtacaaaaaagttggcaggaatgggctgagagtggtgtttgctttctccaccagaagggcacactttcatctaatttggggtatcactgagctgaagacaaagagaagggggagaaaacctagcagaccaccatgtgctatgggaagtgtgcacgatgcatcggacattctctggtggggctcgccctcctgtgcatcgcggctaatattttgctttactttcccaatggggaaacaaagtatgcctccgaaaaccacctcagccgcttcgtgtggttcttttctggcatcgtaggaggtggcctgctgatgctcctgccagcatttgtcttcattgggctggaacaggatgactgctgtggctgctgtggccatgaaaactgtggcaaacgatgtgcgatgctttcttctgtattggctgctctcattggaattgcaggatctggctactgtgtcattgtggcagcccttggcttagcagaaggaccactatgtcttgattccctcggccagtggaactacacctttgccagcaccgagggccagtaccttctggatacctccacatggtccgagtgcactgaacccaagcacattgtggaatggaatgtatctctgttttctatcctcttggctcttggtggaattgaattcatcttgtgtcttattcaagtaataaatggagtgcttggaggcatatgtggcttttgctgctctcaccaacagcaatatgactgctaaaagaaccaacccaggacagagccacaatcttcctctatttcattgtaatttatatatttcacttgtattcatttgtaaaactttgtattagtgtaacatactccccacagtctacttttacaaacgcctgtaaagactggcatcttcacaggatgtcagtgtttaaatttagtaaacttcnnnnnnnnnnnnnnnnnnnnnnnnnnnnnnnnnnaaggaatgaggaaacaaaccaccctctgggggtaatttacagactgagtgacagtactcagtatatctgagataaactctataatgttttggataaaaataacattccaatcactattgtatatatgtgcatgtattttttaaattaaagatgtctagttgctttttataagaccaagaaggagaaaatccgacaacctggaaagatttttgttttcactgcttgtatgatgtttcccattcatacacctataaatctctaacaagaggccctttgaactgccttgtgttctgtgagaaacaaatatttacttagagtggaaaggactgattgagaatgttccaatccaaatgaa

SEQ ID NO: 183726 - DNA, 1687 bp, Homo Sapiens
  misc_feature (1231)..(1264): n is a, c, g, or t
tacaaaaaagttggccagggctgttgcatctcggacacttggcagttactggaaagtcatgttaggctttcctgttgattctttatcttgtggaggagttgcacagtcaatgccttgttcaagattaatcattttccctgttgcctatgactgaggctgtttctcacatcctgcccctggttttgcctgtcccaaggatttcgtctgaagggcgggacattccccctgcctcttcgcaccacagccagagcctgccattaggaccaatgaaagcaaagtacctcatcccctcagtgactaagaatcgcagtatttaagaggtagcaggaatgggctgagagtggtgtttgctttctccaccagaagggcacactttcatctaatttggggtatcactgagctgaagacaaagagaagggggagaaaacctagcagaccaccatgtgctatgggaagtgtgcacgatgcatcggacattctctggtggggctcgccctcctgtgcatcgcggctaatattttgctttactttcccaatggggaaacaaagtatgcctccgaaaaccacctcagccgcttcgtgtggttcttttctggcatcgtaggaggtggcctgctgatgctcctgccagcatttgtcttcattgggctggaacaggatgactgctgtggctgctgtggccatgaaaactgtggcaaacgatgtgcgatgctttcttctgtattggctgctctcattggaattgcaggatctggctactgtgtcattgtggcagcccttggcttagcagaaggaccactatgtcttgattccctcggccagtggaactacacctttgccagcaccgagggccagtaccttctggatacctccacatggtccgagtgcactgaacccaagcacattgtggaatggaatgtatctctgttttctatcctcttggctcttggtggaattgaattcatcttgtgtcttattcaagtaataaatggagtgcttggaggcatatgtggcttttgctgctctcaccaacagcaatatgactgctaaaagaaccaacccaggacagagccacaatcttcctctatttcattgtaatttatatatttcacttgtattcatttgtaaaactttgtattagtgtaacatactccccacagtctacttttacaaacgcctgtaaagactggcatcttcacaggatgtcagtgtttaaatttagtaaacttcnnnnnnnnnnnnnnnnnnnnnnnnnnnnnnnnnnaaggaatgaggaaacaaaccaccctctgggggtaatttacagactgagtgacagtactcagtatatctgagataaactctataatgttttggataaaaataacattccaatcactattgtatatatgtgcatgtattttttaaattaaagatgtctagttgctttttataagaccaagaaggagaaaatccgacaacctggaaagatttttgttttcactgcttgtatgatgtttcccattcatacacctatacatctctaacaagaggccctttgaactgccttgtgttctgtgagaaacaaataatcccaatgaatgcatcacaacttacaatgctgctcattgttgtgagtactatgagattcaaatttttctaacatatgggaaagccttttgtcctcccaagatgagtactaagggat

SEQ ID NO: 183727 - DNA, 3059 bp, Homo Sapiens
ttgggtcaaagaattgattaatttaattcagtgtaggaaaaagagtgtgggtggggactcagacacagaagatatgagaagcaaaactgtcttgaagaggaagcttgaggatctacctgaaaatatgagaaagctcgccaaaaccagtaatttatctgaaaattgccatctgtatgaagagtctccacagcctattggctcacttggacatgatgctgacttgaggcggcagcagcaggatacctgtaactccggcattgctgacatccataggctgtttaattggttatcagaaacactagcaaatgcgcgccattctgatgcatctctgacagacacagtcaacaaagccttaggattgagcactgatgatgcctatgaagagctgaggcaaaaacatgagtatgagttgaactctaccccagataagaaagactatgagcagcctacttgtgcaaaagttgaaaatgcacagtttaagggtactcagagcttattactagaagttgatgcaacatctaagtattctgttgctatttctaccagcgaagtgggcactgaccataagctacatttgaaagaagatccaaatttaattagcgtgaataattttgaagattgcagtttgtgtcccagtgttcccattgaacatggatttcgtagacaacagtctaagtcaaataatgttgaagagactgaaatacattggaaactgattccaattacaggaggggaatgcaagaagcccagaagaccagctggggaaacatggtgagaaacaaacaccaggtatgaaatcaccagaagaacaactggtgtgtgtgccaccacaggaggcctttcctaacgacccccgggtaataaatagacagagaagttctgattaccagtttccatcctctccatttacagacacactaaagggcaccactgaggatgacgtgttgacaggtcaggtggaggagcagtgtgtgccagcagcagaggcagagccgcctgcagtgagcgaaaccacagagaggacagtgttaggagagtacaatctcttttctaggaagatagaagagattttgaagcaaaagaatgtttcatatgtcagtagagtttccacacctatcttttcaacacaagagaagatgaaacggctttccgagttcatatattctaagacttccaaagctggtgtgcaggagtttgtagatggtttgcatgagaagctaaatactattattattaaagcatcagccaagggtgggaatttgccaccagtcagtcctaacgattctggtgctaagatagcatcgaatcctctggaaaggcatgtcataccagtttcctcaagtgacttcaacaataaacatctccttgagccactgtgtagtgatcctttgaaagataccaactctgatgagcagcattccacttcggctttaactgaagtagaaatgaaccagcctcaacatgccacagagttaatggtgacttctgatcatattgtacctggtgatatggcccgggaaccagtagaagaaacaacaaaatcccccagtgatgtaaacatttctgctcaaccagctctttcaaattttataagccagttagaacctgaagtatttaatagtttggttaaaatcatgaaagacgtccagaaaaatactgtgaaattttatattcatgaagaagaagagagtgtgctctgtaaagaaataaaggaatatcttatcaaattaggcaatacagaatgtcatcctgaacagtttttggaaagaagatcaaaattagataaactattgattattattcaaaatgaagacattgcaggtttcattcacaagatacctggcttggtgactttaaagaagctcccctgtgttagttttgctggtgttgatagcctggatgatgttaaaaatcatacatacaatgaattatttgtatctggaggttttatcgtatctgatgaatcaattctaaacccagaggttgtcacagttgagaaccttaaaaattttttgacattccttgaggaacttagtactccagaaggaaaatggcaatggaaagtccactgtaaatttcagaagaaactaaaggaactaggcagattgaatgctaaagctctaagtctgttgacgcttctgaatgtctatcagaagaaacatctggttgaaattttgtcataccacaattgtgattcacaaactcgaaatgctccagaattggattgccttatcagacttcaggctcagaacatacagcaacgacacatagtctttttaacagagaagaacatcaagatgctttccagttatacagataatggaatagtggttgcaactgctgaagacttcatgcaaaactttaaaaatcttgtgggctatcacaattcaatcacagaagaaaaccttccacagcttggtgctaatgagaatcttgagtcgcagtcagatgctgttttgacattaacccctttggagctgggagttgggatttcccaacattaaacgtgaacacatttcgcagaagcttttagcatcggattatctggacattcacatctagtgtgagtgttgtgactaagtgaacttgtggcagaagaccaagctttaagggattgtggacttgcagaccctgacgcgttatattgtgtgagtagtgtataattttaaaacttaaacaaactgtgtatttcaatagaggaggactttttgttttttaaatgtagctcttttagaaaacgatgaaaaggatgaagaggatatgtctctggattcaggggatgaaatctcacatatagaagtatgcagcaattttcattcagaaatatgggagaaagagaccaaaggatcacgtggaacagatcaaaaaaagaatactcaaattgagttgcaatcgtctcctgatgtgcaaacagtttattagaagataagacttaccttgattctgaggagagaacttctattgatatagtatgctctgaagagagaacagcaattcacagaacaagattcatatagtaactttcaggtttatcataggtcaattaaatatgtcccatc

SEQ ID NO: 183728 - DNA, 1352 bp, Homo Sapiens
gccaactttgtacaaaaaagttgggatatacttccttttaaattctcagctgcaaaataattgtagacaaaataatggcatttaactaaagatggagcatgatctgtgtacatagcacatgtgaataaaagaaaagctgacagtatattctggtttcaataaaatgacctatcagaaagtagaatttcatccccaagagtatttcagtttatccaatattgagtaagttctgaaacagttttagaaaaaattttctttttgttaaatgtgatgcactgatcaatttttgtcacagcattttcataccttcatggtggactactagtcactgcttccataaatattgtttacagggtgagatttggtttattcatcttaagtgctgtagcaaactgtggttcgagcaacctgtgggaaatctgtgagagggaatggggtgggagatgtgggggaatggtggtcagactgatgacagatcctagaccaatgtaaagaatgtgtatctgtatataaataatttatcaaatagttttctctttgtgtctgtgttagtgtttttaaagctgctcatttcattttgtccaaccaaaaagaaaagggagataactaatgagcttctagtgatgttcaaaattgctgttaataggcattataccctgcaagttcactgcatgtctgatgcttggtaaaactagtcttccctgtaaaatgcagattacaggtattaaagcaatctagtggtatacccgccccttgccttagtaagaggagcagtgaaatgtatatagttgatgttcagtatttccaagtaccatttttatatagtagcttatttgaccataagtcacacatcaaaaaaagattacccttagtgtatgtgttttaatattagaaaattggcatatgtactttatttttgaaaagggaagagatgggtgtggggtggcaatagcattgtgccattttgtcatagaatgtaaaaattggttaactttacaaatgtcagctagttttgactactaattgggggaaattttagataatttttaaattcaaagttatttataaaatgctagaatttgttttaattttttgtattttgagccacttcacatgaagactcagttgcatttttatcgaatacatttttatcaacagttaaagactatggtggttttttcagagtttggctaagaatgttgttaccatcttctttgtttgtggtacaatattttcagtgcaaaagagatgtcattcagttaaaaagacaaacctctagatgtgtaattacatggaaaatactagcaatgtgaatgcttttgtagtaaccatcttgtagtacctgtgaaatc

SEQ ID NO: 183729 - DNA, 2016 bp, Homo Sapiens
ccccattccctctcacagatttcccacaggttgctcgaaccacagtttgctacagcacttaagatgaataaaccaaatctcaccctgtaaacaatatttatggaagcagtgactagtagtccaccatgaaggtatgaaaatgctgtgacaaaaattgatcagtgcatcacatttaacaaaaagaaaattttttctaaaactgtttcagaacttactcaatattggataaactgaaatactcttggggatgaaattctactttctgataggtcattttattgaaaccagaatatactgtcagcttttcttttattcacatgtgctatgtacacagatcatgctccatctttagttaaatgccattattttgtctacaattattttgcagctgagaatttaaaaggaagtatatccatgtatcactattactgagaattttgcattatttgttctgccttttcttgaaaataccaccttaacccttaaaaatggaactgtttttgaacatcaaattaaattctaatttatgcttcactggatagtatctgctagtatacattctatgtggtgtgtcatgcaattagcagggcttttaaatttgaacaaaaaaacatgacttactatactcatgcaagtgcttcattatcagaccgtaaaacctcagagtaaggttactacaaattatttcactgaactagaaatatatcagcattgcaacagctgatagaaacaaaacattgttagcacattttattgtgaacattattttctcctgcctttgaagacaacatcacagtagatcccaatcacatgattttcatcacagtatttatgtgtacattctgaaatgtacataataactagtcaatcaacttaaaacaatgctcctggaattagatgcaatactcgtactagactgcatcataacatttagccaaataacataaatttagttttagttaaaactgaacatttctgatcagtacaccatgtctgtcaatagaataagtttaccctttttttgtgaaaaatactgtgagaacaaaacccaaaagttgagtatgttgtgaatttccacattaagaaccattaaaattattttttatcatctttactcttcccagaaatggcagtgtgttctgtccatgtttacttttgttaataaaagtgttgaaaaaaagactgtaaaattcaccattagccctacacatagcatgctcttgttcaaaggatgtggattcgagtgtgagaaagacacggacagacacaattttcaggcaccactcagcaatatgcttcataggataagatgtcgctacaccagctggtacccagatcctgatatttggtcatattctattgtatactgcctggtccagtccacgataacaggacgaaagaggccacagcatcgaaattcaaagaagtctataatatttcttacacatccatggttgaatgggctttcaatagacgttgttgtgactttaaagtgcttgtatctcctggcattcattctttcatttgtagtaatacctaaacatgatatctggtacatctgacacatgagtaatacagccacccacatgaagtggaaaacactgttcaggaacatccaaaacatccaaggtgaacacgtggcaatctgagtaatgtatgtccaaaatccatccttggtgtaagtggtctcacagtggagtccccagtaagatatacaaccataaatcatccagcagatcataaaaagcaagaagaataggtagcccataaaatatctatggttgcctgcacctgaagaacgacacagaagcaaggtttttcagctaagaaaaaaacaacgggtaatgcacctttgaggggtatgccatgaaaggtgtgctacagttttgatgataatcacacatacattcattattttataaagtggttttcaggaaaaatgttttaataaaaatcttaaataagaatgcttgcaattacacacaaagatataatgatgacaatggtgttcaccaa

SEQ ID NO: 183730 - DNA, 2162 bp, Homo Sapiens
  misc_feature (1827)..(1842): n is a, c, g, or t
ttggctcagtctttgggatctggggaggccgcctggttttcctccctccttctgcacgtctgctggggtctcttcctctccaggccttgccgtccccctggcctctcttcccagctcacacatgaagatgcacttgcaaagggctctggtggtcctggccctgctgaactttgccacggtcagcctctctctgtccacttgcaccaccttggacttcggccacatcaagaagaagagggtggaagccattaggggacagatcttgagcaagctcaggctcaccagcccccctgagccaacggtgatgacccacgtcccctatcaggtcctggccctttacaacagcacccgggagctgctggaggagatgcatggggagagggaggaaggctgcacccaggaaaacaccgagtcggaatactatgccaaagaaatccataaattcgacatgatccaggggctggcggagcacaacgaactggctgtctgccctaaaggaattacctccaaggttttccgcttcaatgtgtcctcagtggagaaaaatagaaccaacctattccgagcagaattccgggtcttgcgggtgcccaaccccagctctaagcggaatgagcagaggatcgagctcttccagatccttcggccagatgagcacattgccaaacagcgctatatcggtggcaagaatctgcccacacggggcactgccgagtggctgtcctttgatgtcactgacactgtgcgtgagtggctgttgagaagagagtccaacttaggtctagaaatcagcattcactgtccatgtcacacctttcagcccaatggagatatcctggaaaacattcacgaggtgatggaaatcaaattcaaaggcgtggacaatgaggatgaccatggccgtggagatctggggcgcctcaagaagcagaaggatcaccacaaccctcatctaatcctcatgatgattcccccacaccggctcgacaacccgggccaggggggtcagaggaagaagcgggctttggacaccaattactgcttccgcaacttggaggagaactgctgtgtgcgccccctctacattgacttccgacaggatctgggctggaagtgggtccatgaacctaagggctactatgccaacttctgctcaggcccttgcccatacctccgcagtgcagacacaacccacagcacggtgctgggactgtacaacactctgaaccctgaagcatctgcctcgccttgctgcgtgccccaggacctggagcccctgaccatcctgtactatgttgggaggacccccaaagtggagcagctctccaacatggtggtgaagtcttgtaaatgtagctgagaccccacgtgcgacagagagaggggagagagaaccaccactgcctgactgcccgctcctcgggaaacacacaagcaacaaacctcactgagaggcctggagcccacaaccttcggctccgggcaaatggctgagatggaggtttccttttggaacatttctttcttgctggctctgagaatcacggtggtaaagaaagtgtgggtttggttagaggaaggctgaactcttcagaacacacagactttctgtgacgcagacagaggggatggggatagaggaaagggatggtaagttgagatgttgtgtggcaatgggatttgggctaccctaaagggagaaggaagggcagagaatggctgggtcagggccagactggaagacacttcagatctgaggttggatttgctcattgctgtaccacatctgctctagggaatctggattatgtttttcaaggcaagcannnnnnnnnnnnnnnnaaagacaggttacaaagacgaagtcccaaaattgtatctcatactgtctgggattaagggcaaatctattacttttgcaaactgtcctctacatcaattaacatcgtgggtcactacagggagaaaatccaggtcatgcagttcctggcccatcaactgtattgggccttttggatatgctgaacgcagaagaaagggtggaaatcaaccctctcctgtctgccctctgggtccctcctctcacctctccctcgatcatatttccccttggacacttggttagacgccttccaggtcaggatgcacatttctggattgtg

SEQ ID NO: 183731 - DNA, 1658 bp, Homo Sapiens
  misc_feature (1431)..(1439): n is a, c, g, or t
ctttgtacaaaaaagttggataatttgtttattccttgaagtcaggcatttgtttggattcagggcatactgggacatccattattggagctgaatgtcagggtctatgctagaaaaaaatgtagaaaaggataagaagaaataattaagtgttttcagtgaactacttggcttgaatagcacagattgtattagccaaaaaggagtcagggtggcaccataattattaaaggaggcaacaccttaacattagtctttttaaatatgtgtcatcttgaatttcatgtctttgattgaattgggctataagcataggcttctctggaggtaagtagattgaaaagcactcctcaacagaaaagcttaaaagtaaatatcatcataagcattcatttaaaaaagaaagcctgtttttgatccagaagttgtgacttttcattctctgtgatgttggtgataactcttaattcaattgtgaccttgtttttcttcctttcagatggggcattctcttctcccaccctcgggactttaccccagtgtgcaccacagagcttggcagagctgcaaagctggcaccagaatttgccaagaggaatgttaagttgattgccctttcaatagacagtgttgaggaccatcttgcctggagcaggatatcaatgcttacaattgtgaagagcccacagaaaagttaccttttccccatcatcgatgataggaatcgggagcttgccatcctgttgggcatgctggatccagcagagaaggatgaaaagggcatgcctgtgacagctcgtgtggtgtttgtttttggtcctgataagaagctgaagctgtctatcctctacccagctaccactggcaggaactttgatgagattctcagggtagtcatctctctccagctgacagcagaaaaaagggttgccaccccagttgattggaaggatggggatagtgtgatggtccttccaaccatccctgaagaagaagccaaaaaacttttcccgaaaggagtcttcaccaaagagctcccatctggcaagaaatacctccgctacacaccccagccttaagtctcttggagaagctggtgctgtgagccagaggatgtcagctgccaattgtgttttcctgcagcaattccataaacacatcctggtgtcatcacagccaaggtttttaggttgctataccaatggcttattaaatgaaaatggcactaaaagtttcttgagattctttatactctctgccttcagcaatcaattccattcatacatcagcactctgctggttctgtttgaaatatgttctgtatttaaaactcaaatcttgttggatctctgcagggcttgtgaccaatgaagtcatatttgttgatggttgacaaagcttgcttcactccatcagagaatgactatcaannnnnnnnnaactgtcctatcacgtcctctcctgtcacccattttgaagagtggcagaacttgaagttcaacttcctctgtaatatccaagtataaagcccaggaacttctagaataacccagatgcgctttaattttttttaatatgttttgatcacagaacttctagatacccagatgctctttcatattcttttattacatcttgatcacagctggggaaaaaaa

SEQ ID NO: 183732 - DNA, 1091 bp, Homo Sapiens
  misc_feature (833)..(896): n is a, c, g, or t
ttgggaacaaatgacgactaaaaaggtcattcccagtctttttagactcctgttttccagggagacatcctctgatcctttgagcttcatgatgaatcacctgaattctgtaggcgacacatgtggactagagcagattgatatgtttatacttggatactcccttgaagtaaagataaaagtgttcagactgttgaagtttaactccagagactttgaagtctgctacccagaggagcctctcagggactggccggagatctccctgctgaccgagaacgaccgccactaccacattccagtcttttaagtccgctgggggccgaacagcagtgctcaccagtgacggtggtcacagttgcaataaagtctctctctgaaaccaaagctagcatttcagcatggaaggaattaggaccttttcttcaggattacaggtacactggatgcagccatgcatggatggtttttctttatttttcagtgatttcctctgaagcagctgcactgatacatttgggagttggtggcttgactttgtccataaggggcgtggccacttcacatgatggcgggcctttaagagcacaaagaagtttaatatggacaacaacaggaaaaagcaagaagaaaacaagtagggaaaaacagctaacctggagagaaagaatttctttaacctttatgttcttcattaaaaatcttatcttggactgatttgagggatttttagaaacatggccttattttatataagcattaccttcccaggaatctttgttgtatattaatttttgataaccatttgattaactttaaaattaagtatatgnnnnnnnnnnnnnnnnnnnnnnnnnnnnnnnnnnnnnnnnnnnnnnnnnnnnnnnnnnnnnnnntatacacatagacatacagagaaccactactttgtaatagtgtacagtttgttttatatctctttactttttttgttactattttatctggccagcgtaatagttttatttagattttttaaaattctgtagattaaagcaaatgacagttattgaactatcacaaaactattaaactgtggtacatttaatgtg

SEQ ID NO: 183733 - DNA, 1042 bp, Homo Sapiens
ctataaaagccaactttgtacaaaaaagttggccaaaagtatattaaaaaagaagatagctatgagttcagatctatcttattggctttaatattacaaccaatccttaactttccactataaaggaaggattactagattgattactttctggatagataatctggtaataaatgataggtaaatcaaaaattacttttatttaggagtttgaattcttactctcatcagacattttttttctagggacgcttactaattaaatgatttaagttgtttcttaggggttttttgcctatatatttatgactgtgttaatgagtagtgaaatgatgcggaaagacagctatcaggaagaggaaatacagaagcctgaataatctatgggttagaaaagcatccctgaataatcaaaaattggcagtattggcattgttctcaagcctttttatgaaaatgaaatctgaaatcaccaaatgtaaacctgggaacattattctagtgttgctgtcttggattcatgttaagaagcgtcttcattctttgctcatgttgcccacttcttgtggatttgtctgagtgttttttgacaatcacttccttaaagactcttctgaactagttggacctggttaatcatagagagtagcctttaatcatggatagtcttcttggattatttttatatttgaaaagaaaatgttttatttgcactactgagtaggaagagttaattgttttctttgttctttttttgaagtcattacacaggacttcactccagagttaccattatgagtgtgttcagctctggtccacagaggatggataaaaatggtttgttatgtttttttgctctgcagtgctatgagccttatatctgttaatatgaaggacaaagtcaaaagcagcagtggatagcaagaagggtagagactaatatgtttgggaccaaaccatctaagttagagatttccagatcacagaggggctgggcattctctggagcagtcattggttggtgctttattgtaatcatttt

SEQ ID NO: 183734 - DNA, 926 bp, Homo Sapiens
tttgtacaaaaaagttggcattattctactgttgctgtcttggattcatgttaagaagcgtcttcattctttgctcatgttgcccacttcttgtggatttgtctgagtgttttttgacaatcacttccttaaagactcttctgaactagttggacctggttaatcatagagagtagcctttaatcatggatagtcttcttggattatttttatatttgaaaagaaaatgttttatttgcactactgagtaggaagagttaattgttttctttgttctttttttgaagtcattacacaggacttcactccagagttaccattatgagtgtgttcagctctggtccacagaggatggataaaaatggtttgttatgtttttttgctctgcagtgctatgagccttatatctgttaatatgaaggacaaagtcaaaagcagcagtggatagcaggaagggtagagactaatatgtttgggaccaaaaccatctaagttagagatttccagatcacagaggggctgggcattctctggagcagtcattggttggtgctttattgtaatcattttgcgccaatccccaacaattaggaactggaccctgggaataagctgagggtgctgaactgttggggaagggtgactgtagccacatggaagataaaatatgggtttttctgcaaaatttccatctgagggtttttacatttaatatttttttaagacagtttaaagagcaaacgttttttaagtgtattctagttgcaaagtatgcacacatatcttgaatggctttatttttattgtgtaaaactgttgaacacatgactgtgatgcacagattctttacgtgtaaggagtctatgcattttacagtaacttattttatgatcgggtgatgagacagttatactttccaactgccc

SEQ ID NO: 183735 - DNA, 2106 bp, Homo Sapiens
  misc_feature (214)..(222): n is a, c, g, or t
  misc_feature (439)..(447): n is a, c, g, or t
ttggcacccttctccaaaagtgctggtactgcatcagtgagatgagtagggtttttgtttgggattgtaagactattaagatcctagtaagtcagtggtagtttactgtgatgtgagcattgtagattcccccattgtcactaatcacacaacaatttgagaagtaggctataaaacaaaaaaaggttgctgttttctatttttaaataaaccnnnnnnnnncagaaaagatgtgaattttccccagttatgtgggaaaggtaaagcaacaccaaataaaagcccacagcagcttcatctttacgataactcagtgcatatgtgaaagagaatgatgcattaactgaaatacctcattgaatattatactactactggtaaaatgcagaagacagtgttaatgtgtttggtttggggactggttgttataaaatgcaannnnnnnnnaaatctaagcatttcattatgtgttctacagtgtcggtgaataaatgaaaccaatctcaatttagaggtatggatgatgacagaaagcccaatagaagcttaatgatgcttctgtttgaggcccagcaagcaccactaaattactggatgaaatgaaattgttcacttgagggattagtcaaccatctgggggagaagttgctcactgtcaaatacagcatgcacggtcctagctgatagaccttttcctcattgctacagcaagccacagggtagagtgaccagttctcctatccaaaaataaatgcgaacatgcatacataaatgtgactgagggccacttttgccatcactgtgctccaaaggaacatgatattgttaaatatactgtacacattaaactattctataagatgctttacttttcaagtacggtgtcattttcacagtctccagggtgacaaatgccaatagatatgtgagttaatttttttaaatatctccgtgagttgtaaatagatgtgtatttgatctgccctatccttctttgattctttaacatgttctctctcttttgtttgcaaaatatgtttgaaagcattggtagtgctttccttatcagtaactggagttctcctgcttgcactagagaaggtaaagagagaatcagtattcttatatggcaatctggggaagcagcaatatgccactgtacaaaactgaagaaaagttcctaatttgtactttgtgaagggagatgaaaggacgtttaaagtatatatattttgtcaagaggaaagaagataaaactatgccagttttatatcaatagcttgtagaagctcagctcttcttggtcttggctagactgcctagattcccacagcagacaaggttgagaatccattgctggaatcttggtattgatgagttacagtgatggaacatgtgcttggccacaggcaggtccagtcactgcaaaagtgaccaagccagcaggtcacccttaacttcagaaacaattattggtggtgaactgtacttaaattgcagagaaacctgtaagtaatggaaggtaaagaaaaattacagaatggaaaataatattttgggcaagcaaacaaattcactgagaattccaaaagtatattaaaaaagaagatagctatgagttcagatctatcttattggtctttaatattacaaccaatccttaactttccactataaaggaaggattactagattgattactttctggatagataatctggtaataaatgataggtaaatcaaaaattacttttatttaggagtttgaattcttactctcatcagacattttttttctagggacgcttactaattaaatgatttaagttgtttcttaggggttttttgcctatatatttatgactgtgttaatgagtagtgaaatgatgcggaaagacagctatcaggaagaggaaatacagaagcctgaataatctatgggttagaaaagcatccctgaataatcaaaaattggcagtattggcattgttctcaagcctttttatgaaaatgaaatctgaaatcaccaaatgtaaacctgggaacattattctagtgttgctgtcttggattcatgttaagaagcgtcttcattctttgctcatg

SEQ ID NO: 183736 - DNA, 1396 bp, Homo Sapiens
ccttataaaagccaactttgtacaaaaaagttgggtttttttgctctgcagtgctatgagccttatatctgttaatatgaaggacaaagtcaaaagcagcagtggatagcaggaagggtagagactaatatgtttgggaccaaaaccatctaagttagagatttccagatcacagaggggctgggcattctctggagcagtcattggttggtgctttattgtaatcattttgcgccaatccccaacaattaggaactggaccctgggaataagctgagggtgctgaactgttggggaagggtgactgtagccacatggaagataaaatatgggtttttctgcaaaatttccatctgagggtttttacatttaatatttttttaagacagtttaaagagcaaacgttttttaagtgtattctagttgcaaagtatgcacacatatcttgaatggctttatttttattgtgtaaaactgttgaacacatgactgtgatgcacaaattctttacgtgtaaggagtctatgcattttacagtaacttattttatgatcgggtgatgagacagttatactttcaactgccattatttttattaagtgctttcattttctttacagttattataaaattgtatttattttatacagatgggttttcattttcctgatgctgtaatgtttacttcagcttgttgacctttctttgtgttatctgcatgttgtaacgtgtgataagaatgaatgtaaaggctgtggcaactgtaattaatttttgtaaagggctggtcacacgtggatctggtttatgaatgcatttgggatgattttggtaaccagatcaccttttcagaaatttagatgtgaacaccaaaagaagcattttctcaacaaaaattaatagctggttctattttttttaaacctagaaaaaataaagttgatttttttcaattaaagtgcttttaattcttagcagtggggatggggcatgtgtgttttaccagagctatttgggcattaatatctgcaggcaagtacttaaagcacactgtggcagttggatgctgaaggcaaactgaaaaaccaaatgaaaaaacatcagacttccttctttggtttaaaaatatttccccctttctccccattctcccaatccagtggtgtgctggtaaatgtttagcagttcactcttctgggagaaaattatgtattcaactatacatgtttgttataaattttgctgatagcaagaacatataacacaattaacaaataataagatacaaatactttattgtaaatcccatatagccagttgattctcacagtatacttagttgctcagaaagaactaaaatgcttttttaaaaggatacttattgctttttgctcac

SEQ ID NO: 183737 - DNA, 3017 bp, Homo Sapiens
  misc_feature (2830)..(2885): n is a, c, g, or t
ttggcttcctccgtcccggccgttagcccagccaagcccagccaagcccagccaagccccgccgatcgcgggcaccggagccagccccgcagcggagggaccacagagcaccagcctgcatggaacttccttcctcactcagcttcccacgttgccagctgggacaggggagatggagtaattttgctgtggaaagacttcacgtcttgccgaatgaaagtaagcaaagatactgctagagtcgggaatctagagtcgggaattcattaagccaagggagtaagaatggccacagagtagtgaaatactgtttcttctggaaaagtcagcctccagcgcctgcagcttccggaactaagatgtgactgggcttgcggaggcgctgactcctctcctccctccctggctgtgcaggtcccgcctgtctgtcacgctgatgcccgtgcagctgtctgagcacccggaatggaatgagtctatgcactccctccggatcagtgtggggggccttcctgtgctggcgtccatgaccaaggccgcggacccccgcttccgcccccgctggaaggtgatcctgacgttctttgtgggtgctgccatcctctggctgctctgctcccaccgcccggcccccggcaggccccccacccacaatgcacacaactggaggctcggccaggcgcccgccaactggtacaatgacacctaccccctgtctcccccacaaaggacaccggctgggattcggtatcgaatcgcagttatcgcagacctggacacagagtcaagggcccaagaggaaaacacctggttcagttacctgaaaaagggctacctgaccctgtcagacagtggggacaaggtggccgtggaatgggacaaagaccatggggtcctggagtcccacctggcggagaaggggagaggcatggagctatccgacctgattgttttcaatgggaaactctactccgtggatgaccggacgggggtcgtctaccagatcgaaggcagcaaagccgtgccctgggtgattctgtccgacggcgacggcaccgtggagaaaggcttcaaggccgaatggctggcagtgaaggacgagcgtctgtacgtgggcggcctgggcaaggagtggacgaccactacgggtgatgtggtgaacgagaacccggagtgggtgaaggtggtgggctacaagggcagcgtggaccacgagaactgggtgtccaactacaacgccctgcgggctgctgccggcatccagccgccaggctacctcatccatgagtctgcctgctggagtgacacgctgcagcgctggttcttcctgccgcgccgcgccagccaggagcgctacagcgagaaggacgacgagcgcaagggcgccaacctgctgctgagcgcctcccctgacttcggcgacatcgctgtgagccacgtcggggcggtggtccccactcacggcttctcgtccttcaagttcatccccaacaccgacgaccagatcattgtggccctcaaatccgaggaggacagcggcagagtcgcctcctacatcatggccttcacgctggacgggcgcttcctgttgccggagaccaagatcggaagcgtgaaatacgaaggcatcgagttcatttaactcaaaacggaaacactgagcaaggccatcaggactcagcttttataaaaacaagaggagtgcacttttgttttgttttgttctttttggaactgtgcctgggttggaggtctggacagggagcccagtcccgggccccatagtggtgcgggcactggacccccgggccccacggaggccgcggtctgaactgctttccatgctgccatctggtggtgatttcggtcacttcaggcattgactcaaggcctgcctaactggctgggtcgtttcttccatccgacctcgtttcttttctttcctatgttcttttgttcagtgaatatccctagagctcctaccatatgtcaggccctatgcctcaccctgagaacgcagtgagcatgaggtggacctgtttgctgggaaccccaggtcacccccttttcttcctactctgtgcctggagcatcatgtccacccctgcagatccttggaaaagaaaatgtttatgttgcagggtattgcatggtcacgagtgagggcaggcccctggggacacatctgcccacagctgcacaggccagggcgcaggcacatctgttggttctcaggcctcagataaaaccatctccgcatcatatggccagtgaccgctttctcccttcaagaaaattctgtggctgtgcagtactttgaagttttaattattaacctgctttaattaaagcagtttcctttcttataaagtggaatcaccaaatcttatcacacagagcacagtcctgtagttacccagcccgctccagcagtgcgggagattgtaaggaagcggtggcggctggtgaagcaagtctcacatgtcggcgttcttggccaatggatacaaagataaagaaaatgttgcctttttctaggaactgtcagaaatcctcatgcctttcaagacttctgtgaatgacttgaattttttattccctgcctagggtctgtgaacgaggcctgtctcttccctggggtttctttccatggcctttatttctcctcttccagtgggagttttgcaggctcttctctgtggaaacttcacgagcgttggctgggcctcggcttcgctggagtgtactccagggtgaaggcagagtgggatttgagacccaggttaggcacgacccaggctgagaagggacgtttccatcattcacagtnnnnnnnnnnnnnnnnnnnnnnnnnnnnnnnnnnnnnnnnnnnnnnnnnnnnnnnngcgatcgtcaggggtgccacggtgggccggagggtgccggctctggctgtccctgtgccggtccctcacaaacctctcctcctttgaaactcaagcacagctgcgaggaggacagcggaggagggacccctc

SEQ ID NO: 183738 - DNA, 823 bp, Homo Sapiens
ggctttgctgctttcgatctggtagacgacccccgtccggtcatccacggagtagagtttcccattgaaaacaatcaggtcggatagctccatgcctctcccttctccgccaggtgggactccaggacccccatggtctttgtcccattccacggccaccttgtccccactgtctgacagggtcaggtagccctttttcaggtaactgaaccaggtgttttcctcttgggcccttgactctgtgtccaggtctgcgataactgcgattcgataccgaatcccagccggtgtcctttgtgggggagacagggggtaggtgtcattgtaccagttggcgggcgcctggccgagcctccagttgtgtgcattgtgggtggggggcctgccgggggccgggcggtgggagcagagcagccagaggatggcagcacccacaaagaacgtcaggatcaccttccagcgggggcggaagcgggggtccgcggccttggtcatggacgccagcacaggaaggccccccacactgatccggagggagtgcatagactcattccattccgggtgctcagacagctgcacgggcatcagcgtgacagacaggcgggactttcattcggcaagacgtgaagtctttccacagcaaaattactccatctcccctgtcccagctggcaacgtgggaagctgagtgaggaaggaagttccatgcaggctggtgctctgtggtccctccgctgcggggctggctccggtgcccgcgatcggcggggcttggctgggcttggctgggcttggctgggctaacggccgggacggaggccaa

SEQ ID NO: 183739 - DNA, 1050 bp, Homo Sapiens
tttgtacaaaaaagttggagaaattcaagaccgaaattgatgagctccttcaggagcagcgtgcagatatggaccagttcactgcctcaatctcagagacccctgtggacgtccgggtgagctctgaggagagtgaggagatcccaccgttccaccccttccaccccttcccagccctacctgagaacgaaggatctggagtgggagagcaggatgggggactgatcggtgccgaagagaaagtgattaacagtaagaataaagtggatgaaaacatggtcattgacgagactctggatgttaaggaaatgattttcaatgccgagagagttggaggcctcgaggaagagcgggaatccgtgggcccactgcgggaggacttcagtctgagtagcagtgctctcattggcctgctggtcatcgcagtggccattgccacggtcatcgtcatcagcctggtgatgctgaggaagaggcagtatggcaccatcagccacgggatcgtggaggttgatccaatgctcaccccagaagagcgtcacctgaacaagatgcagaaccatggctatgagaaccccacctacaaatacctggagcagatgcagatttaggtggcagggagcgcggcagccctggcggagggatgcaggtgggccggaagatcccacgattccgatcgactgccaagcagcagccgctgccaggggctgcgtctgacatcctgacctcctggactgtaggactatataaagtactactgtagaactgcaatttccattcttttaaatgggtgaaaaatggtaatataacaatatatgatatataaaccttaaatgaaaaaaatgatctattgcagatatttgatgtagttttcttttttaaattaatcagaaaccccacttccattgtattgtctgacacatgctctcaatatataataaatgggaaatgtcgattttcaataatagacttatatgcaggctgtcgttccggttatgttgtgtaagtcaactcttcagcctcattcactgtcctggcttttatttaaag

SEQ ID NO: 183740 - DNA, 1344 bp, Homo Sapiens
  misc_feature (1102)..(1144): n is a, c, g, or t
tcactctccctcagagctcacccaggacgtccacagagatctctgagattgaggcagtgaaactggtccatatctgcacgctgctcctgaaggagctcatcaatttcctcttgaatttcttgggctacataaggtactttgtagagcagagagaggctttggttcctcctttcttcaatcacgtggagatgtgtcatcacctgggatttcatctgggccgccttttctgggtcaacagccaacacatgctggtaatgacggatggtatgtaagcgatctttgttctcagcacggacataacgccgtaaggcctggagaatgcgatgaggccgtggcgggtcagactgcaaggcagccaggtagttctccagagccatccgacggcggtcattcagcatagcttccactcgggccaggtgggtctccaccagctgctgcttctcactggctgcttccttctctaaagctttaaccatggcttggaagtgctgaatcagagtctgcctctctgctttggggaggttcttagcttgaagctctgcctcttcccattccttctttaccctgtccattcggttgcggtgccgaatctccagctgctccttagccttctggaagcgagcatgctcattatcatctgcagaggtctcgaaatacacatcaacatcattggttggcagaggagttggaggaatcatcgctttacacacagccatacaataatcctcagactcaaaattgttcctgttgccgccgcagccaccatatataaagcgcacgcactttcccttggagaggtcgaagtaccaacgaggcatcacggcccggcagggccccgtcatcgcctcctgggagcagacagctttgacatcatgagtaatttccttgtctgacatggtgccgtcgctgccgggttcagtaggattctcctcattgtagtcatctcctttgaaggtgtcatagtagtaatctcggtcctccaccacttcctccccttcttcctcatcctcatcatcctcatccacagctgcttctgtgaagtcttccagatctgcttcagtaggaaattcacttttataaacatcatagtcttcctcttcannnnnnnnnnnnnnnnnnnnnnnnnnnnnnnnnnnnnnnnnnnttgacacagatccaataatctttgtctgagggcagcacacatattcagtgccatggaactggtctaccccacatgggagcagcatgccgtagctatataaggtcattccctgagtcagacatgcctctttgactaccgtgtgccagtgctggtgattctcacacacctcctatccggctctttgtgccaacttttttgta

SEQ ID NO: 183741 - DNA, 1603 bp, Homo Sapiens
  misc_feature (70)..(120): n is a, c, g, or t
ttggcagttccatggcactgaatatgtgtgctgccctcagacaaagattattggatctgtgtcaaaagannnnnnnnnnnnnnnnnnnnnnnnnnnnnnnnnnnnnnnnnnnnnnnnnnnctatgatgtttataaaagtgaatttcctactgaagcagatctggaagacttcacagaagcagctgtggatgaggatgatgaggatgaggaagaaggggaggaagtggtggaggaccgagattactactatgacaccttcaaaggagatgactacaatgaggagaatcctactgaacccggcagcgacggcaccatgtcagacaaggaaattactcatgatgtcaaagttcctccaactcctctgccaaccaatgatgttgatgtgtatttcgagacctctgcagatgataatgagcatgctcgcttccagaaggctaaggagcagctggagattcggcaccgcaaccgaatggacagggtaaagaaggaatgggaagaggcagagcttcaagctaagaacctccccaaagcagagaggcagactctgattcagcacttccaagccatggttaaagctttagagaaggaagcagccagtgagaagcagcagctggtggagacccacctggcccgagtggaagctatgctgaatgaccgccgtcggatggctctggagaactacctggctgccttgcagtctgacccgccacggcctcatcgcattctccaggccttacggcgttatgtccgtgctgagaacaaagatcgcttacataccatccgtcattaccagcatgtgttggctgttgacccagaaaaggcggcccagatgaaatcccaggtgatgacacatctccacgtgattgaagaaaggaggaaccaaagcctctctctgctctacaaagtaccttatgtagcccaagaaattcaagaggaaattgatgagctccttcaggagcagcgtgcagatatggaccagttcactgcctcaatctcagagacccctgtggacgtccgggtgagctctgaggagagtgaggagatcccaccgttccaccccttccaccccttcccagccctacctgagaacgaaggatctggagtgggagagcaggatgggggactgatcggtgccgaagagaaagtgattaacagtaagaataaagtggatgaaaacatggtcattgacgagactctggatgttaaggaaatgattttcaatgccgagagagttggaggcctcgaggaagagcgggaatccgtgggcccactgcgggaggacttcagtctgagtagcagtgctctcattggcctgctggtcatcgcagtggccattgccacggtcatcgtcatcagcctggtgatgctgaggaagaggcagtatggcaccatcagccacgggatcgtggaggttgatccaatgctcaccccagaagagcgtcacctgaacaagatgcagaaccatggctatgagaaccccacctacaaatacctggagcagatgcagatttaggtggcagggagcgcggcagccctggcggagggatgcggtgggccggagatcccacgattccgatcgactgccaagcagcagccgctgcca

SEQ ID NO: 183742 - DNA, 1528 bp, Homo Sapiens
ttggggtgccgattcctgccctgccccgaccgccagcgcgaccatgtcccatcactgggggtacggcaaacacaacggacctgagcactggcataaggacttccccattgccaagggagagcgccagtcccctgttgacatcgacactcatacagccaagtatgacccttccctgaagcccctgtctgtttcctatgatcaagcaacttccctgaggatcctcaacaatggtcatgctttcaacgtggagtttgatgactctcaggacaaagcagtgctcaagggaggacccctggatggcacttacagattgattcagtttcactttcactggggttcacttgatggacaaggttcagagcatactgtggataaaaagaaatatgctgcagaacttcacttggttcactggaacaccaaatatggggattttgggaaagctgtgcagcaacctgatggactggccgttctaggtatttttttgaaggttggcagcgctaaaccgggccttcagaaagttgttgatgtgctggattccattaaaacaaagggcaagagtgctgacttcactaacttcgatcctcgtggcctccttcctgaatccttggattactggacctacccaggctcactgaccacccctcctcttctggaatgtgtgacctggattgtgctcaaggaacccatcagcgtcagcagcgagcaggtgttgaaattccgtaaacttaacttcaatggggagggtgaacccgaagaactgatggtggacaactggcgcccagctcagccactgaagaacaggcaaatcaaagcttccttcaaataagatggtcccatagtctgtatccaaataatgaatcttcgggtgtttccctttagctaagcacagatctaccttggtgatttggaccctggttgctttgtgtctagttttctagacccttcatctcttacttgatagacttactaataaaatgtgaagactagaccaattgtcatgcttgacacaactgctgtggctggttggtgctttgtttatggtagtagtttttctgtaacacagaatataggataagaaataagaataaagtaccttgactttgttcacagcatgtagggtgatgagcactcacaattgttgactaaaatgctgcttttaaaacataggaaagtagaatggttgagtgcaaatccatagcacaagataaattgagctagttaaggcaaatcaggtaaaatagtcatgattctatgtaatgtaaaccagaaaaaataaatgttcatgatttcaagatgttatattaaagaaaaactttaaaaattattatatatttatagcaaagttatcttaaatatgaattctgttgtaatttaatgacttttgaattacagagatataaatgaagtattatctgtaaaaattgttataattagagttgtgatacagagtaaatttccattcagacaatatatcataacttataaatattggtatttagatatattcctctaataaaattcgaattct

SEQ ID NO: 183743 - DNA, 1473 bp, Homo Sapiens
ttggctcaagattcagaacaatataattactctatttacctttagaatggcctaagacaactaatcttgtaagccggattggctttcatacttcattttttcaggccactattggtcaccactgtttcagggatttagcagattatttgccaatctgggttatgtataacagttctgctttatatgatgtatttaattcaaggaagcatgtgccatgtgaagatacaatcaaagagataatatgaaatcaaatgaaatttactttcacgtaagatctggtaaccttatctatatagtatgtgtgtgtactatttattacatatcagtatttacaaatactgtttaaaactagataaattaaagtactcttcttttataggtgttgtcagtgctaaagcattcattgctgtcttttaagagacgaagagccatggagactttgaaactttactttttgttttccttgcagctccttatcaaagaggactatttaaataaaaagggtaatccaaagaaatttgcaggacttgcatcatatttgcatggtcatgaaccttcaaatcttgtttttgtaaattttctcaagagaggccttttccataatctctgtaagccagcctggaaaggctcacaacaattttcccaagatgtgatggaaaagctcgtgttagtattggcaaatttgtttggaagaaaatatattccagcaaaattccaaaatgctaatttaagtttttctcagtcaaaggtgatccttgccgaactcccggaggattttaaagctgctttatatgagtataacctggcagtaatgaaggattttgcctccttcctgctgattgcttccaagtcggtgaacatgaaaaaagagcatcaactccctttgtcaagaatcaaattcacaggtaaagaatgtgaagactcccaactcgtgtctcacttgatgagctgcaagaaaggaagagtagccatttcaccatttgtttgtctttcggggaacacagataatgatttgcttcgaccagagactatcaaccaggtcatcctgcgcacagtcggtgttagtggcactcaggctcctctgctgtggccatggaaattagataaccgaggaaggagaatgccactaaatgcatatgtgctcaatttctataaacacaactgcttgacaagattagaccaaaaaaatgggatgcgtgtgggacagcttttaaagtgtttgaaagattttgcattcaacattcagctatcagtgactccttgagtgaactatgtgaaaataagcgtgacaatgtagtcctggcatttaaacaattgagtcaaaccttttatgagaaacttcaagaaatgcaaattcaaatgagtcaaaatcatttagaataacaccatggaaaactttcaagtctgattatgtggtatttatccctttgcaaggagagatataattaagcttacacaatgaaatggaaaaaa

SEQ ID NO: 183744 - DNA, 775 bp, Homo Sapiens
ctttgtacaaaaaagttggctcaccattaaatctatcagtgtttccttgcgtgagctatgtgaaaatgaagacgacaacgttgtcttagcctttgaacaactgagtacaactttttgggaaaagttaaacaaagtctaaaaacaaagtctatgcaaaccacttaaaaataattccatagtagtttttcaggtcacgtttttgattcttatgcttcttgccagaaatacattatgataaagtggaaatacattacgatgaagtggaaagagcaaacactttggaatcaaacagagttgcaatcaaacctgccatgttctgtcatgaatactcacaaattatttagtatacctgaatcttggtttctttttataactgagtaataatggttacatctcaggtagtttgaggattgactaaaaaaatgcgagaatgttgtatgtgactgaataacaatttttactctgcgaagccaaagtaaatataatattatcagtaactttatccccagtgtcagtatttataaaatgtttattaaggctagaaaaaatgaatacaatatcctgaaggtgaaatatattctcttcaattagcataaatatgatttacataagttagctatacagctattgagatagtactttctagtaaacttaaactactttttaaacatacattttgtgatgatttaacaaaaatatagagaatgatttgctttattgtaattgtatataagtgactggaaaagcacaaagaaataaagtgggttcgatctgt

SEQ ID NO: 183745 - DNA, 1506 bp, Homo Sapiens
ttggcactgttaatgatcagagtaacaaagtgtgaaaaataagaaaccatcattgatgttaattaacacatttagatgggccagttaaaacagcttcataagttttaaattaattgtaaatggaatattcctcatttaaaatttttgcactgcattttctactgtaaaccaaaagaggttactaagcaaaaccacctaaatttaagttggtgatttaaatgaatctcacattaaaagaaagcttgacagtgttatgaaagccaccagactcagccagtgtgtccccatgggtatccccagccatccttgctcaatccattacttatatactaactacataatgacctgttcaaaccagactctatttaatgaactgtgaatttacacagaggccattttaaatgggtcaccccatttaggattagtggatctcaaattattaaccaaacatcactccatttcaaagtaaaatattccaccagcgatttgatttattggctcttccattgccactgagcaatgcccaggaagcaggcacattgccaaggactgggggcatcttgactaggaagctcctcgtttgtgtgagcgtgggtcagaccgccaaagtaggacttcatcgtttacctacctattatcaatatggtgcttgaatatattcctataactgtagaacagtgtggaaagtgatggtaactttgaagttgttcatgttttattggctttgttttaattgacactagtagagttttaatggtctttgtgtaaattttaatggcttttccattgtttttgcttctcttaaaaagtttaagaagaatatgacctcattaaatgtgctgttttatttggaccagtcacacaaaatgtctctctagagttgactttaaagttgtttacagaaatttaaactcaattccagagattgaagttgtccaaacagctcatgggcttagtgtccaaacccctgcccagccttccctttccaagttggtgccacctccaggtagccattggtggttttcctattactgatgtggctgtggaatgataaggtcctagaggggccctggcatttcaggaagcggacctggtattccctgacaaacattgcttaggaaagagggccggagaataagaagccagcacctcatcagtcagccctgcaatgtgagacttccgtagctgttgagagtcactgcaggtgttctttcatcccgtctgattttaacccatggttgagacgttccaagttagatctgctgctcttaggtgtggggctgtccacattagggaacttgcctcaaaaacagtccacagtggcaataccggacttctgttcaagctttttaaagtgctgagccttacaaacccctgaagaggtgaccctttaagagaggatcatctttttttatatttattttcaccaaaatagggtgatgagggttggtttttgttccctcaaccatttggtaaattacggatctaattagaaactgttttaag

SEQ ID NO: 183746 - DNA, 1592 bp, Homo Sapiens
ttggcgcacgccggcgtgagagggcacggggaaaaggtggctctggccggggtggctcggtttcctggggctatgtaactgagctcgtcgacttaggggtccttcttcgctgccctcgccgcgtgctagcagggagtttccgctcgggagagagactgtcctcacgcccgctgcgcctcctcgacggcagagcaggcttgctcgcccgtgggagcgtcccggccgagaagccctgaggggggaggggaggccattttgtcccgaccgactccccggaaccgggcggagcggctgggagaggctgcggagccgcggtcgccgccctcggaggcactggacgccgccactgtcggggcttcctcaaagctgttcgtaggtcgcccgcgccgtctcgagcctttttcccacgcttccccggtcctccggcctgagaacgcccgagtgaggagttggccgtagtgagagggaccgatcccttggggccgccggcggcgagagcccgagccgctcctcccaatggcgaagaagacgtacgacctgcttttcaagctgctcctgatcggggattccggagtggggaagacctgcgtcctttttcgtttttcggatgatgccttcaatactacctttatttccaccataggaatagacttcaagatcaaaacagttgaattacaaggaaagaagatcaagctacagatatgggatacagcaggccaggagcgatttcacaccatcacaacctcctactacagaggcgcaatgggtatcatgctagtatatgacatcaccaatggtaaaagttttgaaaacatcagcaaatggcttagaaacatagatgagcatgccaatgaagatgtggaaagaatgttactaggaaacaagtgtgatatggacgacaaaagagttgtacctaaaggaaaaggagaacagattgcaagggagcatggtattaggttttttgagactagtgcaaaagcaaatataaacatcgaaaaggcgttcctcacgttagctgaagatatccttcgaaagacccctgtaaaagagcccaacagtgaaaatgtagatatcagcagtggaggaggcgtgacaggctggaagagcaaatgctgctgagcattctcctgttccatcagttgccatccactaccccgttttctcttcttgctgcaaaataaaccactctgtccatttttaactctaaacagatatttttgtttctcatcttaactatccaagccacctattttatttgttctttcatctgtgactgcttgctgactttatcataattttcttcaaacaaaaaaatgtatagaaaaatcatgtctgtgacttcatttttaaatgtacttgctcagctcaactgcatttcagttgtattatagtccagttcttatcaacattaaaacctatagcaatcatttcaaatctattctgcaaattgtataagaataaagttagaattaacaattttattttgtacaacagtggaattttctgtcatggataatgtgcttgagtccctataatctatagacatgtgatagcaaaagaaacaaacaaaagccaggaaaacactcattttc

SEQ ID NO: 183747 - DNA, 2904 bp, Homo Sapiens
ttggggcctctgaaagtgctgggattacaggcgtgaggcactgtgctcagccatctatattcatttttaacatgaattagataactacattttgctccactccttttcacttaatcagttgaggttgcctttttaaaactatgatacagtaataaaattggtctaaaaaggcagataacagaaaagggcagttttatttctgtgacgttacatatacctaacactggtttcatacaacttgctccacaatgccttttaagtactaaacatattcagaggtcagggctagaagataacaaaatctatttaagagttagagctgagaagatttcagaagctttataaaggcatgccaggaaatgtctacaatatttcacagcttggaggaagcaggcaaaaagaaaatcaaaacaaagcttccaaatctttactttgcacggaggggaaacctatctcctgtgattgtagttgtattttgttgtataaattgacataagaatattcctgttgaatcttgattttatccatggcagtgttttttcatgagttattttccttgtgtgtttgttgcagacccctgtaaaagagcccaacagtgaaaatgtagatatcagcagtggaggaggcgtgacaggctggaagagcaaatgctgctgagcattctcctgttccatcagttgccatccactaccccgttttctcttcttgctgcaaaataaaccactctgtccatttttaactctaaacagatatttttgtttctcatcttaactatccaagccacctattttatttgttctttcatctgtgactgcttgctgactttatcataattttcttcaaacaaaaaaatgtatagaaaaatcatgtctgtgacttcatttttaaatgtacttgctcagctcaactgcatttcagttgtattatagtccagttcttatcaacattaaaacctatagcaatcatttcaaatctattctgcaaattgtataagaataaagttagaattaacaattttattttgtacaacagtggaattttctgtcatggataatgtgcttgagtccctataatctatagacatgtgatagcaaaagaaacaaacaaaagccaggaaaacactcattttcgccttgaatatgtaaatgggattaattttgtcctgtgccttatgtggaaaggaacttctttggttttccttttttgttctggtggaagcatgtgcaggagacatatcatccaaacataaaccattaaaatgtttgtggtttgcttggctgtaattttcaaagtagttaattgaggacaaagggtaatgcagaagtgatagctttggtttgctgagtcttgttttaagtggccttgatatttaaaactattcctgccaccatttcttctccttggccacttcttccttgcgtctccctgcatgctgctttatttgcttctccctccccaaccacctcatggtatatttaagagtgaaagggacaaactagtaggtttgtcaagtttaatataaagcactgatgtaacttgctaggtaaacggaaagataagttctaactgcctactatccaatgtcagttaattggtgtcttcccccctcatttgctctcttccctaaaatgtgtcccagatgccttcatttgctgttttacttctatgttctgcttttcctcctctctttgttcccttcctgtctatccattgagtttatgaaatggaagagttaactgcatgcactagtgtttggagggtgttgtggtttgtctttctaattaggtgtatagcctattcactttcctagaataaatctcttaacctaaatttgagtagtctgcattttggcaactcctctagcagcttggtagcctagtacaggttgtttttttaaaaaaggaaaagcaggaaggaggagtgaattttattaacatgtttgccaaatgtattgagatttggcctctgaagaacactttttcagtgttaagtttctttaccttaagattcagaaatactttagaatattattaattttaagtcctgtctttacatccttttggaaaacttgtattaccatgagtttggaaaaaggacaacgaaaggcttttcatgtaaagataagatctttagctatctctaaccctgtccttttttcactgcattttttctagttttgcttcattgcttatcattaggatagggtaagtgaagtttgctatgctgctagcatcctaagatgatacctttgttgaaagaattgtgaatagcatgattcatttctagcagaggctgagtttaggacagcagcttccattgagaagtctttctgtgtcgtgaatagcattttaatgacctcttggctcacataagcaaacaacatagggacgtatctgctatgaaaatccacaaatttttcagatagtgccctaaaaacaattttatatgcctcactggttgttattcttaggttattcccacacttgactttatcattgtttactactagtaaaaagcagcattgccaaataatccctaattttccactaaaaatataatgaaatgatgttaagctttttgaaaagtttaggttaaacctactgttgttagattaatgtatttgttgcttccctttatctggaatgtggcattagcttttttattttaaccctctttaattcttattcaattccatgacttaaggttggagagctaaacactgggatttttggataacagactgacagttttgcataattataatcggcattgtacatagaaaggatatggctaccttttgttaaatctgcactttctaaatatccaaaaagggaaatgagtataatcaatttttgtataatctgtttgaaacatgagttttatttgcttaatattagggctttg

SEQ ID NO: 183748 - DNA, 877 bp, Homo Sapiens
ctttgtacaaaaaagttggatttaaaactcctaataaaacagtatttatgttttttataaaactgtgcaatacgaattatgcaatcacaatacatttgtagctcccgagtgtcctaaagggagtgcacttctttgaagctggtgtgttaatactatgtaataaatggttaactttcaaatgatgctgctgccaaaattatattaatagtgagtttcaggcccctgggcattttgtaccatgtaattatcctctggtgatgctgtttctcgttagtggcagtagtgcctccgtctcctagtgataatgctccaagtctatgaactgttaaatcagcattcattttaagaaaagcaactttagtttcaaagatacttttaagcttctaaattgatcatttaaactatttctttaaataagagagccaaattagaggctcatactttagcttgtgaagaagataatgaattttttaaagggaactttctatgcaatgttcaggataaatgcatactgctggccaatcagtgtcatctcctgggtaaattttgatgtcgcattataaagacatgcataattgatggtttctagattatctagtccaaacaatagagtttattttttcttcatctgaaccaacatgctacagtagctaagaagtattaaaactatatacatccatataaagatgaaatatgaactatctcattagaagtcatagttgaccacagacatgttattcttctgaaagagccacattttggttttatttcttgtcacatgatttcttttcttgatggatgaaaaatatgaaaggaaacttttatatctgttgcctagttttgtacatggatctcattttacagagaatctctctgc

SEQ ID NO: 183749 - DNA, 1334 bp, Homo Sapiens
  misc_feature (1089)..(1143): n is a, c, g, or t
ttgggtacgttgatgatccttatcagaagtatcatgatcgaacaaacctgaaagtatagatcagaagtttcacttgtttctcagttattggatatgtatctttgtgtacatatctttgcaaaaatggataagtacaaaacttgatgtaaattgtaccaatgaatatgtaaacatacagtgacaacattaaacttagaaaagttttaaaacttaatggatcagactttgccagatttggttagggaaacagaaatttagaatggtgcattatttttaacaaatggtattggcttaactagttgtttcagttatgctcttttagttgcaaggaatctcaagtgggacaaacataaaaagactcaaaagctacaagttagctcaagcaatgtgacattatttcaaggatatgtgccggggaattcaggaaccacctcaccaaccccatctcccactcagaaatcacctcccagcctcaggaagagtagaaattgggtggtgctcctcagcaggggaaggtggatgtttaggcttgggctctgcatgcatgtgacttgcttctttttgcattgttaactccattctctctattcaccaacttctctacacagcttttgcatacttacagtttctgttcctttgtaataactttaacttgcacctttgaggttcttttctacatgatgaccttcagctcctgctgctagtctccaattgccaagggaatttaactgggccagactacctttttatactaggtctggttgggtcattgtctagagtagggattggctgtccttaagtcaggagcccgctttgtattagcaggtttgcatgcagcaaaaaaacagttatgtgagcagtttcacttggaggttcacatggggtggcagcacacttaacatctaacacaccaggttcattgtgttcataacacttgtcatttactgtaacaacattttttcataggagagtaaatagcccttcagcatgctcattcatgaaacagaagaggctgtacaagtgaagacaagggctttttatgcaagttttgaaagataggtatttattttttctagagacaggagtttnnnnnnnnnnnnnnnnnnnnnnnnnnnnnnnnnnnnnnnnnnnnnnnnnnnnnnngcactcctgggctcaagtggtcctcctgcctcagcttactgagtaaggatatgtatttctttaaaggttagtttatccacttcagatttcatgttttcatttgtaaggataaacttttcccacaaattttcacaatcattgtagaaactaacgggggagaaagtaatctcagttgttttagaaacgaaaaa

SEQ ID NO: 183750 - DNA, 1547 bp, Homo Sapiens
ttggcttgctgccctcgcccggcccggagcgccgctgccatgcggctggcgctgctctgggccctggggctcctgggcgcgggcagccctctgccttcctggccgctcccaaatataggtggcactgaggagcagcaggcagagtcagagaaggccccgagggagcccttggagccccaggtccttcaggacgatctcccaattagcctcaaaaaggtgcttcagaccagtctgcctgagcccctgaggatcaagttggagctggacggtgacagtcatatcctggagctgctacagaatagggagttggtcccaggccgcccaaccctggtgtggtaccagcccgatggcactcgggtggtcagtgagggacacactttggagaactgctgctaccagggaagagtgcggggatatgcaggctcctgggtgtccatctgcacctgctctgggctcagaggcttggtggtcctgaccccagagagaagctataccctggagcaggggcctggggaccttcagggtcctcccattatttcgcgaatccaagatctccacctgccaggccacacctgtgccctgagctggcgggaatctgtacacactcagacgccaccagagcaccccctgggacagcgccacattcgccggaggcgggatgtggtaacagagaccaagactgtggagttggtgattgtggctgatcactcggaggcccagaaataccgggacttccagcacctgctaaaccgcacactggaagtggccctcttgctggacacattcttccggcccctgaatgtacgagtggcactagtgggcctggaggcctggacccagcgtgacctggtggagatcagcccaaacccagctgtcaccctcgaaaacttcctccactggcgcagggcacatttgctgcctcgattgccccatgacagtgcccagctggtgactggtacttcattctctgggcctacggtgggcatggccattcagaactccatctgttctcctgacttctcaggaggtgtgaacatggaccactccaccagcatcctgggagtcgcctcctccatagcccatgagttgggccacagcctgggcctggaccatgatttgcctgggaatagctgcccctgtccaggtccagccccagccaagacctgcatcatggaggcctccacagacttcctaccaggcctgaacttcagcaactgcagccgacgggccctggagaaagccctcctggatggaatgggcagctgcctcttcgaacggctgcctagcctaccccctatggctgctttctgcggaaatatgtttgtggagccgggcgagcagtgtgactgtggcttcctggatgactgcgtcgatccctgctgtgattctttgacctgccagctgaggccaggtgcacagtgtgcatctgacggaccctgttgtcaaaattgccagctgcgcccgtctggctggcagtgtcgtcctaccagaggggattgtgacttgcctgaattctgcccaggagacagctcccagtgtccccctga

SEQ ID NO: 183751 - DNA, 1628 bp, Homo Sapiens
ttggctgaagcagctggcagctgcccggggtcagcggctggaagagtccttggaatatcagcagtttgtagccaatgtggaagaggaagaagcctggatcaatgagaaaatgaccctggtggccagcgaagattatggcgacactcttgccgccatccagggcttactgaagaaacatgaagcttttgagacagacttcaccgtccacaaggatcgcgtgaatgatgtctgcaccaatggacaagacctcattaagaagaacaatcaccatgaggagaacatctcttcaaagatgaagggcctgaacgggaaagtgtcagacctggagaaagctgcagcccagagaaaggcgaagctggatgagaactcggccttccttcagttcaactggaaggcggacgtggtggagtcctggatcggtgaaaaggagaacagcttgaagacagatgattatggccgagacctgtcttctgtgcagacgctcctcaccaaacaggaaacttttgacgctgggctgcaggccttccagcaggaaggcattgccaacatcactgccctcaaagatcagcttctcgccgccaaacacgttcagtccaaggccatcgaggcccggcacgcctccctcatgaagaggtggagccagcttctggccaactcagccgcccgcaagaagaagcttctggaggctcagagtcacttccgcaaggtggaggacctcttcctgaccttcgccaaaaaggcttctgccttcaacagctggtttgaaaatgcagaggaggacttaacagaccccgtgcgctgcaactccttggaagaaatcaaagctttgcgcgaggcccacgacgccttccgctcctccctcagctctgcccaggctgacttcaaccagctggccgagctggaccgccagatcaagagcttccgcgtagcctccaacccctacacctggtttaccatggaggccctggaggagacctggaggaacctacagaaaatcatcaaggagagggagctggagctgcagaaggaacagcggcggcaggaggagaacgacaagctgcgccaggagtttgcccagcacgccaacgccttccaccagtggatccaagagaccaggacatacctcctcgatgggtcctgtatggtggaagagtcggggaccctcgaatcccagcttgaagctaccaaacgcaagcaccaggaaatccgagccatgagaagtcagctcaaaaagatcgaggacctgggggccgccatggaggaggccctcatcctggacaacaagtacacggagcacagcaccgtgggcctcgcccagcagtgggaccagctggaccagctgggcatgcgcatgcagcacaacctggagcagcagatccaggccaggaacacaacaggtgtgactgaggaggccctcaaagaattcagcatgatgtttaaacactttgacaaggacaagtctggcaggctgaaccatcaggagttcaaatcttgcctgcgctccctgggctatgacctgcccatggtggaggaaggggaacctgaccctgagttccgaggcaatcctgggacaccggtggatcccgaacagaagatgggccatgtctccttgcaaggatacatgggct

SEQ ID NO: 183752 - DNA, 1332 bp, Homo Sapiens
ttgggtggcttttttgctgctagcacatatgtatgggttcagtacgtatggcacacagaaaggggagtgtgtttgcctacagtgtctctctggatcctctttgtttatattgaagcagccattagatttaaagatctcaaaaactttcatgtagacctttgtcgtccatttgctgctcactgtattgggtaccctgtggtaactttggggtttggcttcaaaagttacgtaagctacaaaatgcggttaaggaagcaaaaagaagtacaaaaagagaacgagttttacatgcaacttcttcaacaagctctccctccagagcaacagatgctacagaagcaagaaaaagaggccgaggaagcagccaaaggattacctgatatggattcttcgatccttatacaccacaatggaggtatcccagccaacaaaaaactctccacaactttgccagagatagaataccgagaaaaagggaaagaaaaggacaaggatgccaaaaaacacaaccttggaataaataacaacaatattctacaacctgtagactctaaaatacaagagattgagtatatggaaaaccatatcaatagtaaaagattaaataatgatcttgtgggaagtacagaaaatctcttgaaagaggactcatgcactgcttcctcaaaaaattacaaaaatgccagtggagttgtgaactcttcacctcgaagtcatagcgccacaaatgggagcattccttcctcatctagtaaaaatgagaagaagcagaaatgcactagcaagagcccaagtacacacaaggacttaatggaaaactgtattcctaataaccagctaagcaaaccagacgcactggtcaggctggaacaagacattaaaaagttaaaggctgacctgcaagccagcagacaagtggaacaagagctccgcagtcagatcagctccctttcgagcaccgagcgagggatccgctcagaaatgggccagcttcggcaggagaacgagctgctgcagaacaagttacataatgctgtgcaaatgaagcaaaaagacaagcagaatatcagccagttggagaaaaagctaaaagctgagcaggaagcccgaagttttgtagagaaacagttaatggaagagaaaaagaggaagaagttagaagaagccactgctgcccgggctgttgcgtttgctgctgcatctaggggagaatgcaccgaaaccttacggaatcggatcagagaactagaagcagagggcaagaagctcacgatggacatgaaggtgaaaaagaccaaatcagagaactagaactaaaagtccaggagcttc

SEQ ID NO: 183753 - DNA, 926 bp, Homo Sapiens
ttgtacaaaaaagttggctgttcttaaatctgaatgccttctcatttaattctgaggaaatatcacacaagtgtcttcattgaccttgaagaaatgtatatacagttgccttataaaacaacataaatttagaccataacttttatagagaaagggttttgtcaaatgttttctgaaaatctgagtaattcaaagcatgcctctgcccctttaatatttttaataacctgcattgttgctgtctgccaaatattaaattgaaatcttcatttcaattttattatctggaaagggcactggattgctctgcaaccaaagaaagcaatatggaatgaaaaaactcattcacttttgtcttattttcttttaaggtgtattggcatgtaatttgcatagagaaggtcctctggttagtctctcaaattgaggctgtttagggaaatccttattcagttggtggcagtggttggtttaaagtagaaggaaataagatcgccttaataccagaaatgattagaagtgctgatttagattcaacaaataccatatgtccttatcattttttgtaagaagaaattggttaagtcctaactttcaatgtgtacccaaatacttgtatttatgcttttgataaaatgtattttcagcattaatacacatccgattatgccttatttatatatgaagaataaagttaccatgttatactgttatgtcctaaaattcaaatcactatttgagaaaccctcaaattggtgctttcattatataatgatacatttagacaaaaccccaaactaagccatttgaaacaagattctctccattgcagtttgtagcatgttatttctgtgtatgtcatgagaaaggctaaatatccgtgttaatttcttgtttgaatccgtgaaatcatgcttgtaaagccc

SEQ ID NO: 183754 - DNA, 2313 bp, Homo Sapiens
ttgggaactttctaaataaacttaacctgttccagaatgtcatgtatttgacttttaagccctatctcagttggtcagtaaagaccaatccttactgtaggaaatcattgttgtatcatcacaaacatctatcttttgctgtcctgtccagtcccatcaactccacactgtgccatttgtggcatcgttttgtttatttggagtttgctaagggcagtatttttctgtcaagactattcaagaaggcattatttgagattcctgttcattcttggtgtgtctctaacagatacagtatgtatacatttgtataattgttgttgttgaaagtccagcttttttgaggtatattttaaatgttttaaggatgcttctaaggatcagtagtaatttttttagttcgcacctaaagatgattacattgacctcccccgactgcttaccaaattaaaatgtgtccacgaagtagctttgtgatcgcagatacattcatagtgaactcatcagaatggctggtttgcagtactgaaatactatcttctaggctgtatgtagtgctacaattagagaaacagaagtccaaggctggcgacagcttgaaaagtctgacagcttttctacttttcctgaaaattttaagactgtgatatctgtcattttactgtatagctgactgtgtactcaggtattttattggtccttgaaagattggtcgttatggatcacccagcctttccaagtcagtggctgttgttctgtcttgctgtctgatacgagagtggggcttttcagtgaactaaccagggattgttcttgacatacctgacttttctcacatttgaacttccactatcattgtatccatataacttctagcattttcatgccatggtaatccatgagctacacatacgtagcccggcaccgtgatgcaagttcatggtatcgtgcatgttcgtggtatcatggtatcattcatgcgtgtttgaatagttctacatctagtgcttcttgccaaaaagaatacattgtttaaattcacaaaattagcataattgcagtgctaatgaatatcggaatatgtgcacagtaacatttggactattcattggagagtttacccatacatttagcaaattgaatggccaaaacatttgactccagtgagggctcaagttagatccctatagaaagaggacacttcatcttacttaagtcatagttaagatctgtgatacgaaccatagatattgcctgacaaagcagaaatcaccaagtttcccccttttgaattaccaccaagaagtgttgaaacaccaaatagatatcatgttattttgggcatttgcagttttcttccctgctgcatgtaatgtctcagaatcaacattcttttaaaatctagactatattttgaggcaatgaattacttatattcaacttaggcttgttttgacattcagtagaactttaagttcaatctaaaggcttcagtccacatttttttatacgttgtattttaaaaacgtttgaaaggagtcttacacctgtatcatgaaaactgaatccttttgaaataccactatatgaagagagagatgaaatttagtgaacagaattgaaaaggtgctcataatttcactatgcaaacttaccccagtctctaaaaaagtaatttagatttaaagttctttgatgtatttgattttctaaatctttatggttatgatttggaataaaatgtgcctaatcctgtgttacattctgttcttaaatctgaatgccttctcatttaattctgaggaaatatcacacaagtgtcttcattgaccttgaagaaatgtatatacagttgccttataaaacaacataaatttagaccataacttttatagagaaagggttttgtcaaatgttttctgaaaatctgagtaattcaaagcatgcctctgcccctttaatatttttaataacctgcattgttgctgtctgccaaatattaaattgaaatcttcatttcaattttattatctggaaagggcactggattgctctgcaaccaaagaaagcaatatggaatgaaaaaactcattcacttttgtcttattttcttttaaggtgtattggcatgtaatttgcatagagaaagtcctctggttagtctctcaaattgaggctgtttagggaaatccttattcagttggtggcagtggttggtttaaagtagaaggaaataagatcgccttaataccaaaatgattagaagtgctgatttagattcacaaataccatatgtcccttatcattttttgt

SEQ ID NO: 183755 - DNA, 1522 bp, Homo Sapiens
  misc_feature (170)..(220): n is a, c, g, or t
ttgggtttccggaacaaacgccgggaccagcaacagaagcccttataccaccacttcaccactgctatcaacacggagaacatccgccttgttttccgtgacgtgaaggatactattctgcatgacaacctcaagcagcttatgctacagtgatgtacaaaagacttgcnnnnnnnnnnnnnnnnnnnnnnnnnnnnnnnnnnnnnnnnnnnnnnnnnnnaaaatagcagtttacaaccagaattagaacaatcttaattctacgtttaacttcttgaaaatcttagtactttttctgcggcctttggtttgtggctgaaagctgttgagtgactcatcgccaagatttgctgtaatgcaggctttgatctgtttcaccatggcttctattcaagtccagttaaaacctcccagctgacctcagactaggcatatttcaggctttaaattattctactttccaaactgaattctcctgcagtgccaagtatcaaaggtgtccttaaatacttgtagggatgaggttaggaatattcagttccaaaacaagatatcttctgtccgccttacatatagcagtgacacttgttgcctaactttatggtgacctcctattttgtaagggctgttagaagttctatctaagaaatggcattctgtaggtttatagaaggtttagccttcatattttaattgcttgtatacacaacagctgttttgcttttagatttctgtgtttctgaaggtaatgttcttcctgttttcaagtttacataaggatctttggtctgatgctgatgaagagttcacaggtggtatgggagagcaaaaggcaagctaatgctgtttaccgtgttttggtcaaacgtaacgagtgaaatagaatttgcctttctcatatttaattatcatgtagtttaatgtaccatatgtgaaacattctggccatagcagcaactaaaaactgcaagcaacttggtaacagaactttctaaataaacttaacctgttccagaatgtcatgtatttgacttttaagccctatctcagttggtcagtaaagaccaatccttactgtaggaaatcattgttgtatcatcacaaacatctatcttttgctgtcctgtccagtcccatcaactccacactgtgccatttgtggcatcgttttgtttatttggagtttgctaagggcagtatttttctgtcaagactattcaagaaggcattatttgagattcctgttcattcttggtgtgtctctaacagatacagtatgtatacatttgtataattgttgttgttgaaagtccagcttttttgaggtatattttaaatgttttaaggatgcttctaaggatcagtagtaatttttttagttcgcacctaaagatgattacattgacctcccccgactgcttaccaaattaaaatgtgtccacgaagtagctttgtgatcgcagatacattcatagtgaactcatcagaatggctggtttgcagtactgaaatactatcttct

SEQ ID NO: 183756 - DNA, 929 bp, Homo Sapiens
ttggccactgtgcgtcttctgtcccccgttcttccccagcggacccctctttcgagactccctagtggggttcccagctcccgggcgatcctgcccttgccgagcgcgttttctggagtcacctgggggaggggagtcctgggcagggccgggctggggaagacgcctggggcactgcccggcgttaacaaagggagccgataccgaccggcgtgggcgcggagcgggcggccgccaccgagcgtgctgagcaaccgcagcctccgcggccgagagtgcagcgagcaaggggagagccagttgcgcagagccctgcaaccagcagtccagggagaagtggtgaatgtcatggagcccagctgaaatggactggcccccttgagcctgtcccaagccctggtgccaggtgtccatccccgtgctgagatgagttttgatcatcctgagaaaaatgggccttggcctgcagacccaataaaccttccctcccatggataatagtgctaattcctgaggacctgaagggcctgccgcccctgggggattagccagaagcaggcttgttttcctgctcagaacaaagtgacttccctgaacacatcttcattatgattcacaccaacctgaagaaaaagttcagctgctgcgtcctggtctttcttctgtttgcagtcatctgtgtgtggaaggaaaagaagaaagggagttactatgattcctttaaattgcaaaccaaggaattccaggtgttaaagagtctggggaaattggccatggggtctgattcccagtctgtatcctcaagcagcacccaggacccccacaggggccgccagaccctcggcagtctcagaggcctagccaaggccaaaccagaggcctccttccaggtgtggaacaagacagctcttccaaaaaccttatcccta

SEQ ID NO: 183757 - DNA, 1515 bp, Homo Sapiens
  misc_feature (1331)..(1343): n is a, c, g, or t
actttgtacaaaaaagttggcttaaagtctgaataataaaacaaatcccagcagtaatacatttcttaaacctcacagtgcatgatatatcttttcattctgatcctgtgtttgcaaaaatatacacatgtatatcatagttcctcactttttattcatttgttttcctattacctgtagtaaatatattagttagtacatggaatttatagcatcagctacccccaggaacagcacctgacaggcgggggattttttttcaagttgttctacatttgcataaattatttctattattattcatgtatgttatttatttctgaatcacactagtcctgtgaaagtacaactgaaggcagaaagtgttaggattttgcatctaatgttcattatcatggtattgatggacctaagaaaataaaaattagactaagcccccaaataagctgcatgcatttgtaacacgattagtagatttgaatatatagatgtagtattttgggtatctaggtgttttatcattatgtaaaggaattaaagtaaaggactttgtagttgtttttattaaatatgcatatagtagagtgcaaaaatatagcaaaaataaaaactaaaggtagaaaagcattttagatatgccttaatttagaaactgtgccaggtggccctcggaatagatgccaggcagagaccagtgcctgggtggtgcctcctcttgtctgccctcatgaagaagcttccctcacgtgatgtagtgccctcgtaggtgtcatgtggagtagtgggaacaggcagtactgttgagaggagagcagtgtgagagtttttctgtagaagcagaactgtcagcttgtgccttgaggcttccagaacgtgtcagatggagaagtccaagtttccatgcttcaggcaacttagctgtgtacagaagcaatccagtgtggtaataaaaagcaaggattgcctgtataatttatattaaaataaaagggattttaacaaccaacaattcccaacacctcaaaagcttgttgcattttttggtatttgaggtttttatctgaaggttaaagggcaagtgtttggtatagaagagcagtatgtgttaagaaaagaaaaatattggttcgcgtagagtgcaaattagaactagaaagttttatacgattatcattttgagatgtgttaaagtaggttttcactgtaaaatgtattagtgtttctgcattgccatagggcctggttaaaactttctcttaggtttcaggaagactgtcacatacagtaagcttttttccttctgacttataatagaaaatgttttgaaagtnnnnnnnnnnnnntctaatttggaaatttgacttgttagtttctgtgtttgaaatcatggttctagaaatgtagaaattgtgtatatcagatactcatctaggctgtgtgaaccagcccaagatgaccaacatccccacacctctacatctctgtcccctgtatctcttcctttctaccactaaa

SEQ ID NO: 183758 - DNA, 984 bp, Homo Sapiens
tgtacaaaaaagttggcttttctttcattagggggaaggcgtgaggaaagtaccaaacagcagcggagttttaaactttaaatagacaggtctgagtgcctgaacttgccttttcattttacttcatcctccaaggagttcaatcacttggcgtgacttcactacttttaagcaaaagagtggtgcccaggcaacatgggtgactggagcgccttaggcaaactccttgacaaggttcaagcctactcaactgctggagggaaggtgtggctgtcagtacttttcattttccgaatcctgctgctggggacagcggttgagtcagcctggggagatgagcagtctgcctttcgttgtaacactcagcaacctggttgtgaaaatgtctgctatgacaagtctttcccaatctctcatgtgcgcttctgggtcctgcagatcatatttgtgtctgtacccacactcttgtacctggctcatgtgttctatgtgatgcgaaaggaagagaaactgaacaagaaagaggaagaactcaaggttgcccaaactgatggtgtcaatgtggacatgcacttgaagcagattgagataaagaagttcaagtacggtattgaagagcatggtaaggtgaaaatgcgaggggggttgctgcgaacctacatcatcagtatcctcttcaagtctatctttgaggtggccttcttgctgatccagtggtacatctatggattcagcttgagtgctgtttacacttgcaaaagagatccctgcccacatcaagtggactgtttcctctctcgccccacggagaaaaccatcttcatcatcttcatgctggtggtgtccttggtgtccctggccttgaatatcattgaactcttctatgttttcttcaaggcgttaagatcgggttaagggaaagagcgacccttaccatgcgaccagtggtgcgctgagccctgccaagaatgtgggtctcaaaaa

SEQ ID NO: 183759 - DNA, 1801 bp, Homo Sapiens
ttggcttgtgtcggcggctcggctgtaaggaggtggcagggacaaccacaaccacaacggccgggggaggagaaggcggcagcggcgattctaggcggcccaggcggcggggaggaggagaaggaggagggtggcggccgggcttggcttcggctccttgaggagttggcggcggcgcgacccggggaaccggcattgatgtccagctcgccgctgtccaagaaacgtcgcgtgtccgggcctgatccaaagccgggttctaactgctcccctgcccagtccgtgttgtccgaagtgccctcggtgccaaccaacggaatggccaagaacggcagtgaagcagacatagacgagggcctttactcccggcagctgtatgtgttgggccatgaggcaatgaagcggctccagacatccagtgtcctggtatcaggcctgcggggcctgggcgtggagatcgctaagaacatcatccttggtggggtcaaggctgttaccctacatgaccagggcactgcccagtgggctgatctttcctcccagttctacctgcgggaggaggacatcggtaaaaaccgggccgaggtatcacagccccgcctcgctgagctcaacagctatgtgcctgtcactgcctacactggacccctcgttgaggacttccttagtggtttccaggtggtggtgctcaccaacacccccctggaggaccagctgcgagtgggtgagttctgtcacaaccgtggcatcaagctggtggtggcagacacgcggggcctgtttgggcagctcttctgtgactttggagaggaaatgatcctcacagattccaatggggagcagccactcagtgctatggtttctatggttaccaaggacaaccccggtgtggttacctgcctggatgaggcccgacacgggtttgagagcggggactttgtctccttttcagaagtacagggcatggttgaactcaacggaaatcagcccatggagatcaaagtcctgggtccttatacctttagcatctgtgacacctccaacttctccgactacatccgtggaggcatcgtcagtcaggtcaaagtacctaagaagattagctttaaatccttggtggcctcactggcagaacctgactttgtggtgacggacttcgccaagttttctcgccctgcccagctgcacattggcttccaggccctgcaccagttctgtgctcagcatggccggccacctcggccccgcaatgaggaggatgcagcagaactggtagccttagcacaggctgtgaatgctcgagccctgccagcagtgcagcaaaataacctggacgaggacctcatccggaagctggcatatgtggctgctggggatctggcacccataaacgccttcattgggggcctggctgcccaggaagtcatgaaggcctgctccgggaagttcatgcccatcatgcagtggctatactttgatgcccttgagtgtctccctgaggacaaagaggtcctcacagaggacaagtgcctccagcgccagaaccgttatgacgggcaagtggctgtgtttggctcagacctgcaagagaagctgggcaagcagaagtatttcctggtgggtgcgggggccattggctgtgagctgctcaagaactttgccatgattgggctgggctgcggggagggtggagaaatcatcgttacagacatggacaccattgagaagtcaaatctgaatcgacagtttcttttccggccctgggatgtcacgaagttaaagtctgacacggctgctgcag

SEQ ID NO: 183760 - DNA, 2002 bp, Homo Sapiens
ttgggccaggacgtgggcgtgcaggacgcgggcgtgcaggacgccagagctgggtcagagctcgagccagcggcgcccggagagattcggagatgcaggcggctcggatggccgcgagcttggggcggcagctgctgaggctcgggggcggaagctcgcggctcacggcgctcctggggcagccccggcccggccctgcccggcggccctatgccgggggtgccgctcagctggctctggacaagtcagattcccacccctctgacgctctgaccaggaaaaaaccggccaaggcggaatctaagtcctttgctgtgggaatgttcaaaggccagctcaccacagatcaggtgttcccatacccgtccgtgctcaacgaagagcagacacagtttcttaaagagctggtggagcctgtgtcccgtttcttcgaggaagtgaacgatcccgccaagaatgacgctctggagatggtggaggagaccacttggcagggcctcaaggagctgggggcctttggtctgcaagtgcccagtgagctgggtggtgtgggcctttgcaacacccagtacgcccgtttggtggagatcgtgggcatgcatgaccttggcgtgggcattaccctgggggcccatcagagcatcggtttcaaaggcatcctgctctttggcacaaaggcccagaaagaaaaatacctccccaagctggcatctggggagactgtggccgctttctgtctaaccgagccctcaagcgggtcagatgcagcctccatccgaacctctgctgtgcccagcccctgtggaaaatactataccctcaatggaagcaagctttggatcagtaatgggggcctagcagacatcttcacggtctttgccaagacaccagttacagatccagccacaggagccgtgaaggagaagatcacagcttttgtggtggagaggggcttcgggggcattacccatgggccccctgagaagaagatgggcatcaaggcttcaaacacagcagaggtgttctttgatggagtacgggtgccatcggagaacgtgctgggtgaggttgggagtggcttcaaggttgccatgcacatcctcaacaatggaaggtttggcatggctgcggccctggcaggtaccatgagaggcatcattgctaaggcggtgagtaccctgcccgagtccctaggtaacccaaacagaagtctcactgtcccccttgccatgtgtccctgatcacttgcaggcactccctacactagaaactcctcccctaccagcagcccgacttgctagcttaggtctccatccagcgtagactgaactctggttgtatgcaaaacccatccctctggcgcaagcccagcccctctcctagggagactgcagaaccacactgaaccacagcgggatgtgtggaccctcttccaggtagatcatgccactaatcgtacccagtttggggagaaaattcacaactttgggctgatccaggagaagctggcacggatggttatgctgcagtatgtaactgaggtgagggcctcccaagcccctctccctggagccctggggctttcttcccagtcgggtcagactacaacccccagcagcacctggggcagtgggtctccagctttacaccaatgccctaggggatgcggggaggcatagtcagctcagcttctgcgaagagagacagcaatgatgttctgctcaggtgcctgccagcagtaccagaagttaattctacctcatcccttacatccaccccttttaagaaaacaaatacctggaagcacctgatgaactgacccagaacaagtatctgcctgacctgacaagctaggtcagcccttatcttggagatctgggtgatgaggccaagtctgacaaagccctttgcaattttccttcccatgtcccaactatgcaacctcagtccatggcttacatggtgagtgctaacatggaccagggagccacggacttccaga

SEQ ID NO: 183761 - DNA, 1692 bp, Homo Sapiens
  misc_feature (925)..(937): n is a, c, g, or t
ttggctaatattaacaaaacttgagccaagagtaaagaattcagaaggcctgtcaggtgaagtcttcagcctcccacagcgcagggtcccagcatctccacgcgcgcccgtgggaggtgggtccggccggagaggcctcccgcggacgccgtctctccagaactccgcttccaagagggagcctttggctgctttctctccttaaacttagatcaaattttttggtttttaatcagttatcttgggaacttaacctggcccctcacctcttctgcaccccccgcccccgaaactgtctcgtaatgaatttctgctgtcctcctgggagtggacggccgggtcccgtcccccgggagcatcgctcggctcagcaccttggctcccagtgggggccccgtggagggcgcccgtagtgataagcacaccggcacgaacgtcaggtccattcctcgaagtcggagccctcactctgccctgtctgagggcgaacgccccacctcactttctagagccctgtctgtcctagctcctatctgaccttgtgtgtaaatacgtacatctgtttttaaagtggatgggcccctgagaactcagtgaaatgcagagttctccatgcacctaaagctcctttgtcgctctcatggctgtcagatcctggtccctccacactgggtgctggggagggaggaccctcggggctaccgcgcgcccccccatcccacagatcagagccaaggagggagaacagggcagcctgtgggactctaggatgcttcagaagaagcgacggcaccgtcaaccctctgttttttaaaggtggttggagactgttaacactgagctcattgacttctagagattttatttttactggttgatctcttggtggttttcaacttcctgctggaaactagaggtggggcannnnnnnnnnnnnagcctcgcactgtgtccttggggaaggcccgcccccatcctggccggtgtcactgtggcccggccacccctgagcgcccagctccctacctcctggacgtctctgagagtccaggcagagcagagggcagcgctcggccggtcatgctggctcccttggccttgcagcgagcccctggcccacgccgagcgagggatgcttctccctacagcatgtccactcccccggcatggccaggtggggcccctggggcaatggcagtggtagaacgctcaacttggttgcggtaccatcagcccacctgcatttggctttcgacttgcttgttctaagtcacagcgccctcatctttttagcaaggtaaaaaaaccaaaatgggtgttatctctgatatcttgaaaccagcgttctgaatagaggtaggttgagttttctaggggaaaacaaatggagaaaagaggcatgaagaaaagtaaaccgagaacataattaggcatcgggcctaagtgtcctggggagattggaggggacggcagcgttctgcatgatggaggcgctgccgggccccgggtctgtgggggccgtgctctcatggcgtgtgcgggacgccacctgtgcacacctgctcagagcacggctcctcgcaagggtgaaggggcagaccaaccacgacgacacgtagaccaacgacaccttgcgagacacgcttgcaaaactgttgttttggaaaatgtgcttcccttccctctgaaatc

SEQ ID NO: 183762 - DNA, 2352 bp, Homo Sapiens
  misc_feature (50)..(62): n is a, c, g, or t
  misc_feature (1290)..(1301): n is a, c, g, or t
  misc_feature (1400)..(1409): n is a, c, g, or t
  misc_feature (2006)..(2020): n is a, c, g, or t
ttggctcttggtggttttcaacttcctgctggaaactagaggtggggcannnnnnnnnnnnnagcctcgcactgtgtccttggggaaggcccgcccccatcctggccggtgtcactgtggcccggccacccctgagcgcccagctccctacctcctggacgtctctgagagtccaggcagagcagagggcagcgctcggccggtcatgctggctcccttggccttgcagcgagcccctggcccacgccgagcgagggatgcttctccctacagcatgtccactcccccggcatggccaggtggggcccctggggcaatggcagtggtagaacgctcaacttggttgcggtaccatcagcccacctgcatttggctttcgacttgcttgttctaagtcacagcgccctcatctttttagcaaggtaaaaaaaccaaaatgggtgttatctctgatatcttgaaaccagcgttctgaatagaggtaggttgagttttctaggggaaaacaaatggagaaaagaggcatgaagaaaagtaaaccgagaacataattaggcatcgggcctaagtgtcctggggagattggaggggacggcagcgttctgcatgatggaggcgctgccgggccccgggtctgtgggggccgtgctctcagggcgtgtgcgggacgccacctgtgcacacctgctcagagcacggctcctcgcaggggtgaaggggcagaccaacgaaaccagatgagaccaacgacaccatgcgagacacgcttgcagacactgttgttttggaaatgtgcttccctccatctgaaatctcatccctccacccgcccactcgggcagctgtgccgtgggcagggcatgcgctcccctggctgagcaccccagagattctcctgcaccttcctcatgccgcacgctgctcatccgtctccatgtgtgtttagatccatgccattcactgactcactaacacctgcaaaatctttaaggaaaaaagctgaagggtacgaccatgcacatatgtgacctggaaaatgcaaatttagatcttttatgatttaattattattgtttcccatagaagttccctccctttgaaattaatatataatgtataaattctgcactgagccatggcggagctgggcagcccctagttagagtggagacggaggcccaggcgcagggtcacacctcatctggtttccttcccatctcacagcttagcttgtgcttctcaacaccaagtctttaagagcaataaaaactacaccatgaatgtttgaannnnnnnnnnnngggggggggagggtggattttgcttttcatccagaaggaaaaggggaggagagctcctttacattttttaaattaaattcataaatcccagaacagtcnnnnnnnnnnccttttcctttacaccctacttctgagcttaattcagttgatgttatgtccaaattcaggctgagtgctcaggctgaagcaactctgtagcccacagtccgtgctggccactgtcggggtgaggcacattctaggcctggcatcgctgatgccctctgcacccagtccttgagccaggccgaggacaggaagggcattgctggcctgtagctcctgttacccacccagagccaggcgccacactggaggctcccaggcgggagggcccaggcccacccacgggcgtctggccggtcaagctcccagcctgggccgtggtctcctggggacgccgctggcctcccagcttaggcccaggtgccaggtgtcatggggtctcctgcccatcttcccaaggatgccattgctgtcttcatcgtcttcccccgtgtgagacactggttgtctggtactcggcgacagtgtaccagacgcgcaccctatgtgaggtgctttaaggtccctgtcctcaggaagcgcagtctggtggaagagatgagcgctgaacaaatcactaaataacacaaaacaacaatgtaagcagcactttcttgtgtnnnnnnnnnnnnnnngcacgtcctgtcgatgaattttgagtctctctgccttgcctgtcccgactccctttcgcgcaccgtggcatgagaatctttcctcacgctgttcgttgcggtattgctgagcattgatgttgatttgaaggaaaagccgtggttggacccagctgtgtgtttcactcacgtgcaattgagtagctgttgccaggctgtccatgcctgttgtgactaccggttggggtcagatttggggtgaagaatgagtaagtttctgcatgctttgtctctacctgagacacttctacaacaagccaagtataatctctccagccctgcagattttcacc

SEQ ID NO: 183763 - DNA, 2558 bp, Homo Sapiens
ttggcgcagtcatcatcctcaaccacaacttcgagatcgacttcctctgtgggtggaccatgtgtgagcgcttcggagtgctggggagctccaaggtcctcgctaagaaggagctgctctacgtgcccctcatcggctggacgtggtactttctggagattgtgttctgcaagcggaagtgggaggaggaccgggacaccgtggtcgaagggctgaggcgcctgtcggactaccccgagtacatgtggtttctcctgtactgcgaggggacgcgcttcacggagaccaagcaccgcgttagcatggaggtggcggctgctaaggggcttcctgtcctcaagtaccacctgctgccgcggaccaagggcttcaccaccgcagtcaagtgcctccgggggacagtcgcagctgtctatgatgtaaccctgaacttcagaggaaacaagaacccgtccctgctggggatcctctacgggaagaagtacgaggcggacatgtgcgtgaggagatttcctctggaagacatcccgctgggaaaaggaagcagctcagtggcttcataaactgtaccaggagaaggacgcgctccaggagatatataatcagaagggcatgtttccaggggagcagtttaagcctgcccggaggccgtggaccctcctgaacttcctgtcctgggccaccattctcctgtctcccctcttcagttttgtcttgggcgtctttgccagcggatcacctctcctgatcctgactttcttggggtttgtgggagcagcttcctttggagttcgcagactgataggagtaactgagatagaaaaaggctccagctacggaaaccaagagtttaagaaaaaggaataattaatggctgtgactgaacacacgcggccctgacggtggtatccagttaactcaaaaccaacacacagagtgcaggaaaagacaattagaaactatttttcttattaactggtgactaatattaacaaaacttgagccaagagtaaagaattcagaaggcctgtcaggtgaagtcttcagcctcccacagcgcagggtcccagcatctccacgcgcgcccgtgggaggtgggtccggccggagaggcctcccgcggacgccgtctctccagaactccgcttccaagagggagcctttggctgctttctctccttaaacttagatcaaattttttggtttttaatcagttatcttgggaacttaacctggcccctcacctcttctgcaccccccgcccccgaaactgtctcgtaatgaatttctgctgtcctcctgggagtggacggccgggtcccgtcccccgggagcatcgctcggctcagcaccttggctcccagtgggggccccgtggagggcgcccgtagtgataagcacaccggcacgaacgtcaggtccattcctcgaagtcggagccctcactctgccctgtcctggggctggctgagggcgaacgccccacctcactttctagagccctgtctgtcctagctcctatctgaccttgtgtgtaaatacgtacatctgtttttaaagtggatgggcccctgagaactcagtgaaatgcagagttctccatgcacctaaagctcctttgtcgctctcatggctgtcagatcctggtccctccacactgggtgctggggagggaggaccctcggggctaccgcgcgcccccccatcccacagatcaggagccaaggagggagaacagggcagcctgtgggactctaggatgcttcagaagaagcgacggcaccgtcaaccatctttaaaagagagcgggtcggccaggtgtggtggctctcgaagtgctgggattacaggcgtgaggcaccgtgtccagctgaccttttttatataagtaaaaaaatttattcaaccatgagtatgtgttacccaatcaaaaaatcagattagaaaatagtaaagtcctttcactattatattagggagtttaagttaagtatctgtgcttagtctaccatttttaaccaaaagttttaaaaagtgtggattaaatcatacagaagataatctctgtagtcatatataatgtagcaagtatttatgttcatctgtcttgcatgtcattttctaaatgtcatacagataatatactctgtactttttatcttgcaggtattaatcatgaaaacccaagttattttgtcttttgagaaaagttgtaattttatcctcctaaagacaatttttggtcttttgtatttaaaaaaatgtaaagaatatcatattaaagattaattacgttcatttattgagagcagagtgggaaaacaacatttctttcttattagtggtctaaagcctattcagtgcctcactaaaagaaagctaaacctaaggaccatatgacattttatacttttgctttatgaaatttattgttagaagttgagtttaagaaactatatggagtaaagagataacttttttaaacatagaaatttaatttcttttttctaagactgtctaaagaatatcctaagggcaatttgtattataggttttta

SEQ ID NO: 183764 - DNA, 1536 bp, Homo Sapiens
  misc_feature (1174)..(1215): n is a, c, g, or t
ctttgtacaaaaaagttggatttccagtcttctacccctgcagttatcctagtccagcaaagtcatttctttcaaaagagacatcatgtctgaaaataattactggtagtctaatatgagccagagtaaacagctcctcatggtcaatgaacatgttcaggaagcgatcaccttgatgcttgaacccaaccccagacagtggacaattctactttgaaatatccgtgaatatttactgtgggatccaatttaaacttctttcttctctagcctttaaattacacaactttgaactgacacggatctcttacaaagaacaatgcggcactgaaggaagagatgattcctttactcaaacctgcaggaatcagcctattaacaggcaggggaaacggtactttccaatgaatggtaactgatccaggcacattatcacacttcctagtcatctccacctttcctgtattgcctgtggcttgttgtttaagattaagaatcaaagagattaagaagtatcacttcaagtcttgctctgctcacttctatgtttgcagtcaaattattccttatgttggtgacctaaagagaattactttcattcatttcatttcccccgtagcagatggaagtgagaaacctctgagaaaatgaaaacatccttaaccactatctttcccttttatttgattattttatgtcagaaatttgcaaaagtttttttctcctccttctcttccttgttgcttaactttttaattcatgccatatgcagatatccaattatgtgcatcctgtgaataaaccacgtcttggtcactgtcatattttgaaccatctcatcagagatgaataatatctttttaccagagagagaacgaatgttagccacatgcccaagttaacaaagaaaaaatgttctcaaggttgtccttttgggttaaatctggcccttccttggcaaaagcaaaaattctctctgtgagagctcaacatctcaaatacaaccacaggaaaaatggcccaatctgccagtttaggcttaccagcatataatttttaatatctttacttctatcatcccaaatcaaagaactcttctctattatgtttaatcaattgcaagcaaatagatttttctttgtaacaatttgttctgcagaaggctgtttttcannnnnnnnnnnnnnnnnnnnnnnnnnnnnnnnnnnnnnnnnngtctggagaaatcacttagactctgtgtgcctcttctacattgcattctgctctgctatgttacctgctaggctggcttctttggactccctatatgattgatgatgtgaaaacctaaattacttgcagcatagtattacttctttgatgttctcattagcataatgttatttttgaaaaggaaagatactatcacataagttttcctcatctgttgtgatatacaccaatggataaactaacgggaaactgctttttgacattaaaagacagggagaaattatatttaactaagtaaaagttaagtcagaattacttggg

SEQ ID NO: 183765 - DNA, 2305 bp, Homo Sapiens
ttggggtagagcaaagagaaggtaagggagaattatttggggccacctgttacactaaatttttgttaactgaagtctttgacctattatttactattagtcttcagtttgctaactcagcgaagctctattcagttatcttcattttataaacaagaagaatgaagtatattactttggggatctgtggtcatgaagtcagtcttttgatgtgattattatataattaaactttttcacatacagcataacattctacctttagtactgtctggcatagtcagaggagaaatttttcccttcagcttcaaatgtttctttaaattgaccttatcctagtgggtttgttgggaaaaattcattttaaggcttatggtaaaactctttaggagttagaatccctttttttctgaatttcctttctctttaaaaatgaaagggttcttatgcatcttactttctgtctctcaactatgtgctcagtatgttagttttgtttctataaccagtacgctgggagcggactcttggagctattgtaagacaaaagaatcacccaatgactcctgaggcagtcaaggctaactggaagaagatctgtgactttgagaatgccagcaagcctcagagtatccaagaatcaactggcagtataattgaagttctgagtaaaatagattcagaaggaggagtttcagcaaatcatactagtcgtgcaacgtctacagcaacatcaggatttgctggagctattggccagaaactccctccattttcttatgcttatacggaactggaagctattatgtatgcccttggagtgggagcgtcaatcaaggatccaaaagatttgaaatttatttatgaaggaagttctgatttctcctgtttgcccaccttcggagttatcataggtcagaaatctatgatgggtggaggattagcagaaattcctggactttcaatcaactttgcaaaggttcttcatggagagcagtacttagagttatataaaccacttcccagagcaggaaaattaaaatgtgaagcagttgttgctgatgtcctagataaaggatccggtgtagtgattattatggatgtctattcttattctgagaaggaacttatatgccacaatcagttctctctctttcttgttggctctggaggctttggtggaaaacggacatcagacaaagtcaaggtagctgtagccatacctaatagacctcctgatgctgtacttacagataccacctctcttaatcaggctgctttgtaccgcctcagtggagactggaatcccttacacattgatcctaactttgctagtctagcaggttttgacaagcccatattacatggattatgtacatttggattttctgccaggcgtgtgttacagcagtttgcagataatgatgtgtcaagattcaaggcaattaaggctcgttttgcaaaaccagtatatccaggacaaactctacaaactgagatgtggaaggaaggaaacagaattcattttcaaaccaaggtccaagaaactggagacattgtcatttcaaatgcatatgtggatcttgcaccaacatctggtacttcagctaagacaccctctgagggcgggaagcttcagagtacctttgtatttgaggaaataggacgccgcctaaaggatattgggcctgaggtggtgaagaaagtaaatgctgtatttgagtggcatataaccaaaggcggaaatattggggctaagtggactattgacctgaaaagtggttctggaaaagtgtaccaaggccctgcaaaaggtgctgctgatacaacaatcatactttcagatgaagatttcatggaggtggtcctgggcaagcttgaccctcagaaggcattctttagtggcaggctgaaggccagagggaacatcatgctgagccagaaacttcagatgattcttaaagactacgccaagctctgaagggcacactacactattaataaaaatggaatcattaaatactctcttcacccaaatatgcttgattattctgcaaaagtgattagaactaagatgcaggggaaattgcttaacattttcagatatcagataactgcagattttcattttctactaatttttcatgtatcattatttttacaaggaactatatataagctagcacataattatccttctgttcttagatctgtatcttcataataaaaaaattttgcccaagtcctgtttcccttagaatttgtgaataccattgataaagtgaaaggaaaattaaatcaataa

SEQ ID NO: 183766 - DNA, 1928 bp, Homo Sapiens
  misc_feature (329)..(338): n is a, c, g, or t
ttggctcataaaaggaaaaacaaaagatttaagtattctatataccaagtttttgttttgtttttactgtatttattttattgaggttctttatattcctgcctcttcatagtcaaggctcttagtacaggaatattgacttaggaattgtgaaaactccttaagtttcttaagttaaggatgtttggcttttttctttaattttttaaaaaccattttcctatgttaggagtgcaagaatagccagcatttccgattttgacatatgttcattttatgcatatttaagaaattatagctgcatatcccttctttcaaaaaatgttgcnnnnnnnnnnaaaggaattttaatatattcctttaaaagaaagcaatttaatcaattgcaaagcaattatataaaaccacaaagaatgtactgaacctactaaccctttaacatacagtttagggtcctagcgcagagtccttgtttaaaggtcattgactcatcatctgtcagtaatgagaggattggaagaataattttgcatacaaatgaggacttaatttgttgaaatataatctctttaagttccttgaaaatggagttggttttttttgtttctaaatgctatctgcttttaactagtagttgcctacatctggggacttcagagaagaattatattttgttagttaagtagacacagtggttatggaagcatttctttacagtaccctttacgtgtttggtttctgaacttaaaattgccctcatacttaataatatggtctgcatttaatatgaaaggtgttttattgataaatctattgtactatttggatacatttgtgtattccttgcagccaacctgtattcgtgggattggtgtagggttaaatcatcaacattatttcataaaataagaatttgttctgtgttatctaaagatgtatcagtatattgtcacagttgtgctgttaactaaaaatgctgagacccctttttatagaaaaacaaaaagacatcaagtcttcttaattcaacccataatcattaagtacttaacaaagaatattttacaagtgatagtatttcaacaatgtgtaattaatatttttgatacagtgatttcatattggaatcattatttgtgcaaagggacagacagatcacttagattgctatactagtggacataggctaaatgtttgcacattcacattcttatcacgtgtagaatacttcacaaaatagtcaacatctaaggccctaatttatgttttgaaagatcatgtgttcccaaagtattccctattgttggctccacagccttaaagtgctatagatttaaattcattgattagttttaatttttaattttagactgtgtatttccataaataccctacgtactggcatatttgaaactctttttccaggttaggtccttttctttctcattgaatcatcttaaatagttcttggccctgaatttagctgatttaaaattcttaatattcaagaatttatacttattttttccttaaaagccacaggggacagttaaatatcttaaaatatctaaaacattttttaaagcacttagattgtcttacgtatgtgcatactatacctttacagcgtttattgtcttgtctcttgtcagtagaccttcagtacacagtatgtgggatatgtcagtcaagttggtcagcaccagcatctgtccagctgttcagtatattgtgattcattaaaaaatctcttctatcccagacatgggccaaggtgctgtatctgagggatgtgctgtaatttgatttacatgcattagagcacacagtagaaaaacgttagcttcattagtaatatgacacatgtatatagtgagatgtctttattgtgtgctttgcatattttgtaaatattttgcacgtcatta

SEQ ID NO: 183767 - DNA, 1559 bp, Homo Sapiens
  misc_feature (1310)..(1319): n is a, c, g, or t
ttgggatatcttagcctctatctcagaattgagaaatgagcagagtttatcagaaaggaatttcattgctggtatcttttgtgtgtgcatgatgtatagtacacacagctctccttattgatccttcacaggtgtattatttactttgccttccaggtgtccgcaaatatggtaaagattttcaagctattgcagatgtaattggcaacaagactgttggccaagtgaagaacttctttgtaaactacaggcgtcggtttaacttagaggaggtattgcaggagtgggaagcagaacaaggaacccaggcttctaatggtgatgcttctactttaggggaggagacaaaaagtgcttctaatgtgccatcagggaagagcactgatgaagaagaggaggcacagaccccacaggctcctcggacactgggtccatcacctcctgccccatcatccactccaacaccaacagcccctattgccactctgaaccagcctccaccacttcttcgtccaacactgcctgctgccccggctcttcaccggcagcctcctccactccagcagcaggctcggttcatccagccccggccaactttaaatcagcctccaccacctcttattcgccctgctaattccatgccaccccgtctaaacccaagaccggtgttgtccacggttggtggtcaacagccaccatcacttattggaattcagacagattcacagtcctcactgcactaaaaattaaattggacacagctgcagtaacttttcaccccatcattataccagtgctcatctgactgatgaaaaagaggaaagaataatcatttctagatactgaggctgcgaactagttctgtggcagtggactagcataagtggatgtctaagaaatttttcagttcactagactaaaatgttttacaacaaaaagcctccagttagcctcctttctagagtatatgttcagcaatgttgatctcataaaaggaaaaacaaaagatttaagtattctatataccaagtttttgttttgtttttactgtatttattttattgaggttctttatattcctgcctcttcatagtcaaggctcttagtacaggaatattgacttaggaattgtgaaaactccttaagtttcttaagttaaggatgtttggcttttttctttaattttttaaaaaccattttcctatgttaggagtgcaagaatagccagcatttccgattttgacatatgttcattttatgcatatttaagaaattatagctgcatatcccttctttcaaaaaatgttgcnnnnnnnnnnaaaggaattttaatatattcctttaaaagaaagcaatttaatcaattgcaaagcaattatataaaaccacaaagaatgtactgaacctactaaccctttaacatacagtttagggtcctagcgcagagtccttgtttaaaggtcattgactcatcatctgtcagtaatgagaggattggaagaataattttgcatacaaatgaggacttaatttgttgaaatataatctctttaagttcc

SEQ ID NO: 183768 - DNA, 1655 bp, Homo Sapiens
ttggccacctcctttccctcccgcccgcgctctaagccatctccgccttcaccctgacgcctgcctcttcccctcacctttccccctcccctgttctaccatgcccggcatgatggagaaagggcccgagttactggggaagaaccgatcggccaacggcagcgccaagagcccggcaggcggcggcggcagcggcgcctcgtccaccaacggcgggctgcactactcagagcccgagagcggctgcagcagcgacgacgagcacgatgttgggatgagagtcggagccgaataccaagctcggatccctgaatttgatccaggtgctacaaagtacacagataaagacaatggagggatgcttgtatggtctccatatcacagtatcccagatgccaaattggatgaatacattgcaattgcaaaggaaaagcatggctacaatgtggaacaggcacttggcatgttgttctggcataaacataacattgagaagtcccttgctgatctccctaatttcactccctttccggatgagtggacagtggaagataaagtcctatttgaacaagcctttagttttcatggaaagagctttcacaggattcagcaaatgcttccagataagacaattgcaagccttgtaaaatattactattcttgggaaaaaactcgctctaggacaagtttgatggatcgccaggctcgtaaactagctaatagacataatcagggtgacagtgatgatgatgtagaagaaacacatccaatggatgggaatgatagtgattatgatcccaaaaaagaagccaaaaaagagggtaatactgaacaacctgtccaaactagcaagattggacttggaagaagagagtatcagagtttacaacatcgccatcattctcagcgttctaagtgccgtccacctaagggcatgtatttaacccaggaagatgtggtagcagtttcctgtagtcccaatgcagccaacaccatcctgaggcaactggacatggagttgatctctctaaaacgtcaggttcagaatgctaagcaagtaaacagtgcacttaaacagaaaatggaaggtggaattgaagaattcaaacctcctgagtcaaatcagaaaattaatgcccgttggaccacagaggagcagcttctagcagtgcaaggtgtccgcaaatatggtaaagattttcaagctattgcagatgtaattggcaacaagactgttggccaagtgaagaacttctttgtaaactacaggcgtcggtttaacttagaggaggtattgcaggagtgggaagcagaacaaggaacccaggcttctaatggtgatgcttctactttaggggaggagacaaaaagtgcttctaatgtgccatcagggaagagcactgatgaagaagaggaggcacagaccccacaggctcctcggacactgggtccatcacctcctgccccatcatccactccaacaccaacagcccctattgccactctgaaccagcctccaccacttcttcgtccaacactgcctgctgccccggctcttcaccggcagcctcctccactccagcagcagctcggttcatccagccccggccaactttaatcagcctccaccacctcttattcgccctgctaattcc

SEQ ID NO: 183769 - DNA, 1210 bp, Homo Sapiens
ttttcatagtaggttccagatatgctagcgtgtgcagcagggagttgtacctgttttaaaaatatctcctttaatacagagaactacttagcagcatctttttcagttttttctctccattgatttaaaactgatgtcaaaccatgtgtgattacaggcaacaacaacttcatacccaaagcaggatatcctaattgggttaagaactcttttgaaaggaggaaggaaagaaaaacatttggaatattgagtcatttcatagagaaaaaccatgaaaccatgctctcagaagaaatattcagtgaattctgatctttcactgcatgctgtattttaaagccccccaggatgcaaaactaactcaaattggctcagcaacaaaaacaatgggaaagggaattgtcctaaataagccatcccatgccattatactcttggtagagataaacttggataaactcagtgtaattaaactgacttcccaaaagaatgaactgacctgccatatttatagtgcgagcataaaaatcactttctaaaaactttctcccttacttcttcttaataagaaggaattatttattcattagagacaaaaccatactaaaactaaacagatttaaaatacaaatttttggtagcaaacagcaggaaaatctaaatcaaaatatagtgtagtttttacataattttatatatttataaatttatcaaaatagtcttttaaagttcacaatacatatataatgtaacactgtacatgtaaatataataataaatgtattaccaaaatacattaaaaataacccttcaaagtaccaaattcaacattaaaactgtctttaaaagtatggaaatctccataaacatagtttcagtgcatttatagtagtcattaaccagttttctgttttcaagtctcttgaaggtgttatcttagtgctctttttaatttaaggtaagaaggcagagatattcttccagcaagaagttgctttccctctccactgctcgtccagatgaagaaattgtgtctaagagaagaacagctttcactggagtggcaaggccttagtaatgaacatattcagactgaagggactgtgcagggagagacataaactgaggttaaattccatcacatgtaaaacttctagcaagtcatgcagcttctcccttccacacaagacagcttagagatcaatgccaa

SEQ ID NO: 183770 - DNA, 1429 bp, Homo Sapiens
ttctaccagtaggtggcttttattcctcctagggggccctccctgcctacattttggctttgtcttcctttgctcataatgtccttgtccctgctccccacatgcctcatctgtagttcctagcactttcttcttcccttgattccaacccattctccaagaccaagttgccatgccctgtcttagaaacccctttctaatctctattccagtgtgtcctccatttggaagtagtgctaagaaaattaaaagaataaaactgggcaggggcatgagaataggatgcaaagatgaatttttggactgagtggccaagaagctccatggtgagcactcacagtctaaggctggaagtttaatgaactgttttctacatttcacaggtaagaaaactgggatactagttggtggcagaggtgggtctgaaactcaggcaccatgattccagggcttcactactctctgcttgtgaccatcaggcccgagaaagccaagccgtaggattttgaggaattactgagttatagtggactatttgatcttttaaattcttaaaactcggaaaatctgttatcctttattgttgcttacattttatatgttgcttgctcttctgtctgcctagatttaaagttcccaaaatgtagggactccattttgtgcacatataccctgtgtggccccccaggaccttgactgtatgggttcacaaatgccactggctggattgagacagggatttaaaagtcttggaacacatggcaccagggtcactgggatcttgatatctcacctgcctcccccagggcagccttatccctgcccctcaccctgccatgggcaaggctggcttctgagtgagcagggctcagttttgtgttacaggcacacatggcattcagggatgtggctgtggatttcacccaggatgagtggaggctgctgagccctgctcaaaggactctgtacagagaggtgatgctggagaactacagcaacctggtctcactgggaatttcattttctaaaccagaactcatcacccagctggagcaagggaaagagacctggagagaggaaaaaaaatgttcaccggcaacctgtccagcagatccagagccagagctctacctcgatcctttctgccctccgggtttctccagtcagaaattccccatgcagcatgtgctgtgtaatcatcccccctggatcttcacatgcttgtgtgcagaaggtaacatccagcctggggatccgggcccaggggaccaggagaagcagcaacaagcctctgaggggagaccctggagtgatcaagcagaaatcctgagggagaaggtgccatgcctttgtttggaagaaccaagaaaaggactctgggagcgttctccaggccaccccagaggcagccagtcagctctcggaacgg

SEQ ID NO: 183771 - DNA, 1830 bp, Homo Sapiens
ttggcgccgcgccgcttgccgccgggctagcactgacgtgtctctcggcggagctgctgtgcagtggaacgcgctgggccgcgggcagcgtcgcctcacgcggagcagagctgagctgaagcgggacccggagcccgagcagccgccgccatggcaatcaaatttctggaagtcatcaagcccttctgtgtcatcctgccggaaattcagaagccagagaggaagattcagtttaaggagaaagtgctgtggaccgctatcaccctctttatcttcttagtgtgctgccagattcccctgtttgggatcatgtcttcagattcagctgaccctttctattggatgagagtgattctagcctctaacagaggcacattgatggagctagggatctctcctattgtcacgtctggccttataatgcaactcttggctggcgccaagataattgaagttggtgacaccccaaaagaccgagctctcttcaacggagcccaaaagttatttggcatgatcattactatcggccagtctatcgtgtatgtgatgaccgggatgtatggggacccttctgaaatgggtgctggaatttgcctgctaatcaccattcagctctttgttgctggcttaattgtcctacttttggatgaactcctgcaaaaaggatatggccttggctctggtatttctctcttcattgcaactaacatctgtgaaaccatcgtatggaaggcattcagccccactactgtcaacactggccgaggaatggaatttgaaggtgctatcatcgcacttttccatctgctggccacacgcacagacaaggtccgagcccttcgggaggcgttctaccgccagaatcttcccaacctcatgaatctcatcgccaccatctttgtctttgcagtggtcatctatttccagggcttccgagtggacctgccaatcaagtcggcccgctaccgtggccagtacaacacctatcccatcaagctcttctatacgtccaacatccccatcatcctgcagtctgccctggtgtccaacctttatgtcatctcccaaatgctctcagctcgcttcagtggcaacttgctggtcagcctgctgggcacctggtcggtaagtaggctctttgaagatgagctagcaatgcagctaagttgcagtggtttctatcagtgtcttgctcatgaacagatatttcatccaaagatattttccattgtgccttttacaaattcagcacattaaattatcttttcagtaaaaaattgtactgtgggcaccgagtaaaattgcattctttcatctgctcagaactatttttgccttgatgctaaagtaaaatgaaggagcactcacatgcgtttggtttcttcttccccaggacacgtcttctgggggcccagcacgtgcttatccagttggtggcctttgctattacctgtcccctccagaatcttttggctccgtgttagaagacccggtccatgcagttgtatacatagtgttcatgctgggctcctgtgcattcttctccaaaacgtggattgaggtctcaggttcctctgccaaagatgtaagtagaagcaaaactttctggaagggtgatgaaagtgtgactggtataaggggtgtggacttgtcacctcatcataaataatggtctgtgacatgtgcagatagatcgtcgtcctttagggggcagttcagaagcttttaagggctgacagatggagtccagcagtagatcagctgtgggtatgagaatctgaatccacactgtaaagttagactttgtcatatgacttcttgcggcagttt

SEQ ID NO: 183772 - DNA, 1784 bp, Homo Sapiens
ctttgtacaaaaaagttggggctcttctgatcccgtctcccggacaggttgaggaagctgctccagaagcgcctcggaaggggagctctcatcatggcgcgtgctgctgcggcatatggacttttaataatgtttttgaatttcgtattctttcattccactgtgtaaagtgctagacattttccaatttaaaattttgctttttatcctggcactggcaaaaagaactgtgaaagtgaaattttattcagccgactgccagagaagtgggaatggtataggattgtccccaagtgtccatgtaacttttgttttaacctttgcaccttctcagtgctgtatgcggctgcagccgtctcacctgtttccccacaaagggaatttctcactctggttggaagcacaaacactgaaatgtctacgtttcattttggcagtagggtgtgaagctgggagcagatcatgtatttcccggagacgtgggaccttgctggcatgtctccttcacaatcaggcgtgggaatatctggcttaggactgtttctctctaagacaccattgttttcccttattttaaaagtgatttttttaaggacagaacttcttccaaaagagagggatggctttcccagaagacactcctggccatctgtggatttgtctgtgcacctattggctcttctagctgactcttctggttgggcttagagtctgcctgtttctgctagctccgtgtttagtccacttgggtcatcagctctgccaagctgagcctggccaagctaggtggacagacccttgcagtgatgtccgtttgtccagattctgccagtcatcactggacacgtctcctcgcagctgccctagcaaggggagacattgtggtagctatcagacatggacagaaactgacttagtgctcacaagcccctacaccttctgggctgaagatcacccagctgtgttcagaattttcttactgtgcttaggactgcacgcaagtgagcagacaccaccgacttcctttctgcgtcaccagtgtcgtcagcagagagaggacagcacaggctcaaggttggtagtgaagtcaggttcggggtgcatgggctgtggtggtggtgatcagttgctccagtgtttgaaataagaagactcatgtttatgtctggaataagttctgtttgtgctgacaggtggcctaggtcctggagatgagcactctctctctggcctttagggagtcccctcttaggacaggcactgcccagcagcaagggcagcagagttgggtgctaagatcctgaggagctcgaggtttcgagctggctttagacattggtgggaccaaggatgttttgcaggatgccctgatcctaagaagggggcctgggggtgcgtgcagcctgtcggggagaccccactctgacagtgggcacacggcagcctgcaaagcacagggccaccgccacagcccggcagaggggcacactctggagaccttgctggcagtgctagccaggaaacagagtgaccaagggacaagaagggacttgcctaaagccacccagcaactcagcagcagaaccaagatgggccccaggctcctccatatggcccaaggcttaccaccctatcacacgtggccttgtctagacccagtcctgaacaggggagaggctcttgagaactgatgccctcctacccacatggttctcccactgccctgtctgctctgctgctacagagggcagggcctcccccagcccacgcttgggaatgcttgg

SEQ ID NO: 183773 - DNA, 1027 bp, Homo Sapiens
caactttgtacaaaaaagttggcaccctctttatcttcttagtgtgctgccagattcccctgtttgggatcatgtcttcagattcagctgaccctttctattggatgagagtgattctagcctctaacagaggcacattgatggagctagggatctctcctattgtcacgtctggccttataatgcaactcttggctggcgccaagataattgaagttggtgacaccccaaaagaccgagctctcttcaacggagcccaaaagttatttggcatgatcattactatcggccagtctatcgtgtatgtgatgaccgggatgtatggggacccttctgaaatgggtgctggaatttgcctgctaatcaccattcagctctttgttgctggcttaattgtcctacttttggatgaactcctgcaaaaaggatatggccttggctctggtatttctctcttcattgcaactaacatctgtgaaaccatcgtatggaaggcattcagccccactactgtcaacactggccgaggaatggaatttgaaggtgctatcatcgcacttttccatctgctggccacacgcacagacaaggtccgagcccttcgggaggcgttctaccgccagaatcttcccaacctcatgaatctcatcgccaccatctttgtctttgcagtggtcatctatttccagggcttccgagtggacctgccaatcaagtcggcccgctaccgtggccagtacaacacctatcccatcaagctcttctatacgtccaacatccccatcatcctgcagtctgccctggtgtccaacctttatgtcatctcccaaatgctctcagctcgcttcagtggcaacttgctggtcagcctgctgggcacctggtcggacacgtcttctgggggcccagcacgtgcttatccagttggtggcctttgctattacctgtcccctccagaatcttttggctccgtgttagaagacccggtccatgcagttgtatacatagtgttcatgctgggctcctg

SEQ ID NO: 183774 - DNA, 1912 bp, Homo Sapiens
ttggctcagcctcctcccccttctggatggagaacccctacgtgaaagtggacaccattgcacccgatgagagcttctcgcggctggatgccggccgtgtcaacaccaaggtgcgcagctttgggccactttccaaggctggcttctacctggccttccaggaccagggcgcctgcatgtcgctcatctccgtgcgcgccttctacaagaagtgtgcatccaccaccgcaggcttcgcactcttccccgagaccctcactggggcggagcccacctcgctggtcattgctcctggcacctgcatccctaacgccgtggaggtgtcggtgccactcaagctctactgcaacggcgatggggagtggatggtgcctgtgggtgcctgcacctgtgccaccggccatgagccagctgccaaggagtcccagtgccgcccctgtccccctgggagctacaaggcgaagcagggagaggggccctgcctcccatgtccccccaacagccgtaccacctccccagccgccagcatctgcacctgccacaataacttctaccgtgcagactcggactctgcggacagtgcctgcaccaccgtgccatctccaccccgaggtgtgatctccaatgtgaatgaaacctcactgatcctcgagtggagtgagccccgggacctgggtggccgggatgacctcctgtacaatgtcatctgcaagaagtgccatggggctggaggggcctcagcctgctcacgctgtgatgacaacgtggagtttgtgcctcggcagctgggcctgacggagcgccgggtccacatcagccatctgctggcccacacgcgctacacctttgaggtgcaggcggtcaacggtgtctcgggcaagagccctctgccgcctcgttatgcggccgtgaatatcaccacaaaccaggctgccccgtctgaagtgcccacactacgcctgcacagcagctcaggcagcagcctcaccctatcctgggcacccccagagcggcccaacggagtcatcctggactacgagatgaagtactttgagaagagcgagggcatcgcctccacagtgaccagccagatgaactccgtgcagctggacgggcttcggcctgacgcccgctatgtggtccaggtccgtgcccgcacagtagctggctatgggcagtacagccgccctgccgagtttgagaccacaagtgagagaggctctggggcccagcagctccaggagcagcttcccctcatcgtgggctccgctacagctgggcttgtcttcgtggtggctgtcgtggtcatcgctatcgtctgcctcaggaagcagcgacacggctctgattcggagtacacggagaagctgcagcagtacattgctcctggaatgaaggtttatattgacccttttacctacgaggaccctaatgaggctgttcgggagtttgccaaggagatcgacgtgtcctgcgtcaagatcgaggaggtgatcggagctggggaatttggggaagtgtgccgtggtcgactgaaacagcctggccgccgagaggtgtttgtggccatcaagacgctgaaggtgggctacaccgagaggcagcggcgggacttcctaagcgaggcctccatcatgggtcagtttgatcaccccaatataatccggctcgagggcgtggtcaccaaaagtcggccagttatgatcctcactgagttcatggaaaactgcgccctggactccttcctccggctcaacgatgggcagttcacggtcatccagctggtgggcatgttgcggggcattgctgccggcatgaagtacctgtccgagatgaactatgtgcaccgcgacctggctgctcgcaacatccttgtcaacagcaacctggtctgcaaagtctcagactttgg

SEQ ID NO: 183775 - DNA, 2004 bp, Homo Sapiens
ttggggatgtgatgagagatgagagagaaaaactaggagtagaatcctaggtgtctagcctttatggtcaccaggagttctcatgggagctggaggattagggcagcaacacagaggaatatggggctgggctcagcagggagcctgctggagctgtgcccatcgcagggagaggctggcttgacgttaccctctcacgcccacctcttctccctccagttgctcctggaatgaaggtttatattgacccttttacctacgaggaccctaatgaggctgttcgggagtttgccaaggagatcgacgtgtcctgcgtcaagatcgaggaggtgatcggagctggggaatttggggaagtgtgccgtggtcgactgaaacagcctggccgccgagaggtgtttgtggccatcaagacgctgaaggtgggctacaccgagaggcagcggcgggacttcctaagcgaggcctccatcatgggtcagtttgatcaccccaatataatccggctcgagggcgtggtcaccaaaagtcggccagttatgatcctcactgagttcatggaaaactgcgccctggactccttcctccggctcaacgatgggcagttcacggtcatccagctggtgggcatgttgcggggcattgctgccggcatgaagtacctgtccgagatgaactatgtgcaccgcgacctggctgctcgcaacatccttgtcaacagcaacctggtctgcaaagtctcagactttggcctctcccgcttcctggaggatgacccctccgatcctacctacaccagttccctgggcgggaagatccccatccgctggactgccccagaggccatagcctatcggaagttcacttctgctagtgatgtctggagctacggaattgtcatgtgggaggtcatgagctatggagagcgaccctactgggacatgagcaaccaggatgtcatcaatgccgtggagcaggattaccggctgccaccacccatggactgtcccacagcactgcaccagctcatgctggactgctgggtgcgggaccggaacctcaggcccaaattctcccagattgtcaataccctggacaagctcatccgcaatgctgccagcctcaaggtcattgccagcgctcagtctggcatgtcacagcccctcctggaccgcacggtcccagattacacaaccttcacgacagttggtgattggctggatgccatcaagatggggcggtacaaggagagcttcgtcagtgcagggtttgcatcctttgacctggtggcccagatgacggcagaagacctgctccgtattggggtcaccctggccggccaccagaagaagatcctgagcagtatccaggacatgcggctgcagatgaaccagacgctgcctgtgcaggtctgacaccggctcccacggggaccctgaggaccgtgcagggatgccaagcagccggctggactttcggactcttggacttttggatgcctggccttaggctgtggcccagaagctggaagtttgggaaaggcccaagctgggacttctccaggcctgtgttccctccccaggaagtgcgccccaaacctcttcatattgaagatggattaggagagggggtgatgacccctccccaagcccctcagggcccagaccttcctgctctccagcaggggatccccacaacctcacacttgtctgttcttcagtgctggaggtcctggcagggtcaggctggggtaagccggggttccacagggcccagccctggcaggggtctggccccccaggtaggcggagagcagtccctccctcaggaactggaggaggggactccaggaatggggaaatgtgacaccaccatcctgaagccagcttgcacctccagtttgcacagggatttgttctgggggctgagggccctgtccccacccccgcccttggtgctgtcataaaagggcaggcaggggcaagctgaggagttgctcttttg

SEQ ID NO: 183776 - DNA, 1335 bp, Homo Sapiens
tttgtacaaaaaagttggctcaagtgtgccctgtaatattactttgtaatatgccactatgagtactgacacttagagctgtttaaaggccgagaactggaaacagcctttcctccattttctgtgtattggtgatgggagtgataaccttttgggggagctttctaaatctcgcagaagaggaaagtggcctgctctggcaggtatgtgcaggatacagtgtgtttcatctgttccggtgccaagaatgagcactgtactgtggcagttccctttggatttgtatgtgctctgggctcatgaagatattgcatcgtgagctgcatcttttgcactctttttcagtgacctaaaaatggcttatttccgaggaatgaaaggctgccatcattggctgtgggtgtgaaaaacctttcctagcttagagcatttgtatctacaatacattttaaagtcagagttcgtgttccctgttttaatcacatgactacctgtcccagtacacgaaagggcgctggttggcattcttcttaatgtatttagtgaagatcataagaaatcctttaagagtttaaatgtctctgaaacaggcatacaggctctagtcaagaatgaattagagtgaaggaaagctgtgtgacacctggcattcctctctgttcatggagcttctttgaggcttgaagtttgattttactatctagacctctctggctaatacctattcttcaaccacctcggttactctgacataggaatttacttcttttccttgagtggaaaacactttagaaagtaataacaaacattattataaactaatatatgtgagagtacttagttgaaacaaaaaggaattttagtagacagtattatattatctttgaaaatcaaggagaagtttatgcaacttaaaatgtttacacactgtggtgcaatctactgtttgtgaatgtctgtattatcaggaaacatgtctatacgatcgcagagttgtatttcctcacaaacttctttacgaagagtgaaatacgtttttgtacctctcattttcagtcagggacatactttgtgcaatatttctgtgattgtgcctatgcatgatgaatgaatgcatttcaatcatacattgcctaaatcataacttgatgatgcttgggaaagaatcaacagttaaaacttcatgaagttctaatgtctgtgttccaaaacacatcacattattaggttgtagggagatatgtaggtgtgctccctggggtggggagttttctagttactagaccatctccatttttagcacttggcagcctcatgatccttttataaatgtga

SEQ ID NO: 183777 - DNA, 3103 bp, Homo Sapiens
ttgggaagaagcatgatacgcatcgggtagaggagctggagaggagcttgtccagactcaaaaaccagatggctgagccactgcccccggatgccccagcagtgtcctctgaggtggagctgcaagacctgaggaaggagctggagagagtggcaggagagctccaggctcaggtggaaaacaatcagtgcatcagtctcctgaaccgtgggcaaaaggagaggcttcgcgagcaggaggagaggcttcaggagcagcaggagaggcttcgggaacgggagaagaggcttcagcagctggccgagccacagagcgacttggaggagctgaagcacgagaacaagagcgcactgcagttggagcagcaagtaaaggagctgcaggagaagctgggccaggtgatggagacgctcacctcggccgagaaggagccagaggcagcagtcccagcctcagggactgggggcgagtctagcggccttatggacctcctggaggagaaggcggacctgagggagcatgtggagaaactggaacttggattcatccagtaccggagagagagatgccatcagaacgtacatcgccttctaacagagccaggggacagtgccaaagatgcgtcaccgggaggaggccatcatcaggctggcccaggacaaggaggagaggaaggtgaagctgctggagctgcaggagatggtgttgcggcttgtggcagctacaacgaggggcacggcaaattcctggccgctgcccggaaccctgctgctgaacccagtccaggagccccagccccccaggagctcggggctgccgacaagcatggtgatctttgtgaggcgagcctcaccaacagcgtggagcctgcacaaggagaagccagggagggttcttcccaggacaaccctactgcacagccagtcgtgcagctccttggtgagatgcaggaccaccaggagcacccaggcttgggcagcaactgctgtgtgccatgcttttgctgggcttggctgccgagaagaaggagataaacaccaccatcatcaaagagctggtcaagaaatttttaaaaacgaaacaaagttatggggttaatctcctacacaattcatttacttcatttgaatgttagagctactcatgattatttgtgtttctaatttatagtttaagtttttttgtaaaaagttaaaagagagtgggtctctgtgcctctcactgatgttcactctggcatcctttagcatttttcttttttcatttcataattgtaggtcattagcatgcatatcgagtttgcccttacgtggtgggagttcaaacacacaaagacccactctttgcacaaaactgttctcgctggtttggaataggctcccgtgcttttttaatgttattgcagcatggatgttcattacagaattcagataaaatttgctaatgttctgctatgatgtttgatctcatcttaatcacagtgagctcttccatagctcaatatgcggtttgccctcaagtgtgcactgtttattactttgtaatatgccactatgagtactgacacttagagctgtttaaaggccgagaactggaaacagcctttcctccattttctgtgtattggtgatgggagtgataaccttttgggggagctttctaaatctcgcagaagaggaaagtggcctgctctggcaggtatgtgcaggatacagtgtgtttcatctgttccggtgccaagaatgagcactgtactgtggcagttccctttggatttgtatgtgctctgggctcatgaagatattgcatcgtgagctgcagcagttgcactctttttcagtgacctaaaaatggcttatttccgaggaatgaaaggctgccatcgttggctgtggatgtggaaaacctttcctagcttagagcatttgtatctacaatacattttaaagtcagagttcgtgttccctgttttaatcacatgactacctgtcccagtacacgaaagggcgctggttggcattcttcttaatgtatttagtaaagatcataagacatcctttaagagtttaaatgtctctgaaacaggcatacaggctctagtcaagaatgaattagagtgaaggaaagctgtgtgacacctggcattcctctctgttcatggagcttctttgaggcttgaagtttgattttactatctagacctctctggctaatacctattcttcaaccacctcggttactctgacataggaatttacttcttttccttgagtggaaaacactttagaaaataataacaaacattattataaactaatatatgtgagagtacttagttgaaacaaaaaggaattttagtagacagtattatattatctttgaaaatcaaggagaagtttatgcaactgaaaatgtttacacactgtgctgcaatctactgtttgtgaatgtcaatgtattatcaggaaacatgtctatacgatcgcagagttgtatttcctcacaaacttctttacgaagagtgaaatatgtttttgtacctctcagtttcagtcagggacatattttgtgcaatatttctgtgattgtgcctatgcgtgatgagtgaatgcatttcaatcatacattgcctaaatcataacttgatgatgcttgggaaagaatcaacagttaaaacttcatgaagttctaatgtctgtgttccaaaacacatcacattattaggttgtagggagatatgtatgtgtgctccctggggtggggagttttctagttactagaccatctccatttttagcacttggcagcctcatgatccttttataaataggagattaacaggagagcagcaatacgattttgccaatggaataacagatttgccggcattcactgaaagagggcagatattgggtccttgtgacttcaactgactcttccgaattgtatgaatttatcaatgtattagataaacccagtttcaggaataataaagaaaaaatattagaccaaataatgtggctaatattggtatgatttctagcccgtgggtttaaaactgtatcctaaagagtcattttaaaataatataaatattttaaaa

SEQ ID NO: 183778 - DNA, 961 bp, Homo Sapiens
ctttgtacaaaaaagttggatctactgtttgtgaatgtctgtattatcaggaaacatgtctatacgatcgcagagttgtatttcctcacaaacttctttacgaagagtgaaatacgtttttgtacctctcattttcagtcagggacatactttgtgcaatatttctgtgattgtgcctatgcatgatgaatgaatgcatttcaatcatacattgcctaaatcataacttgatgatgcttgggaaagaatcaacagttaaaacttcatgaagttctaatgtctgtgttccaaaacacatcacattattaggttgtagggagatatgtaggtgtgctccctggggtggggagttttctagttactagaccatctccatttttagcacttggcagcctcatgatccttttataaatgtgagattaacaggagagcagcaatacgattttgccaatggaataacagatttgccggcattcactgaaagagggcagatattgggtccttgtaacttcaactgactcttccaaattgtatgaatttatcaatgtattacacaaatccagtttcagaatgataaaaaatgttagaccaaataatgcggctaattaacagtcgtatgatttctagcccatgggtttaaaactgtatcttaaagagtcattttaaaataatataaatattaaaaaatgtaactgctatcttaatgttctgaaataaaacattttaaaatataaatcctgtagtttaaaaggaagaaatggtgggaaggaaaagtagagaaagaaatgccaattacaggccaaagcgttatttgccaagttttcttagaatgaattttaccaatgtatgagttcttgttaacagaatgtgtaacggaaatactgaaagacttttgcttaaagtggcattattgactgctgatgtgatgctactgtaatgcaataaatttttaaattgttgc

SEQ ID NO: 183779 - DNA, 1026 bp, Homo Sapiens
tacaaaaaagttggccacccctgcccgcccgacagcgccgccgcctgccccgccatgggtcgacagaaggagctggtgtcccgctgcggggagatgctccacatccgctaccggctgctccgacaggcgctggccgagtgcctggggaccctcatcctcgtgatgtttggctgtggctccgtggcccaggttgtgctcagccggggcacccacggtggtttcctcaccatcaacctggcctttggctttgctgtcactctgggcatcctcatcgctggccaggtctctggggcccacctgaaccctgccgtgacctttgccatgtgcttcctggctcgtgagccctggatcaagctgcccatctacaccctggcacagacgctgggagccttcttgggtgctggaatagtttttgggctgtattatggtaagcattccccaccctgtcctcctccactacccccgtccctctgttcaggacctgctggcaccaggccttttgatgacagacggctaggacctgcccaggccccgggctcatgactcactcattcacgcacagggtcaagatgcaatctggcactttgccgacaaccagctttttgtttcgggccccaatggcacagccggcatctttgctacctacccctctggacacttggatatgatcaatggcttctttgaccagttcataggcacagcctcccttatcgtgtgtgtgctggccattgttgacccctacaacaaccccgtcccccgaggcctggaggccttcaccgtgggcctggtggtcctggtcattggcacctccatgggcttcaactccggctatgccgtcaaccctgcccgggactttggcccccgcctttttacagcccttgcgggctggggctctgcagtcttcacgaccggccagcattggtggtgggtgcccatcgtgtccccactcctgggctccattgcgggtgtcttcgtgtaccagctgatgatcggctgccacctggagcagcccccaccctccaacga

SEQ ID NO: 183780 - DNA, 930 bp, Homo Sapiens
tggtacaaaaaagttggccaccgcctcccgccacccctgcccgcccgacagcgccgccgcctgccccgccatgggtcgacagaaggagctggtgtcccgctgcggggagatgctccacatccgctaccggctgctccgacaggcgctggccgagtgcctggggaccctcatcctcgtgatgtttggctgtggctccgtggcccaggttgtgctcagccggggcacccacggtggtttcctcaccatcaacctggcctttggctttgctgtcactctgggcatcctcatcgctggccaggtctctggggcccacctgaaccctgccgtgacctttgccatgtgcttcctggctcgtgagccctggatcaagctgcccatctacaccctggcacagacgctgggagccttcttgggtgctggaatagtttttgggctgtattatgatgcaatctggcactttgccgacaaccagctttttgtttcgggccccaatggcacagccggcatctttgctacctacccctctggacacttggatatgatcaatggcttctttgaccagttcataggcacagcctcccttatcgtgtgtgtgctggccattgttgacccctacaacaaccccgtcccccgaggcctggaggccttcaccgtgggcctggtggtcctggtcattggcacctccatgggcttcaactccggctatgccgtcaaccctgcccgggactttggcccccgcctttttacagcccttgcgggctggggctctgcagtcttcacgaccggccagcattggtggtgggtgcccatcgtgtccccactcctgggctccattgcgggtgtcttcgtgtaccagctgatgatcggctgccacctggagcagcccccaccctccaacgaggaagagaatgtgaagctggcccatgtgaa

SEQ ID NO: 183781 - DNA, 1449 bp, Homo Sapiens
  misc_feature (867)..(934): n is a, c, g, or t
  misc_feature (1304)..(1336): n is a, c, g, or t
tttgtacaaaaaagttggatctacaccctcgtgtctacaagacgctgggagccttcttgggtgctggaatagtttttgggctgtattatgatgcaatctggcactttgccgacaaccagctttttgtttcgggccccaatggcacagccggcatctttgctacctacccctctggacacttggatatgatcaatggcttctttgaccagttcataggcacagcctcccttatcgtgtgtgtgctggccattgttgacccctacaacaaccccgtcccccgaggcctggaggccttcaccgtgggcctggtggtcctggtcattggcacctccttgggcttcaactccggctatgccgtcaaccctgcccgggactttggcccccgcctttttacagcccttgcgggctggggctctgcagtcttcacgaccggccagcattggtggtgggtgcccatcgtgtccccactcctgggctccattgcgggtgtcttcgtgtaccagctgatgatcggctgccacctggagcagcccccaccctccaacgaggaagagaatgtgaagctggcccatgtgaagcacaaggagcagatctgagtgggcaggggccatctccccactccgctgccctggccttgagcatccactgactgtccaagggccactcccaagaagcccccttcacgatccaccctttcaggctaaggagctccctatctaccctcaccccacgagacagccccttcaggatttccactggaccttgcccaaatagcaccttaggccactgcccctaagctggggtggaaccggaatttgggtcaatacatccttttgtctcccaagggaagagaatgggcagcaggtnnnnnnnnnnnnnnnnnnnnnnnnnnnnnnnnnnnnnnnnnnnnnnnnnnnnnnnnnnnnnnnnnnnnttcccagatattcagggcaagggaccagtcggaagggattctggctattgggggagcccagagacaggggaaggcagcctgtccatctgtgcataaggagaggaaagttccagggtgtgtatgtttcaggggcttcacatggaggagctgcagatagatatgtgtttctgtgtatgtgtatgtctgccttttttttctaagtgggggcttctacaggcttttgggaagtagggtggatgtgggtagggctgggaggagggggccacagcttaggtttggagctctggatgtacatacataagtaggagcagtgggacgtgtttctgtcataatgcagggcatgaagggtggagtgaagtcaggtcataannnnnnnnnnnnnnnnnnnnnnnnnnnnnnnnnaatgtatgtagcagatgttacagtcttagggatccgggatgggagaccccactttaaaagggtcgtcactcctttaatcctctactccacaatgtactcttttacttttatat

SEQ ID NO: 183782 - DNA, 1431 bp, Homo Sapiens
  misc_feature (393)..(459): n is a, c, g, or t
aaacaaaacaaagcaaacatgaaatttatgcctgacttcactccacccttcatgccctgcattatgacagaaacacgtcccactgctcctacttatgttatgtacatccagagctccaaacctaagctgtggccccctcctcccagccctacccacatccaccctacttcccaaaagcctgtagaagcccccattagaaaaaaaggcagacatacacatacacagaaacacatatctatctgcagctcctccatgtgaagcccctgaaacatacacaccctggaactttcctctccttatgcacagatggacaggctgccttcccctgtctctgggctcccccaatagccagaatcccttccgactggtcccttgccctgaatatctgggaannnnnnnnnnnnnnnnnnnnnnnnnnnnnnnnnnnnnnnnnnnnnnnnnnnnnnnnnnnnnnnnnnnacctgctgcccattctcttcccttgggagacaaaaggatgtattgacccaaattccggttccaccccagcttaggggcagtggcctaaggtgctatttgggcaaggtccagtggaaatcctgaaggggctgtctcgtggggtgagggtagatagggagctccttagcctgaaagggtggatcgtgaagggggcttcttgggagtggcccttggacagtcagtggatgctcaaggccagggcagcggagtggggagatggcccctgcccactcagatctgctccttgtgcttcacatgggccagcttcacattctcttcctcgttggagggtgggggctgctccaggtggcagccgatcatcagctggtacacgaagacacccgcaatggagcccaggagtggggacacgatgggcacccaccaccaatgctggccggtcgtgaagactgcagagccccagcccgcaagggctgtaaaaaggcgggggccaaagtcccgggcagggttgacggcatagccggagttgaagcccatggaggtgccaatgaccaggaccaccaggcccacggtgaaggcctccaggcctcgggggacggggttgttgtaggggtcaacaatggccagcacacacacgataagggaggctgtgcctatgaactggtcaaagaagccattgatcatatccaagtgtccagaggggtaggtagcaaagatgccggctgtgccattggggcccgaaacaaaaagctggttgtcggcaaagtgccagattgcatcataatacagcccaaaaactattccagcacccaagaaggctcccagcgtctgtgccagggtgtagatgggcagcttgatccagggctcacgagccaggaagcacatggcaaaggtcacggcagggttcaggtgggccccagagacctggccagcgatgaggatgcccagagtgacccaacttttttgtacaaagtt

SEQ ID NO: 183783 - DNA, 1016 bp, Homo Sapiens
aaaagccaactttgtacaaaaaagttgggcccgacagccccgccgcctgccccgccatgggtcgacagaaggagctggtgtcccgctgcggggagatgctccacatccgctaccggctgctccgacaggcgctggccgagtgcctggggaccctcatcctcgtgatgtttggctgtggctccgtggcccaggttgtgctcagccggggcacccacggtggtttcctcaccatcaacctggcctttggctttgctgtcactctgggcatcctcatcgctggccaggtctctggggcccacctgaaccctgccgtgacctttgccatgtgcttcctggctcgtgagccctggatcaagctgcccatctacaccctggcacagacgctgggagccttcttgggtgctggaatagtttttgggctgtattatgatgcaatctggcactttgccgacaaccagctttttgtttcgggccccaatggcacagccggcatctttgctacctacccctctggacacttggatatgatcaatggcttctttgaccagttcataggcacagcctcccttatcgtgtgtgtgctggccattgttgacccctacaacaaccccgtcccccgaggcctggaggccttcaccgtgggcctggtggtcctggtcattggcacctccatgggcttcaactccggctatgccgtcaaccctgcccgggactttggcccccgcctttttacagcccttgcgggctggggctctgcagtcttcacgaccggccagcattggtggtgggtgcccatcgtgtccccactcctgggctccattgcgggtgtcttcgtgtaccagctgatgatcggctgccacctggagcagcccccaccctccaacgaggaagagaatgtgaagctggcccatgtgaagcacaaggagcagatctgagtgggcaggggcatctccccactccgctgccctggccttgagcatccactgactgtcccaagggccactcccagaagcccc

SEQ ID NO: 183784 - DNA, 1994 bp, Homo Sapiens
agagccaactttgtacaaaaaagttggatcaaagtggtgggactcgcgtcgcggccgcggagacgtgaagctctcgaggctcctcccgctgcgggtcggcgctcgccctcgctctcctcgccctccgccccggccccggccccgcgcccgccatggagaagactgagctgatccagaaggccaagctggccgagcaggccgagcgctacgacgacatggccacctgcatgaaggcagtgaccgagcagggcgccgagctgtccaacgaggagcgcaacctgctctccgtggcctacaagaacgtggtcgggggccgcaggtccgcctggagggtcatctctagcatcgagcagaagaccgacacctccgacaagaagttgcagctgattaaggactatcgggagaaagtggagtccgagctgagatccatctgcaccacggtgctggaattgttggataaatatttaatagccaatgcaactaatccagagagtaaggtcttctatctgaaaatgaagggtgattacttccggtaccttgctgaagttgcgtgtggtgatgatcgaaaacaaacgatagataattcccaaggagcttaccaagaggcatttgatataagcaagaaagagatgcaacccacacacccaatccgcctggggcttgctcttaacttttctgtattttactatgagattcttaataacccagagcttgcctgcacgctggctaaaacggcttttgatgaggccattgctgaacttgatacactgaatgaagactcatacaaagacagcaccctcatcatgcagttgcttagagacaacctaacactttggacatcagacagtgcaggagaagaatgtgatgcggcagaaggggctgaaaactaaatccatacagggtgtcatccttctttccttcaagaaacctttttacacatctccattccttattccacttggatttcctatagcaaagaaacccattcatgtgtatggaatcaactgtttatagtcttttcacactgcagctttgggaaaacttcattccttgatttgtgtttgtcttggccttcctggtgtgcagtactgctgtagaaaagtattaatagcttcatttcatataaacataagtaactcccaaacacttatgtagaggactaaaaatgtatctggtatttaagtaatctgaaccagttctgcaagtgactgtgttttgtattactgtgaaaataagaaaatgtagttaattacaatttaaagagtattccacataacttcttaatttctacattccctcccttactcttcgggggtttcctttcagtaagcaacttttccatgctcttaatgtattcctttttagtaggaatccggaagtattagattgaatggaaaagcacttgccatctctgtctaggggtcacaaattgaaatggctcctgtatcacatacggaggtcttgtgtatctgtggcaacagggagtttccttattcactctttatttgctgctgttaagttgccaacctcccctcccaataaaaattcacttacacctcctgcctttgtaattctggtattcactttactatgtgatagaatgaacatgttgctgccggaatacaaacattgctttaggggaattatgatggatgtcaattgttactactgatgaccggggaaataaattaaagtacctttatcgaagtctaaaacgttagtacttttgcatgcatatttgtgaatgtgtgacatggtgtgccggttgactagggaatgttagttagagaggtggaccattactgcgtgttgccaatcactgactgtacctctacccctgctctgtgaaaatgttatgccctatgtaacagcagagaccatacaataatgcctcatttgtataatgtcttgccaagtggaagtactgtttatgtcaaaagtgtaagctgttcagatgaagatgaaaaacccagaaaacgaaggcgaacaaactc

SEQ ID NO: 183785 - DNA, 1691 bp, Homo Sapiens
actttgtacaaaaaagttgggcattctttcaagtcctggtgtactctgctgacagcactttaaaactttaacagcacaatgataacttgtactacatacttgatctgaattactacagaaaaataattatgttgcttgcttaatgattcccaggaaacttcgttgtaggcatatattttataagagtattatacagtgttaactatgcaagtaagttctaaaattacacaattatctgtgtaatgttttagtccaattactgtgatttattcaactctgttctaaagttatctggaattgtcatgctgcctcaatttacagaaatctataatagatttctatagaaatgtataaagacgtagcagtcattttgttgtttctaaatagataacatataaaaataaaggctttgttactttagtatttcagtagaaaaacaccagctcattctatagaactatacttccaaaacttagcaggggcattctggcctttcacttatcctttagttggaattgtctagggatgaaaagctggtggacatgacctgtataatcacagctttggtcatatttgcacattagagtccacaagctcttcatgtcatgatagcgtttatgcagccttttggagtgctgggagagtctcatcacccaaagataatgtttgctctttttttaatctttacctgatggaatagcaccaaggcccacacaaaaagtatgataacctctgtcacacatatcacagaacatcatttcttcttcatggtggggttgtccacatataatgcatgttttacattccatacactgccatgggtaggtcttaatcatagaaacaagctccattgtcatatccaggcaagaaggatggcctaaatcaaaaccagtattagtggtatctcacataagaaattttaacttaatatggcacataaaatactagtttgctttaggacttccagagaatggctataatgtcaaatcgccaaagagaaatgaatatacaatgtagaggaaaacacatgggctgtgtctatgcctcacaagctaccctgtgtatttaatttggtgactctttggttgaaatctgcctgaaactataaattctagtttttgaaccaataaatacggtggttaaaattttaaaaagacatttcaatacttaccactattctcacattgggagcagtgtataagtgattcagcctttcctttcttgttggactccttacccttcagacaaattccacatatagcatttggaatgacctttggctggaagggtagaagagggctataaattcatgccagaagagcttactatgggtttaaaaggaattctgttactttattgccctatttttacttttggtaacttgctaatgaggaccattttgaaagacaaaacttgacaggagtctgcctacaatgtaagactgcctactgaagaaagcattaatttcatcataaaatttggtaaacagcatgatctcgtaagattaaatgtagcattctatactccctacatgcacagtaagatttgtttaatgaatggaaggaaagactaaatacaatgtccaaatgtcactattaattggaacaagaaaatccaagtagcaaatgaccattatgtgtaagacttactctaaaaagaccattttaaatagctcatatattagttttgtt

SEQ ID NO: 183786 - DNA, 1761 bp, Homo Sapiens
aaacaaaaggagaaaagcaccagtgagatgtctttcccatttctactctcgccacggaacacgcacaccaacagagcccaggccactttttgccctcttccctggaaaaaggaggaaacagaagatttaagaaatttgaaaggatttttttcttgtgtgaatgtgtgtaaaagtcaatgctataaatctaaaacgaggtctgtttttttaaaaaagttctaaaacaacaggaggaaaacacatggaaagaaacccctcgcggagacctgcttccttacagatggaggctcttttggaggagagtgtgaagggcagagggctccctgcgccggcaggacctgcccggccaccctccactcccctgccatcacccctcctctctccttttaaaaagcaaaaccccactcttgggactcgggtcgtcctccgatccctgctggaaagtgcggcggctacttggcgtcgagcttggccatctcctgcacgtagatgccgatgctctcgctgtcgaagagcaggaagtacacgttcttcagcgaggacgcgctcgagtcatcaaagtgggctgagatggctttgagggtcacctgggccgcagtctgtttgggaaagcagtttctgccgctggggaaaggcgggaacgcgacggactttagcttcttgtcctccgccgctgacaggcagtttttgatggtctcttcaagctgttcttcacatttgtcggagccccactgagggatgtgacagtggatgacaaatttggctgcgagtccactggattggctgacggcggcttcggcgacttccaaagggccttgggatttgcgaagctcctttaccgtttccaagaactcttttcccccagccttttccaaggctttacctatatcttctttgaggtcaatttcggctgtggttgggtggacaatgccctccactctcatggagccaatatggctgatgtcactctgggttaaggacagcttctgtcccagaacaaggctcttagaagacagaatggtgaatccatcccctggcccatcttcagaggtggaatttgaagttccttctttatcgctgtcctttggtttggactttttggacgtccgtggtttggcagccttggatttcttcccccccttcttgcctgacgtggccttcctgcctcttttctctgggggtggggagaggatcgtttccgacttgcctttggtccctcgctttttggccagcagttcggggtgaattctgggcaggacgcctccactggcgatggtcactccttttagcagctggttgagctcctcgtcattggcaactgccagcaagatgtgtctcggggctatccgggccttcttgttgtccctcgcggcattgccggccaattctagaatttccgctgccaggtactcaatgactgccgccatgtagacaggggcgcccacgctgatccggtacttgaacgtccctttcttcagataacgcatcagcctccccactggaaagatgacacctgccctagctgaacgggacagcttggacattttcttcttcccactccggcccgacatcttgcttcagtttccctctcagcttgctgacacagtggcctcccggcactaacacaatgctggtgctgcgccgcctgctcccggcgcccggtgccctctgcgcgcccctccacgggcgcaggtttggcccacgcggcgccggtgccgggcaggactctttgcctttctttgggttctatctgtgcgccaa

SEQ ID NO: 183787 - DNA, 2456 bp, Homo Sapiens
  misc_feature (1492)..(1639): n is a, c, g, or t
ttggcctggacttcatcggggaggacgtgctgcacatctgcatgtttgcactggggtgcctcattgcattcttgggcgtcttcttaatcacgcgtaacaggaagaagcccattccatttgagccctatatttccatggatgccatgccaggtatgcagaacatgcacgataaagggatgactgtccagcctgaacttaaagcttctttttcctatggggctctggaaaacaatgacaacatttctgagatctacgctcctgccaccctgccagtcatgcaagaagagcacggctccagaagtgcctctggggtcccctaccgagtcctagagcacaccaagaaggaatgagactcgcctccctctatttataactgtcccctccaggctgacagtggttcaaccctgaatcctaaaacttgcctttcaagtctcattttgtttctaactgagaactctatggatgatgatctcaaaaagcctttgtctctgggaaaggatgcgttatcttggtcttggaaatttcaaatgatgagggttgggggatggaagcattattccaggtggacgggatagaatccagcctctgcctggattagcccagggggatttggaaagcctttctaccatccttgaggatggtaactgagcttcctctgacagtgaccaaaggatgctgtatccttcagagctaaggcaagacagagagtctgctgttaattctcaaatccagcgaaaggctggacatctctaaatctcgtcttcctccacctcatgtgcatgcctgatctcaccctgacactcctgatgccgcatctgtgatagcactcgtgttgccttcacatggcaggctgggccaaccctgggtggaaggttctgacatttgtgttttcagaaatgtacatctgccttccagtcatctgtgcccttctagggaagatgtgcttgatatgttcaaattggatctactctgaaaacgaaacttggttttggtcctgtgaggactacttgtttgtccacctcctccaccaaaggaattaggaagttaagagaaggggaagaatatggaggataggagagggtgatgatgctttagcccattaaggaagaaaagttccccttactcttacaaaaggtgattgcaccacttaaaaaaggataggtagaaaatctggccattttatgtgttatttttttcctgcataccagtgccccctggaaagatggggatgctcatttcagagacagcctcttcacctgtcctccgtctctccattacagagccacaagccaagcttgagttactggttaatttccttgaagtcaatagagactctctgggtcctcatccccatgcatatatgtctgggagaagcaagcattctccaaaacagggctgttgctttcttcctggccgcatatgtgactgtcttcccctagactgatggtatacttttgagaggggcggataaaggtttgcaaactttaatggnnnnnnnnnnnnnnnnnnnnnnnnnnnnnnnnnnnnnnnnnnnnnnnnnnnnnnnnnnnnnnnnnnnnnnnnnnnnnnnnnnnnnnnnnnnnnnnnnnnnnnnnnnnnnnnnnnnnnnnnnnnnnnnnnnnnnnnnnnnnnnnnnnnntttcacatctggaaagcctaagaatttacaaagatgttctgctaaaacccccagggccccatgcagtcttgctagaaaatttcctccctagggttcctttggaaggttaaatactccccataggatctgtggcatttctccatccaatgaatactacttagagctacactcaccacttccctagacagcctttaataggcatgataacagtgttaatagaccagtgtgatagatcacttatctttatggattgtgcttaatactgatttagtatcttgactccaaaaactgacatctgttgtctgtgataaccacttctgtattgcgtcttaaccacttctgtattgtgtggtcttaactgcctaaggcggcaatgggcagtgggcccctttcccttaggatgggtatcaattcaacaatatttataaggcatttactgtgtgctaagcatttggaagacccaggctacaaaataagacatagttcctgccctccaggccagcagagggaggcacaaatacccaggaatctctgatgggtgtgaagtgcggtcgtgggccacagaaaatgaccgtcatggagaccctgctaaaggtcggaccctgagcccaaaggggtattcagaagtggagatgattttggccccactcatagatgggtggcaaatctaagatttgtataaagcatataaaatagggtgatcacccccgaggcagaggggccagcatttgcaaaggcacagagctaagaggagctgggcaaagaaaggaaagccagggaaggtggtgggagatgagtctcaaagctaagtagtgga

SEQ ID NO: 183788 - DNA, 1510 bp, Homo Sapiens
ttggcgtttgcagtcggcgctttaggggaactgtcttcctccgcaggcgcgaggctgggtacagggtctattgtctgtggttgactccgtactttggtctgaggccttcgggagctttcccgaggcagttagcagaagccgcagcggccgcccccgcccgtctcctctgtccctgggcccgggagggaccaacttggcgtcacgcccctcagcggtcgccactctcttctctgttgttgggtccgcatcgtattcccggaatcagacggtgccccatagatggccagctttcccccgagggtcaacgagaaagagatcgtgagattacgtactataggtgaacttttagctcctgcagctccttttgacaagaaatgtggtcgtgaaaattggactgttgcttttgctccagatggttcatactttgcttggtcacaaggacatcgcacagtaaagcttgttccgtggtcccagtgccttcagaactttctcttgcatggcaccaagaatgttaccaattcaagcagtttaagattgccaagacaaaatagtgatggtggtcagaaaaataagcctcgtgaacatattatagactgtggagatatagtctggagtcttgcttttgggtcatcagttccagaaaaacagagtcgctgtgtaaatatagaatggcatcgcttcagatttggacaagatcagctacttcttgctacagggttgaacaatgggcgtatcaaaatatgggatgtatatacaggaaaactcctccttaacttggtagatcatactgaagtggtcagagatttaacttttgctccagatggaagcttgatcctggtgtcagcttcaagagacaaaactctcagagtatgggacctgaaagatgatggaaacatgatgaaagtattgagggggcatcagaattgggtgtacagctgtgcattctctcctgactcttctatgctgtgttcagtcggagccagtaaagcagttttcctttggaatatggataaatacaccatgatacggaaactagaaggacatcaccatgatgtggtagcttgtgacttttctcctgatggagcattactggctactgcatcttatgatactcgagtatatatctgggatccacataatggagacattctgatggaatttgggcacctgtttcccccacctactccaatatttgctggaggagcaaatgaccggtgggtacgatctgtatcttttagccatgatggactgcatgttgcaagccttgctgatgataaaatggtgaggttctggagaattgatgaggattatccagtgcaagttgcacctttgagcaatggtctttgctgtgccttctctactgatggcagtgttttagctgctgggacacatgacggaagtgtgtatttttgggccactccacggcacgtccctagcctgcaacatttatgtcgcatgtcaatccgaagagtgatgcccacccaagaagttcacgagctgccgattcctt

SEQ ID NO: 183789 - DNA, 2092 bp, Homo Sapiens
  misc_feature (221)..(239): n is a, c, g, or t
tttgtacaaaaaagttggctgagtaaattgatctttccagttttatggaattgggagtctgacaagtgaaaccaatttaatgtaaagtatttggctttcaaatggtttctctgtgctattttttggaattctttcagattccagagatatcttacgtctttgattcaatttaaaatttgtacttattttcttttagaaataatgtattgtgtctgtgcagnnnnnnnnnnnnnnnnnnnggattgctttactccaagaggagagattgtcttaggataaacctccaagctcacatttaatataacagactgaagtaaacattagaatcctgtttagagctattctgcacagttaactactgatctttagaatctaaaattgtatatgaacttattcttaaataattgaaccgttttatattcaaatgacttatgatcgtggttagtttgggaaaaataagatggttaaattttgatttattgaaatgtaattgtattattttcataaaatagcattttcattttgtaatgtggtttaacatccttgttgtttgccaaagaaatttcatttggctgtgaatattctatttgcttgcagtatctgtttctcttcctaggctcaagttggtgacccaagcctattgtaaacaagtgattatctcaaagggagatgccaatggagtaacaatttgttaaccttacgttttctgtctgtatatttttttaaaaatctggtagtttctggaaaaaaaagagaagggggtttgtagtacttaaccctatttatttccgtatattttagttaattagtttttggaataaatggatttcagtatagctttgtggttaaattgcattgcctttattttatgtttaggcttatttttaaattaacatttaacagaaacatttgaaatagaatttgcatgtctgccttaattaacttaaagactgattttaatctgactatgacactgagcatattctttaaattactcataatttataatgcttaatataatcttaattaaatttagcagttttagtataagatgtgccattttgtcctctgtatgtctgaatgaagctataacatttgcctttttattgcaggttttcctttggaatatggataaatacaccatgatacggaaactagaaggacatcaccatgatgtggtagcttgtgacttttctcctgatggagcattactggctactgcatcttatgatactcgagtatatatctgggatccacataatggagacattctgatggaatttgggcacctgtttcccccacctactccaatatttgctggaggagcaaatgaccggtgggtacgatctgtatcttttagccatgatggactgcatgttgcaagccttgctgatgataaaatggtgaggttctggagaattgatgaggattatccagtgcaagttgcacctttgagcaatggtctttgctgtgccttctctactgatggcagtgttttagctgctgggacacatgacggaagtgtgtatttttgggccactccacggcaggtccctagcctgcaacatttatgtcgcatgtcaatccgaagagtgatgcccacccaagaagttcaggagctgccgattccttccaagcttttggagtttctctcgtatcgtatttagaagattctgccttccctagtagtagggactgacagaatacacttaacacaaacctcaagctttactgacttcaattatctgtttttaaagacgtagaagatttatttaatttgatatgttcttgtactgcattttgatcagttgagcttttaaaatattatttatagacaatagaagtatttctgaacatatcaaatataaatttttttaaagatctaactgtgaaaacatacatacctgtacatatttagatataagctgctatatgttgaatggacccttttgcttttctgatttttagttctgacatgtatatattgcttcagtagagccacaatatgtatctttgctgtaaagtgcaaggaaattttaaattctgggacactgagttagatggtaaatactgacttacgaaagttgaattg

SEQ ID NO: 183790 - DNA, 2148 bp, Homo Sapiens
  misc_feature (1092)..(1149): n is a, c, g, or t
  misc_feature (1920)..(1947): n is a, c, g, or t
ttggcctgtgtccggggccaagcgcaagtatcaggaggactcggaccccgagcgcagcgactatgaggagcagcagctgcagaaggaggaggaggcgcgcaaggtgaagagcggcatccgccagatgcgcctcttcagccaggacgagtgcgccaagatcgaggcccgcattgacgaggtggtgtcccgcgctgagaagggcctgtacaacgagcacacggtggaccgggccccactgcgcaacaagtacttcttcggcgaaggctacacttacggcgcccagctgcagaagcgcgggcccggccaggagcgcctctacccgccgggcgacgtggacgagatccccgagtgggtgcaccagctggtgatccaaaagctggtggagcaccgcgtcatccccgagggcttcgtcaacagcgccgtcatcaacgactaccagcccggcggctgcatcgtgtctcacgtggaccccatccacatcttcgagcgccccatcgtgtccgtgtccttctttagcgactctgcgctgtgcttcggctgcaagttccagttcaagcctattcgggtgtcggaaccagtgctttccctgccggtgcgcaggggaagcgtgactgtgctcagtggatatgctgctgatgaaatcactcactgcatacggcctcaggacatcaaggagcgccgagcagtcatcatcctcaggaagacaagattagatgcaccccggttggaaacaaagtccctgagcagctccgtgttaccacccagctatgcttcagatcgcctgtcaggaaacaacagggaccctgctctgaaacccaagcggtcccaccgcaaggcagaccctgatgctgcccacaggccacggatcctggagatggacaaggaagagaaccggcgctcggtgctgctgcccacacaccggcggaggggtagcttcagctctgagaactactggcgcaagtcatacgagtcctcagaggactgctctgaggcagcaggcagccctgcccgaaaggtgaagatgcggcggcactgagtctacccgccgccctcctgggaactctggctcatccttacgtagttgcccctccnnnnnnnnnnnnnnnnnnnnnnnnnnnnnnnnnnnnnnnnnnnnnnnnnnnnnnnnnngattctatatatttttccttggttttgttgcctgttaaggctgaagaatagaattggccaggacctaggttctcatattcttggtattcctcctggatggaaaggctgttggcatcaataggggacagaggctgatgctggagtggagtagaggtggtggagcagagcagccatcttttaagtggggctgtatcaggctgggtttatttaaaagcaacaaaatgttttggttaagaaaattattttgctttcagtgtaaatcttcgcagtgttctaaacaaagttcagtcttctgctcgcccctttccctcactgatgtctgcacttggttgaggtctcctggagcctcacaggctctgctgttctccacttctcacctgccatccacgccctgcaagctcatgcaaacaccctttcttcctcctgcggcagagttgttcaggttgcctgggcaggggcttaaacagtgccagcccctgccatcccaaagctattgttaagccccccaggcgtcctccacccacgcccactagcctgccatgtccacagttccttgggctgctgaggggctagtgcagtggtcctgacctctcttatcaagagcacacttctttgctggttgctccttttgagcatatgcgtgtgattatttggaacagttagacttgccacgttgggtcagttttagaaattgtttctagctagagggactggtgtccttccaagtctagcatttggggtatggaaaattgttgtggtgtgtggtagggnnnnnnnnnnnnnnnnnnnnnnnnnnnnccccctttagtctcctggctttttcctttcccttcccttctccactggccagcttgggcctcatcctcatgtcatccttctaggaaggcgcctgccccatcttgtctgccggcagcatgcatccaaggccagagctcaggcctgcagactgggctggtgcctcctccgcttcagggtatgggagttggtgaaggggctttc

SEQ ID NO: 183791 - DNA, 1463 bp, Homo Sapiens
  misc_feature (1369)..(1381): n is a, c, g, or t
tacaaaaaagttggtccagggcggcggtgggtgtccgcttctctctgctcttcgactgcaccgcactcgcgcgtgaccctgactccccctagtcagctcagcggtgctgccatggcgtggcggcggcgcgaagccagcgtcggggctcgcggcgtgttggctctggcgttgctcgccctggccctgtgcgtgcccggggcccggggccgggctctcgagtggttctcggccgtggtaaacatcgagtacgtggacccgcagaccaacctgacggtgtggagcgtctcggagagtggccgcttcggcgacagctcgcccaaggagggcgcgcatggcctggtgggcgtcccgtgggcgcccggcggagacctcgagggctgcgcgcccgacacgcgcttcttcgtgcccgagcccggcggccgaggggccgcgccctgggtcgccctggtggctcgtgggggctgcaccttcaaggacaaggtgctggtggcggcgcggaggaacgcctcggccgtcgtcctctacaatgaggagcgctacgggaacatcaccttgcccatgtctcacgcgggaacaggaaatatagtggtcattatgattagctatccaaaaggaagagaaattttggagctggtgcaaaaaggaattccagtaacgatgaccataggggttggcacccggcatgtacaggagttcatcagcggtcagtctgtggtgtttgtggccattgccttcatcaccatgatgattatctcgttagcctggctaatattttactatatacagcgtttcctatatactggctctcagattggaagtcagagccatagaaaagaaactaagaaagttattggccagcttctacttcatactgtaaagcatggagaaaagggaattgatgttgatgctgaaaattgtgcagtgtgtattgaaaatttcaaagtaaaggatattattagaattctgccatgcaagcatatttttcatagaatatgcattgacccatggcttttggatcaccgaacatgtccaatgtgtaaacttgatgtcatcaaagccctaggatattggggagagcctggggatgtacaggagatgcctgctccagaatctcctcctggaagggatccagctgcaaatttgagtctagctttaccagatgatgacggaagtgatgagagcagtccaccatcagcctcccctgctgaatctgagccacagtgtgatcccagctttaaaggagatgcaggagaaaatacggcattgctagaagccggcaggagtgactctcggcatggaggacccatctcctagcacacgtgcccactgaagtggcaccaacagaagtttggcttgaactaaaggacannnnnnnnnnnnnactttagcacataatttgtatatttgaaaataatgtatattattttacctattagattctgatttgatatacaaaggactaa

SEQ ID NO: 183792 - DNA, 2175 bp, Homo Sapiens
  misc_feature (60)..(69): n is a, c, g, or t
tttgtacaaaaaagttggcattagactatccatcatgaccagcaaatactcattttaggnnnnnnnnnngcatgatctgaaaaatacttttggtggtatgttggttaccctcctagctttccatttggtttagaacataaagcaaatagacacagtcatactgtcactgctctggactgtgtggagctcgctaaagtcatggtcattgcaggaatccaagtggcagtccttctcattcattctaatcattgtatgtgcttcactacgggggggagaaggaaacgttagcatcatgtttcccatttagggcaggagtgagaggtctctcttcctgatttagatatgcaaaagctggtatgttcagtaggaactgtacatgtgttgggaggcataaagactaattagcaaccataatatggtcactaccctaatagactaaatgaaatcttgcaatttcaaattactctttctccatattagatttacccacagctatatttctgtttaagtactagggtgagggttttctgttactttgttttttaatgttgttccttttgaaagaatcagtcttgcagctgagtgaaaaatctgtggaatgtattatttgtcctctttacatgaaactactcatacttaagcaaaagtcagtcttatagcaagactgttagccctcaaacttgactctactgatctgaccatttccctctcatcgccagacaactgacgatttccctggttttagtctgcgtctctgctttaaagttattgtgatatccttctagatcatacacaagtctaacagttaattagttaacagtttttaaactaggtttgtgggtatttttttggtagcacatgtatgctattacatacaaatttttatttctaaaatataagatctgagattgaatattttcattaaaagctacagttttgtgaatctttgtgcttcaacattctttgcaagatgatacggtatttaggcatttgccttatttttgcatctcacaaacataagtgcaatagatcttttcattgaacagcaaagtaggattcatcattccatatgacttgagttacaccagacctgttctgcccaatgcctttttgattacagtgtagcttgcccaccgcatttgtcgttttagatactttgctagccggccactttggatttcatcagacagtcctaacaatattgtctgaacggctgaatatgaatagatacagcagaggcactcctgatatatgatttttatccatgcgtcagtttttcccacccagtgtagcatcctaaagataaagccagaagctaagctgcagtgaggctgtgattgggcgtagaagtgggagcattgggacctcacattacacacacgagagatcataaccatgtgaaaaggcaaaaagcatgtgtttgcaacatctgataacttcatggcctttgataaatgtatatatgtatatgtgcatggactgtgtttccagtacacctttcagccaaaacagatccacagtagttgttgagttcaagtacataaagtacataacaagcgaacgtctagtacaattcttacttatgtgtatgggatttttccctttgaggttgctttgttttgtcttacaaaggtgaaaattgtttgtaagtgaagtgagaagttcatatttctttggcttttttgtgtttttaaaagttactccttttagggagctggtctgatgacttgcttagcttggaaatccttgttttcagtgtgtcgagtcaaaatgtgtttatgtgagctgtcactgtggggaaccaattgctttgtcatatagctggttatgaactagtaacatgtttgggaagtcctactgatgttcctttggaagaaaaaatctgctggttttaacaactgtgcttttgctatgtatggtatccaagttagttgaaacgcagacactgagatctgtttgagtttagggtcatttttagaaaggggcagtttaaagcacaatgtctcacatgggacaaagttccaaaatgccaaattcttattttttaaaaagctagttctataaaatactggtattatgggtggggaggaaatagaattgagtcaattggaaagactatccaacttaacatgaaacttgtcaccatgagatagcattagctgcccaggatgctgc

SEQ ID NO: 183793 - DNA, 2553 bp, Homo Sapiens
acattacatctttttttcccctgcttcccctaggttacaattcaacaaacatggtgtgttgcgggtagaaggcttcttaacaccaaacaagtatgacaatgaagcaattggcttgtggttacctttaaccaaaaacgttgtggggattgatttggacacagcaaagtacatcttggccaacattggagaccacttctgtcaaatggtgatttctgaaaaggaagctatgtcaactattgagccacacagacaggttgcttggaagcgagctgtcaaaggtgttcgagaaatgtgtgatgtgtgcgacaccaccatcttcaacctgcactgggtgtgtcctcggtgtgggtttggagtatgtgtggactgctaccggatgaagagaaagaattgccaacagggtgctgcttacaagactttctcttggctaaaatgtgtgaagagtcagatacatgaaccagagaacttaatgcccacacagatcattcctggaaaagcactctatgatgttggagacattgttcattctgtaagagcgaaatggggaataaaggcaaactgcccttgttcaaacaggcaattcaaactcttttcaaagccagcctcaaaggaagacctaaaacagacttctttagctggagaaaaaccgactcttggtgcagtgctccagcagaatccctcagtgttggagccagcagctgtgggtggggaagcagcctccaagccagccggcagcatgaagcctgcctgtccagccagcacatctcctctaaactggctggccgacctaaccagcgggaatgtcaacaaggaaaacaaggaaaaacaaccaacaatgccaattttaaagaatgaaatcaaatgccttccacccctcccacctttaagcaaatccagcacagtcctccatacgtttaacagcacaattttgacacccgtaagcaacaacaattctggtttcctccggaatctcttgaattcttctacaggaaagacagaaaatggactcaagaatacaccaaaaatccttgatgacatctttgcctctttggtgcaaaataagacgacttctgatttatctaagaggcctcaaggactaaccatcaagcccagcattctgggctttgacactcctcactattggctttgtgataatcgcttgctgtgcttgcaagaccccaacaataagagcaactggaatgtgtttagggagtgctggaaacaagggcagccagtgatggtgtctggagtgcatcataaattgaactctgaactttggaaacctgaatccttcaggaaagagtttggtgagcaggaagtagacctagttaattgtaggaccaatgaaatcatcacaggagccacagtaggagacttctgggatggatttgaagatgttccaaatcgtttgaaaaatgaaaaagaaccaatggtgttgaaacttaaggactggccaccaggagaagattttagagatatgatgccttccaggtttgatgatctgatggccaacattccactgcccgagtacacaaggcgagatggcaaactgaatttggcctctaggctgccaaactactttgttcggccagatctgggccccaagatgtataatgcttatggattaatcactcctgaagatcggaaatatggaacaacaaatcttcacttagatgtatctgatgcagctaatgtcatggtctatgtgggaattcccaaaggacagtgtgagcaagaagaagaagtccttaagaccatccaagatggagattctgacgaactcacaataaagcgatttattgaaggaaaagagaagccaggagcactgtggcacatatatgctgcaaaggacacggagaagataagggaatttcttaaaaaggtatcagaagagcaaggtcaagaaaacccagcagaccacgatcctattcatgatcaaagctggtatttagaccgatcattaagaaaacgtcttcatcaagagtatggagttcaaggctgggctattgtacagtttcttggggatgtggtgtttatcccggcaggagctccacatcaggttcataacttatatagctgcatcaaagtggctgaagattttgtttctccagagcatgttaaacactgcttctggcttactcaggaattccgatatctgtcacagactcataccaatcacgaagataaattacaggtgaagaatgttatctaccatgcagtgaaagatgcagttgctatgctgaaagccagtgaatccagttttggcaaaccttaatctccctgcacattggaaatgaattacaggcagctgttcaaactcttcaggcaggattcctgtggactttgagattcatgttacctcatcttcttttttaaactgtacccaacttgtgagggtactctgtctaatgtatatttctagtgtttacagacagtaaatgtgtatatgtagtaactatttacagaacatgcatccttaaactgtgacttctcacctagtgcagaacttttaccaggctgtaaaagcaaaacctcgtatcagctctggaacaa

SEQ ID NO: 183794 - DNA, 898 bp, Homo Sapiens
gagcaatgctttttctctttatagccaactttgtacaaaaaagttggcttaaaaaggtatcagaagagcaaggtcaagaaaacccagcagaccacgatcctattcatgatcaaagctggtatttagaccgatcattaagaaaacgtcttcatcaagagtatggagttcaaggctgggctattgtacagtttcttggggatgtggtgtttatcccggcaggagctccacatcaggttcataacttatatagctgcatcaaagtggctgaagattttgtttctccagagcatgttaaacactgcttctggcttactcaggaattccgatatctgtcacagactcataccaatcacgaagataaattacaggtgaagaatgttatctaccatgcagtgaaagatgcagttgctatgctgaaagccagtgaatccagttttggcaaaccttaatctccctgcacattggaaatgaattacaggcagctgttcaaactcttcaggcaggattcctgtggactttgagattcatgttacctcatcttcttttttaaactgtacccaacttgtgagggtactctgtctaatgtatatttctagtgtttacagacagtaaatgtgtatatgtagtaactatttacagaacatgcatccttaaactgtgacttctcacctagtgcagaacttttaccaggctgtaaaagcaaaacctcgtatcagctctggaacaatacctgcagttattcttcagctgtttggacaacttagattgggtttataactattaggaatcactgcacagtttatttgggttgtgttttgtgtctgagtcccctccctcatcacttagggtccagaagagcaatgaagaagtgacagctaatgttggagttcttattgta

SEQ ID NO: 183795 - DNA, 898 bp, Homo Sapiens
tttgtacaaaaaagttggctttttctttaatctctttatgtcatgaacttttgggtttgttactgatatattacttggtgtttttcaggttcataacttatatagctgcatcaaagtggctgaagattttgtttctccagagcatgttaaacactgcttctggcttactcaggaattccgatatctgtcacagactcataccaatcacgaagataaattacaggtgaagaatgttatctaccatgcagtgaaagatgcagttgctatgctgaaagccagtgaatccagttttggcaaaccttaatctccctgcacattggaaatgaattacaggcagctgttcaaactcttcaggcaggattcctgtggactttgagattcatgttacctcatcttcttttttaaactgtacccaacttgtgagggtactctgtctaatgtatatttctagtgtttacagacagtaaatgtgtatatgtagtaactatttacagaacatgcatccttaaactgtgacttctcacctagtgcagaacttttaccaggctgtaaaagcaaaacctcgtatcagctctggaacaatacctgcagttattcttcagctgtttggacaacttagattgggtttataactattaggaatcactgcacagtttatttgggttgtgttttgtgtctgagtcccctccctcatcccttagggtccagaagagcaatggaggaagtgacagctaatgttgcagttcttattgtatggcataggactggcattatatagcaaaaatcaactactgtacaatttcttgggtttaaccatctttagttaaatggaattttaatttaatgacgctttgctaattttaagtgttaagcatttgcattaaaatattcatataat

SEQ ID NO: 183796 - DNA, 1480 bp, Homo Sapiens
ttgggttttatttttccatttcttttggtgggggggattgtatttttgctttctttagaaatgtaatgtttgttatatagaacttccagaacagtaatcaaattaatgaaattagacctaataattatgttttttgatggtgttgaccaataaaatatctagtgataaggaaatttgtagcatcaactagaataatctacattgatagcatttattgtgataagtacattgtttccacttcttgatatgactgagatttatttctctcttttagatgaaattgttgatactttaggtgaaggagcttttggaaaagttgtggagtgcatcgatcataaagcgggaggtagacatgtagcagtaaaaatagttaaaaatgtggatagatactgtgaagctgctcgctcagaaatacaagttctggaacatctgaatacaacagaccccaacagtactttccgctgtgtccagatgttggaatggtttgagcatcatggtcacatttgcattgtttttgaactattgggacttagtacttacgacttcattaaagaaaatggttttctaccatttcgactggatcatatcagaaagatggcatatcagatatgcaagtctgtgaattttttgcacagtaataagttgactcacacagacttaaagcctgaaaacatcttatttgtgcagtctgactacacagaggcgtataatcccaaaataaaacgtgatgaacgcaccttaataaatccagatattaaagttgtagactttggtagtgcaacatatgatgacgaacatcacagtacattggtatctacaagacattatagagcacctgaagttattttagccctagggtggtcccaaccatgtgatgtctggagcataggatgcattcttattgaatactatcttgggtttaccgtatttccaacacacgatagtaaggagcatttagcaatgatggaaaggattcttggacctctaccaaaacatatgatacagaaaaccaggaaacgtaaatattttcaccacgatcgattagactgggatgaacacagttctgccggcagatatgtttcaagacgctgtaaacctctgaaggaatttatgctttctcaagatgttgaacatgagcgtctctttgacctcattcagaaaatgttggagtatgatccagccaaaagaattactctcagagaagccttaaagcatcctttctttgaccttctgaagaaaagtatatagatctgtaattggacagctctctcgaagagatcttacagactgtatcagtctaatttttaaattttaagttattttgtacagctttgtaaattcttaacatttttatattgccatgtttattttgtttgggtaatttggttcattaagtacatagctaaggtaatgaaacatcttttttcagtaattgtaaagtgatttattcacaatacatttttttgtgcttatgaagttg

SEQ ID NO: 183797 - DNA, 1761 bp, Homo Sapiens
ttggcgcgcgcgggggtgcgcgcgggaacgaccgggaaacaccgcgagggccggggtgggccaggctgtggggacgacgggctgcgacgatggccgcagcggcgggcggcggcgggccggggacagcggtaggcgccacgggctcggggattgcggcggcagccgcaggcctagctgtttatcgacggaaggatgggggcccggccaccaagttttgggagagcccggagacggtgtcccagctggattcggtgcgggtctggctgggcaagcactacaagaagtatgttcatgcggatgctcctaccaataaaacactggctgggctggtggtgcagcttcttcagttccaggaagatgcctttgggaagcatgtcaccaacccggccttcaccaaactccctgcaaagtgtttcatggatttcaaagctggaggcgccttatgtcacattcttggggctgcttacaagtataaaaatgaacagggatggcggaggtttgacctacagaacccatctcgaatggatcgtaatgtggaaatgtttatgaacattgaaaaaacattggtgcagaacaattgtttgaccagacccaacatctacctcattccagacattgatctgaagttggctaacaaattgaaagatatcatcaaacgacatcagggaacatttacggatgagaagtcaaaagcttcccaccacatttacccatattcttcctcacaagacgatgaagaatggttgagaccggtgatgagaaaagagaagcaagtgttagtgcattggggcttttacccagacagctatgatacttgggtccatagtaatgatgttgatgctgaaattgaagatccaccaattccagaaaaaccatggaaggttcatgtgaaatggattttggacactgatattttcaatgaatggatgaatgaggaggattatgaggtggatgaaaataggaagcctgtgagttttcgtcagcggatttcaaccaagaatgaagagccagtcagaagtccagaaagaagagatagaaaagcatcagctaatgctcgaaagaggaaacattcgccttcgcctccccctccgacaccaacagaatcacggaagaagagtgggaagaaaggccaagctagcctttatgggaagcgcagaagtcagaaagaggaagatgagcaagaagatctaaccaaggatatggaagacccaacacctgtacccaatatagaagaagtagtacttcccaaaaatgtgaacctaaagaaagatagtgaaaatacacctgttaaaggaggaactgtagcggatctagatgagcaggatgaagaaacagtcacagcaggaggaaaggaagatgaagatcctgccaaaggtgatcagagtcgatcagttgaccttggggaagataatgtgacagagcagaccaatcacattattattcctagttatgcatcatggtttgattataactgtattcatgtgattgaacggcgtgctcttcctgagttcttcaatggaaaaaacaaatccaagactccagaaatatacttggcatatcgaaattttatgattgacacgtatcgtctaaacccccaagagtatttaactagcactgcttgtcggaggaacttgactggagatgtgtgtgctgtgatgagggtccatgcctttttagagcagtggggactcgttaattaccaagttgacccgggaaagtagacccatggcaatgggacctcctctactcctcattttaatg

SEQ ID NO: 183798 - DNA, 1058 bp, Homo Sapiens
ttgggtaacttctaaggcctcttcaacaagtacacctgaaccaacaagaaaaccttgggaaagaacaaatacaatgaatggcagcaagtcacctgttatctccagacgggattctccaaggaaaaatcagattgtttttgacaacaggtcctatgattcattacacagaccaaaatccacacccttatcacagcccagtgccaatggagtccagacggaaggacttgactatgacaggctgaagcaggacattttagatgaaatgagaaaagaattaacaaagctaaaagaagagctcattgatgcaatcaggcaggaactgagcaagtcaaatactgcatagaggaacagactaaggagagataggactttaatctggaggaaaaatatcctacaaacaacaactgttcacaacagcaaacccctacatttatgagctgtaagaagaaaatggagacaaacagaaggagggaaaaaccaacctactctgaaagccttcagacattatgactctggtgataagctctttccctctccgtttgctgcttttttctggcctttacaacagaatggaagagaatcatttaagagttcctgtaacagttatgcagaaaatactaaaacccatcaggcaagatcaccacgcattgaaatattttcatatcaagataaagtcgcacattttccacaatacattgctaaaataaagaggagaaaggcttaggaagtttttttgcagagagtgctggtaaagaattgagcaagtttgctattgtattgtaatgtttctctcaggtttgttcttcctatcatgtttgatattccatgaataattgagatcagccctatgtaagttaagatcataatatgtggaacaaatggaattgtaagtgctttcaaagggtaatatttataagaaagtgtccgaaaaatgtttcttcagcttgagaaattttagaatgataggaagtttctcgagttagccttcatgcaattttgtagattaaaacataaaatttgtccagaacttaaagatttagatgccttcctaaattgtt

SEQ ID NO: 183799 - DNA, 2918 bp, Homo Sapiens
  misc_feature (2000)..(2009): n is a, c, g, or t
  misc_feature (2461)..(2482): n is a, c, g, or t
ttgggtaagaatctctttagtggtaattttgttctgtatttctggtatttttctctaatattttaggagattttagatgaaatgagaaaagaattaacaaagctaaaagaagagctcattgatgcaatcaggcaggaactgagcaagtcaaatactgcatagaggaacagactaaggagagataggactttaatctggaggaaaaatatcctacaaacaacaactgttcacaacagcaaacccctacatttatgagctgtaagaagaaaatggagacaaacagaaggagggaaaaaccaacctactctgaaagccttcagacattatgactctggtgataagctctttccctctccgtttgctgcttttttctggcctttacaacagaatggaagagaatcatttaagagttcctgtaacagttatgcagaaaatactaaaacccatcaggcaagatcaccacgcattgaaatattttcatatcaagataaagtcgcacattttccacaatacattgctaaaataaagaggagaaaggcttaggaagtttttttgcagagagtgctggtaaagaattgagcaagtttgctattgtattgtaatgtttctctcaggtttgttcttcctatcatgtttgatattccatgaataattgagatcagccctatgtaagttaagatcataatatgtggaacaaatggaattgtaagtgctttcaaagggtaatatttataagaaagtgtccgaaaaatgtttcttcagcttgagaaattttagaatgataggaagtttctcgagttagccttcatgcaattttgtagattaaaacataaaatttgtccagaacttaaagatttagatgccttcctaaattgttacaatgctttaccaaatctatgacttctacataacacaaaccagtggtcaaatgtaaacactatattgtagatttactgtaggttttcaaccttttttagatttatgcatgtggacatttttataatgtaattacaatcaccacaaggttagcttttttaattgcagacagtaatgcatgtcacactaatatgtagtggccttttcaaggcctagtcccagggaaaacattttgtagagtataggggagtgggaggaaggggaggaataattttttatttaaagttgatttctgcactatctttttctcagttacctgcatgaataaataatgagaaatattttgtgactttaattggtaaatatgttacaaaaccaagtacttaatcttttacatcatgtcttcagctatttgtattttaaccagtaatttcaatggtctgaaacatgattctgagcttcacataatatcttaactgtggaactcaaaagtttgatcactgaatttggcagttattattacctaggtacccccgctgttacacaggtgtttagatacgtgttcctgaatgaagctgcttttgaattttgttatgttgaaatgcaagaaataacaatgatggcagcaattaaggtcacagaaatcattaggtaaaggaaaaccaatgaggagttctgcagttttcttttaataagtaaagtgagacttgggtggtgggaagaaggaaggtgggaagaaggaattagacactctgcctgccactctgcgtgtgtgtgctctcgcgcacgtgctgtctatatggaagccactcccttttctttcctttgaaactggtaaggttaaaataggggagaaatcctacatgttggaatgatagctttttggaaaatttaagaaactctccaggctctccatcttgatttatgcttgagttgttatgtgccatatttgctttgaactctgattatcagaagttttactaaaactttgaaataattcactttcatctgctttctagattttgtacatctcagtccataaagcaaagcttgttgatagtgtagttttctaaacgctgcaaatttgcagcctttaccactacaaagaagtttggatgagggannnnnnnnnnctttgtcaaaatagttcctgtttctgtagaaatttcatttttagattaaactgtgatgggatgagctatcataattcaagtatacatttcttttttctatcagatattcattgtcatgcagtagtagtaaaaacatcaaagatgcagcaagcttattaagtattattttctaaaagaaataggaggcattttcatctttattattgtacttttggttatgcaaacactttgataatataaacagttatgtcccctataaatctggtcagcaacctcttttgattttgttgggtaagttaaatagtctgtagtaggtagagtactgggtacaagtggtccaaactaagataagagactaaaataaaatgctaaatcttaaaagaaactgggtttatgcactaaacgttttgtgccttggtctaatattaacatgatgtatgtgtaaactgacnnnnnnnnnnnnnnnnnnnnnnccagtgttgaatcatgctatatttcccatcatcccaaattgctaaatgttctttccaagaagtctgaatgaattattatatacatttgctatcatacatgacagttgtgtcattattagagatttcagtaattaaaatgggaaacagaagcctaagttatttaccttatcaaaaccacgttccttggaaccacattattatgatggtttttgtgctcttgtacgttggatgtcttaagctgagtacagtttagggaatcctttctaatgacaggaaggcactgctttcctcaacactgtgatctgacctgtgacaagtctgtactatccactatgtaaatggctcacaagtcaattgcaaacaaactgaatgtacaaatcttagtgctggtgctgaaatctcttcagaatagtcatcatgattaaaaagtttgttt

SEQ ID NO: 183800 - DNA, 1279 bp, Homo Sapiens
ccaactttgtacaaaaaagttggctggattcttttttggcatccatgtcagaagacaatcgccctttaactggacttgcagctgcaattgccggagcaaaacttaggaaagtgtcacggatggaggatacctctttcccaagtggagggaatgctattggtgtgaactccgcctcatctaaaacagatacaggccgtggaaatggaccccttcctttagggggtagtggtttaatggaagaaatgagtgccctgctggccaggaggagaagaattgctgaaaagggatcaacaatagaaacagaacaaaaagaggacaaaggtgaagattcagagcctgtaacttctaaggcctcttcaacaagtacacctgaaccaacaagaaaaccttgggaaagaacaaatacaatgaatggcagcaagtcacctgttatctccagaccaaaatccacacccttatcacagcccagtgccaatggagtccagacggaaggacttgactatgacaggctgaagcaggacattttagatgaaatgagaaaagaattaacaaagctaaaagaagagctcattgatgcaatcaggcaggaactgagcaagtcaaatactgcatagaggaacagactaaggagagataggactttaatctggaggaaaaatatcctacaaacaacaactgttcacaacagcaaacccctacatttatgagctgtaagaagaaaatggagacaaacagaaggagggaaaaaccaacctactctgaaagccttcagacattatgactctggtgataagctctttccctctccgtttgctgcttttttctggcctttacaacagaatggaagagaatcatttaagagttcctgtaacagttatgcagaaaatactaaaacccatcaggcaagatcaccacgcattgaaatattttcatatcaagataaagtcgcacattttccacaatacattgctaaaataaagaggagaaaggcttaggaagtttttttgcagagagtgctggtaaagaattgagcaagtttgctattgtattgtaatgtttctctcaatttgttcttcctatcatgtttgatattccatgaataattgagatcagccctatgtaagttaagatcataatatgtggaacaaatggaattgtaagtgctttcaaagggtaatatttataagaagtgtccgaaaaatgtttcttcagcttgagaaattttagaatgataggaagtttctcgagttagccttcatgccaattttgtagattaaaa

SEQ ID NO: 183801 - DNA, 927 bp, Homo Sapiens
ttggctccctcctcccctctccctaatcaagtaccccctcctcctccaccacctcctgccccacccctccctgcatctggattctttttggcatccatgtcagaagacaatcgccctttaactggacttgcagctgcaattgccggagcaaaacttaggaaagtgtcacggatggaggatacctctttcccaagtggagggaatgctattggtgtgaactccgcctcatctaaaacagatacaggccgtggaaatggaccccttcctttagggggtagtggtttaatggaagaaatgagtgccctgctggccaggaggagaagaattgctgaaaagggatcaacaatagaaacagaacaaaaagaggacaaaggtgaagattcagagcctgtaacttctaaggcctcttcaacaagtacacctgaaccaacaagaaaaccttgggaaagaacaaatacaatgaatggcagcaagtcacctgttatctccagaccaaaatccacacccttatcacagcccagtgccaatggagtccagacggaaggacttgactatgacaggctgaagcaggacattttagatgaaatgagaaaagaattaacaaagctaaaagaagagctcattgatgcaatcaggcaggaactgagcaagtcaaatactgcatagaggaacagactaaggagagataggactttaatctggaggaaaaatatcctacaaacaacaactgttcacaacagcaaacccctacatttatgagctgtaagaagaaaatggagacaaacagaaggagggaaaaaccaacctactctgaaagccttcagacattatgactctggtgataagctctttccctctccgtttgctgcttttttctggcctttacaacagaatggaagagaatcatttaagagttcctgtaacagt

SEQ ID NO: 183802 - DNA, 2554 bp, Homo Sapiens
ctttgtacaaaaaagttggctatatccgcatcctggctgacctagaggactatcttaatgagctttgggaagataaggaagggaagaagaagatgaacaagaacaatgccaaggctctgagcaccttgcgtcagaagatccgaaaatacaaccgtgatttcgagtcccatatcacaagctacaagcagaaccccgagcagtctgcggatgaagatgctgagaaaaatgaggaggattcagaaggctcttcagatgaggatgaggatgaggacggagtcagtgctgcaactttcttgaagaagaaatcagaagctccttctggggagagtcgcaagttcctcaaaaagatggatgatgaagatgaggactcagaagattccgaagatgatgaagactgggacacaggttccacatcttccgattccgactcagaggaggaagaagggaaacaaaccgcgctggcctcaagatttcttaaaaaggcacccaccacagatgaggacaagaaggcagccgagaagaaacgggaggacaaagctaagaagaagcacgacaggaaatccaagcgcctggatgaggaggaggaggacaatgaaggcggggagtgggaaagggtccggggcggagtgccgttggttaaggagaagccaaaaatgtttgccaagggaactgagatcacccatgctgttgttatcaagaaactgaatgagatcctacaggcacgaggcaagaagggaactgatcgtgctgcccagattgagctgctgcaactgctggttcagattgcagcggaaaacaacctgggagagggcgtcattgtcaagatcaagttcaatatcatcgcctctctctatgactacaaccccaacctggcaacctacatgaagccagagatgtgggggaagtgcctggactgcatcaatgagctgatggatatcctgtttgcaaatcccaacatttttgttggagagaatattctggaagagagtgagaacctgcacaacgctgaccagccactgcgtgtccgtggctgcatcctaactctggtggaacgaatggatgaagaatttaccaaaataatgcaaaatactgaccctcactcccaagagtacgtggagcacttgaaggatgaggcccaggtgtgtgccatcatcgagcgtgtgcagcgctacctggaggagaagggcactaccgaggaggtctgccgcatctacctgctgcgcatcctgcacacctactacaagtttgattacaaggcccatcagcgacagctgaccccgcctgagggctcctcaaagtctgagcaagaccaggcagaaaatgagggcgaggactcggctgtgttgatggagagactgtgcaagtacatctacgccaaggaccgcacagaccggatccgcacatgtgccatcctctgccacatctaccaccatgctctgcactcgcgctggtaccaggcccgcgacctcatgctcatgagccacttgcaggacaacattcagcatgcagacccgccagtgcagatcctttacaaccgcaccatggtgcagctgggcatctgtgccttccgccaaggcctgaccaaggacgcacacaacgccctgctggacatccagtcgagtggccgagccaaggagcttctgggccagggcctgctgctgcgcagcctgcaggagcgcaaccaggagcaggagaaggtggagcggcgccgtcaggtccccttccacctgcacatcaacctggagctgctggagtgtgtctacctggtgtctgccatgctcctggagatcccctacatggccgcccatgagagcgatgcccgccgacgcatgatcagcaagcagttccaccaccagctgcgcgtgggcgagcgacagcccctgctgggtccccctgagtccatgcgggaacatgtggtcgctgcctccaaggccatgaagatgggtgactggaagacctgtcacagttttatcatcaatgagaagatgaatgggaaagtgtgggaccttttccccgaggctgacaaagtccgcaccatgctggttaggaagatccaggaagagtcactgaggacctacctcttcacctacagcagtgtctatgactccatcagcatggagacgctgtcagacatgtttgagctggatctgcccactgtgcactccatcatcagcaaaatgatcattaatgaggagctgatggcctccctggaccagccaacacagacagtggtgatgcaccgcactgagcccactgcccagcagaacctggctctgcagctggccgagaagctgggcagcctggtggagaacaacgaacgggtgtttgaccacaagcagggcacctacgggggctacttccgagaccagaaggacggctaccgcaaaaacgagggctacatgcgccgcggtggctaccgccagcagcagtctcagacggcctactgagctctccactctgtttcccgcctgggccatccaaccttgaagtcctaaaccacacctcattcactaaaggtctgtttaaagttgaaaaaacagcatggtacagtaaa

SEQ ID NO: 183803 - DNA, 810 bp, Homo Sapiens
  misc_feature (47)..(70): n is a, c, g, or t
  misc_feature (240)..(284): n is a, c, g, or t
atttctccattttcctcttgtctacagtgcggctacaaatctgggannnnnnnnnnnnnnnnnnnnnnnnctaactacacttgggctcctttttttgtgctcgacttttccaccctttttccctccctcctgtgctgctgctttttgatctcttcgactaaaatttttttatccggagtgtatttaatcggttctgttctgtcctctccaccacccccacccccctccctccggtgtgtnnnnnnnnnnnnnnnnnnnnnnnnnnnnnnnnnnnnnnnnnnnnnccgtcgttacaccaacccgaggctctttgtttcccctcttggatctgttgagtttctttgttgaagaagcctttttgggtgcccagttctccaagaccgcagcgaagggagaagccgccgcggagaggcctggggaggcggctgtggcctcgtcgccttccaaagcgaacggacaggagaatggccacgtgaaggtaaacggcgacgcttcgcccgcggccgccgagtcgggcgccaaggaggagctgcaggccaacggcagcgccccggccgccgacaaggaggagcccgcggccgccgggagcggggcggcgtcgccctccgcggccgagaaaggtgagccggccgccgccgctgcccccgaggccggggccagcccggtagagaaggaggcccctgcggaaggcgaggctgccgagcccggctcgcccacggccgcggagggagaggccgcgtcggccgcctcctcgacttcttcgcccaaggtcgaggacggggccacgccctcgcccagcaacgagacccg

SEQ ID NO: 183804 - DNA, 2084 bp, Homo Sapiens
  misc_feature (1681)..(1690): n is a, c, g, or t
actttgtacaaaaaagttggtggcggatctggaggagcagttgtctgatgaagagaaggtgcgtatagcagcaaaattcatcattcatgcccctcctggagaatttaatgaggttttcaatgatgttcggttactgcttaataatgacaatcttctcagggaaggagcagcccatgcatttgcacagtataacttggaccagtttactccagtaaaaattgaaggttatgaagatcaggtattgataacagaacatggcgacttgggaaatggaaagtttttggatccaaagaacagaatctgttttaaatttgatcacttaaggaaggaggcaactgatccaagaccctgtgaagtagaaaatgcagttgaatcatggagaacttcagtagaaactgctctgagagcttacgtaaaagaacattacccgaatggagtctgcactgtgtatggcaaaaaaatagatggacagcaaaccattattgcatgcatagaaagccatcagttccaagcaaaaaatttttggaatggtcgttggaggtcagaatggaagtttacaatcactccttcaaccactcaagtggttggcatcttgaaaattcaggttcattattatgaagatggtaatgttcagctagtgagtcataaagatatacaagattccctaacagtgtctaatgaagtgcaaacagcaaaagaatttataaagattgtagaagctgcagaaaatgaataccagactgccatcagtgagaattatcagacaatgtcggacactactttcaaagccttacgtcgacagttgccagttacacgcactaagattgattggaacaagatccttagctacaagattggcaaagagatgcagaatgcataagatgaacattgcatgaccggatcattttagtgtctttgcgttaaaaaatcattgcaaaagtattctgaactgtcaagctgcccagtcagatgggctgttgccatttaaaatcactgtaattaattagtttgattagagcacaaagcttagctaatcaaccattatttttcattttgtttgttctaagaggattgaaaatcagtttagtttaaatgtctttctgttaggcctttctttcttacaatgaagagatgattcttctagtttatggttaaaagtttttgaagtgtctcaaaaatattttactaactgtaaccctaaaattgatgtcttttggtttatgaaatcagtaatttttgatatttccccagttctttttaatggggtcaataatggacattctagtttaaggtggttgatggatttagccatatatgctgctaaagaaattgtctaccttttcttcctcacctgttccatttatgtaaagttgagattagagggaaagcattttctatatcaattgtgtttaaacctttcaagaaggttatttagctagcttagtgttgaactaaattttttttaaacaaggcaaggtctaatgctgttttgagattctgaaattaatgaaaatacttatttcagaaatgcatttaatgctttttttcttgtgacagttacgcaaatcagcttgaattccatatgtccctgagttatttttatcataaagccacaaatgtattataacaaggcaaattgtaatatatataatcctgaactcatgaccatgtctcagtttannnnnnnnnncttggattgaaaagtactgaaattcaatgtgacattaaaatgcaaattttcctatttatttgagtagaaaatcacttaccagtgagcatatatattttaaaatactttctttggatattgtaattcttaactggttgtaaattagaaaagctgggattacatatggtgtgcggttacagtctaaattttttcatcctcctatgcatcataagcatgtttgtaatattttcaaaaatagttctactgatgctacaggaatttcaagcctgtggtgaatgttagtatttaccatagggagtgaagtggagttatggtttcattcaatagagtattgctgattatacttgagtggaatcctttcctcacgtactcccacagacgtctgggcctggaa

SEQ ID NO: 183805 - DNA, 1620 bp, Homo Sapiens
ttggtgacattacacccaagatggtgctgtcccagagacaacgagatgaactaaatcgagctatagcagattatcttcgttcaaatggctatgaagaggcatattcagtttttaaaaaggaagctgaattagatgtgaatgaagaattagataaaaagtatgctggtcttttggaaaaaaaatggacatctgttattagattacaaaagaaggttatggaattagaatcaaagctaaatgaagcaaaagaagaatttacgtcaggtggacctcttggtcagaaacgagacccaaaagaatggattccccgtccgccagaaaaatatgcattgagtggtcacaggagtccagtcactcgagtcattttccatcctgtgttcagtgttatggtctctgcttcagaggatgctacaattaaggtgtgggattatgagactggagattttgaacgaactcttaaaggacatacagactctgtacaggacatttcattcgaccacagcggcaagcttctggcttcctgttctgcagatatgaccattaaactatgggattttcagggctttgaatgcatcagaaccatgcacggccatgaccacaatgtttcttcagtagccatcatgcccaatggagatcatatagtgtctgcctcaagggataaaactataaaaatgtgggaagtgcaaactggctactgtgtgaagacattcacaggacacagagaatgggtacgtatggtacggccaaatcaagatggcactctgatagccagctgttccaatgaccagactgtgcgtgtatgggtcgtagcaacaaaggaatgcaaggctgagctccgagagcatgagcatgtggtagaatgcatttcctgggctccagaaagctcatattcctccatctctgaagcaacaggatctgagactaaaaaaagtggtaaacctgggccattcttgctgtctggatccagagacaagactattaagatgtgggatgtcagtactggcatgtgccttatgaccctcgtgggtcatgataactgggtacgtggagttctgttccattctggggggaagtttattttgagttgtgctgatgacaagaccctacgcgtatgggattacaagaacaagcgatgcatgaagaccctcaatgcgcatgaacactttgttacctccttgggtatgtacgcctcgcgaggtctctgaacattagattttggagtgccagacaaactgtgttttacataatcgtgtggactttgccaggtaagaaatgactgtgctttcagggcagaatagagaagacatgaaaatcttgtggattcctaccatttgttttaaattctcctttcccgttaactctttccatcgttagccttataataaaaacattactttctccactgcacaacattggttttggaaaccacaatttgtgaagaggttacttaccactctgatgggtaatttttctcccctattagtttgtttctcaaacaaaatcttcctcaacctttcccactggcaggtgtatactatcatatactagaaactcagaaaattgtatttgatttgagtaaacatcctcactatcatctggacttgaatctggaatttaaga

SEQ ID NO: 183806 - DNA, 1038 bp, Homo Sapiens
acccagataggtccatgtctggcacggagcgggctgtctcagagccactgggcctggatgatgctgggaacaggaagtcatcaaagggctcggtcttcagctccatgctgctgatgctcttgacaggttccactgagggcttgggctcagggtcattgaggagaggcagggtgaaggcctcctcagactccggggtggcaacctctggcaggcccccagtcagatcaagggaagccacagacatctcttctgggaagcccaggtcatcagggatcttgcaggcaggtcggtgagctgccaggatgaactctagtttttccttctccttcagcaggttggcaatctcggtctgcaaagcagacttctcatcttctagttggtctgtctccgcttggagtgtatcagtcagctccctcctccggttgcggcatttggctgcagccatcttattcctttcccttcggattctccttttctcttcttcttctggagataactgttccaccttgcccctcctgccaatgctctgcgctcggcctcctgtcatggtcttcacaacgccagccctggagtaagccccagcggagggggcggggactccgaaagggtgaggggctctggtctgcgatggggccacggaggagacgagggcgggctgcaccagccactgcaggtccggactggtcgagatggcagtgaccgtgggaatgaagttggcactggagacggccaggtccgtgcagaagtcctgcgcgttgacaggcgagcccatgctggagaaggagtctgcgggtgagtggtagtaagagaggctatccccggccggggacgcgctgctgcagcgggaggatgacgcctcgtagtctgcgttgaagcccgagaacatcatcgtggcggttaggcaaagccgggcgaggggccgaggggcggagacaggtgggcgctgtggagcagagctgggtaggagcacggtcactgctcgttcgctgcgccgcggccgccggctcagtcttggcttctcagatgctcgctgcccaa

SEQ ID NO: 183807 - DNA, 952 bp, Homo Sapiens
ctttgtacaaaaaagttggttctgttttgtctctaaagacttctgcacggacctggccgtctccagtgccaacttcattcccacggtcactgccatctcgaccagtccggacctgcagtggctggtgcagcccgccctcgtctcctccgtggccccatcgcagaccagagcccctcaccctttcggagtccccgccccctccgctggggcttactccagggctggcgttgtgaagaccatgacaggaggccgagcgcagagcattggcaggaggggcaaggtggaacagttatctccagaagaagaagagaaaaggagaatccgaagggaaaggaataagatggctgcagccaaatgccgcaaccggaggagggagctgactgatacactccaagcggagacagaccaactagaagatgagaagtctgctttgcagaccgagattgccaacctgctgaaggagaaggaaaaactagagttcatcctggcagctcaccgacctgcctgcaagatccctgatgacctgggcttcccagaagagatgtctgtggcttcccttgatctgactgggggcctgccagaggttgccaccccggagtctgaggaggccttcaccctgcctctcctcaatgaccctgagcccaagccctcagtggaacctgtcaagagcatcagcagcatggagctgaagaccgagccctttgatgacttcctgttcccagcatcatccaggcccagtggctctgagacagcccgctccgtgccagacatggacctatctgggtccttctatgcagcagactgggagcctctgcacagtggctccctggggatggggcccatggccacagagctggagcccctgtgcactccggtggtcacctgtactcccagctgcactgcttacacgtcttccttcgtcttcacctaccccgaggctgactccttcccc

SEQ ID NO: 183808 - DNA, 933 bp, Homo Sapiens
actttgtacaaaaaagttgggtcttttttgtgattattctagttatctccagaagaagaagagaaaaggagaatccgaagggaaaggaataagatggctgcagccaaatgccgcaaccggaggagggagctgactgatacactccaagcggagacagaccaactagaagatgagaagtctgctttgcagaccgagattgccaacctgctgaaggagaaggaaaaactagagttcatcctggcagctcaccgacctgcctgcaagatccctgatgacctgggcttcccagaagagatgtctgtggcttcccttgatctgactgggggcctgccagaggttgccaccccggagtctgaggaggccttcaccctgcctctcctcaatgaccctgagcccaagccctcagtggaacctgtcaagagcatcagcagcatggagctgaagaccgagccctttgatgacttcctgttcccagcatcatccaggcccagtggctctgagacagcccgctccgtgccagacatggacctatctgggtccttctatgcagcagactgggagcctctgcacagtggctccctggggatggggcccatggccacagagctggagcccctgtgcactccggtggtcacctgtactcccagctgcactgcttacacgtcttccttcgtcttcacctaccccgaggctgactccttccccagctgtgcagctgcccaccgcaagggcagcagcagcaatgagccttcctctgactcgctcagctcacccacgctgctggccctgtgagggggcagggaaggggaggcagccggcacccacaagtgccactgcccgagctggtgcattacagagaggagaaacacatcttccctagagggttcctgtagacctagggaggacttatctgtgcgtgaaacacaccaggct

SEQ ID NO: 183809 - DNA, 2737 bp, Homo Sapiens
  misc_feature (2024)..(2083): n is a, c, g, or t
ttggcgctggggcttactccagggctggcgttgtgaagaccatgacaggaggccgagcgcagagcattggcaggaggggcaaggtggaacaggtgaggaactctagcgtactcttcctgggaatgtgggggctgggtgggaagcagccccggagatgcaggagcccagtacagaggatgaagccactgatggggctggctgcacatccgtaactgggagccctggctccaagcccattccatcccaactcagactctgagtctcaccctaagaagtactctcatagtttcttccctaagtttcttaccgcatgctttcagactgggctcttctttgttctcttgctgaggatcttattttaaatgcaagtcacacctattctgcaactgcaggtcagaaatggtttcacagtggggtgccaggaagcagggaagctgcaggagccagttctactggggtgggtgaatggaggtgatggcagacacttttactgaatgtcggtctttttttgtgattattctagttatctccagaagaagaagagaaaaggagaatccgaagggaaaggaataagatggctgcagccaaatgccgcaaccggaggagggagctgactgatacactccaagcggtaggtactctgtgggttgctcctttttaaaacttaagggaaagttggagattgagcataagggcccttgagtaagactgtgtcttatgctttcctttatccctctgtatacaggagacagaccaactagaagatgagaagtctgctttgcagaccgagattgccaacctgctgaaggagaaggaaaaactagagttcatcctggcagctcaccgacctgcctgcaagatccctgatgacctgggcttcccagaagagatgtctgtggcttcccttgatctgactgggggcctgccagaggttgccaccccggagtctgaggaggccttcaccctgcctctcctcaatgaccctgagcccaagccctcagtggaacctgtcaagagcatcagcagcatggagctgaagaccgagccctttgatgacttcctgttcccagcatcatccaggcccagtggctctgagacagcccgctccgtgccagacatggacctatctgggtccttctatgcagcagactgggagcctctgcacagtggctccctggggatggggcccatggccacagagctggagcccctgtgcactccggtggtcacctgtactcccagctgcactgcttacacgtcttccttcgtcttcacctaccccgaggctgactccttccccagctgtgcagctgcccaccgcaagggcagcagcagcaatgagccttcctctgactcgctcagctcacccacgctgctggccctgtgagggggcagggaaggggaggcagccggcacccacaagtgccactgcccgagctggtgcattacagagaggagaaacacatcttccctagagggttcctgtagacctagggaggaccttatctgtgcgtgaaacacaccaggctgtgggcctcaaggacttgaaagcatccatgtgtggactcaagtccttacctcttccggagatgtagcaaaacgcatggagtgtgtattgttcccagtgacacttcagagagctggtagttagtagcatgttgagccaggcctgggtctgtgtctcttttctctttctccttagtcttctcatagcattaactaatctattgggttcattattggaattaacctggtgctggatattttcaaattgtatctagtgcagctgattttaacaataactactgtgttcctggcaatagtgtgttctgattagaaatgaccaatattatactaagaaaagatacgactttattttctggtagatagaaataaatagctatatccatgtactgtagtttttcttcaacatcaatgttcattgtaatgttactgatcatgcattgttgaggtggtctgaatgttctgacattaacagttttccatgaaaacgttttattgtnnnnnnnnnnnnnnnnnnnnnnnnnnnnnnnnnnnnnnnnnnnnnnnnnnnnnnnnnnnnctaccttgaggtcttttgacatgtggaaagtgaatttgaatgaaaaatttaagcattgtttgcttattgttccaagacattgtcaataaaagcatttaagttgaatgcgaccaaccttgtgctcttttcattctggaagtcttgtaagtttctgaaaggtattattggagaccagtttgtcaagaagggtagctgctggagggggacacaccctctgtctgatcccttatcaaagaggacaaggaaactatagagctgattttagaatattttacaaatacatgccttccattggaatgctaagattttctactgcttctggggacgggaaaccgctgtgtaacagcttttgtgggaatacattttttctgtttcagtactcgcagggggaaatatttaaattttgttgtgctaatattaaattcagatgttttgatcttaaaggaaccctttaagcaaacagaacctagctttgtacagactattttaactttttattctcacaaaatcacgtggagggttattctacttcaaagatgagcaaattgaagaatggttagaataaacaactttcttgatattccgttatcggcattagaatcttcctgctcgttatcgtatccagcaggctgaactgcctcttgatacttggtt

SEQ ID NO: 183810 - DNA, 922 bp, Homo Sapiens
tgaggcccacagcctggtgtgtttcacgcacagataaggtcctccctaggttacaggaaccctttagggaagatgtgtttctcctctctgtaatgcaccagctcgggcagtggcacttgtgggtgccggctgcctcccttccctgccccctcacagggccagcagcgtgggtgagctgagcgagtcagaggaaggctcattgctgctgctgcccttgcggtgggcagctgcacagctggggaaggagtcagcctcggggtaggtgaagacgaaggaagacgtgtaagcagtgcagctgggagtacaggtgaccaccggagtgcacaggggctccagctctgtggccatgggccccatccccagggagccactgtgcagaggctcccagtctgctgcatagaaggacccagataggtccatgtctggcacggagcgggctgtctcagagccactgggcctggatgatgctgggaacaggaagtcatcaaagggctcggtcttcagctccatgctgctgatgctcttgacaggttccactgagggcttgggctcagggtcattgaggagaggcagggtgaaggcctcctcagactccggggtggcaacctctggcaggcccccagtcagatcaagggaagccacagacatctcttctgggaagcccaggtcatcagggatcttgcaggcaggtcggtgagctgccaggatgaactctagtttttccttctccttcagcaggttggcaatctcggtctgcaaagcagacttctcatcttctagttggtctgtctccgcttggagtgtatcagtcagctccctcctccggttgcggcatttggctgcagccatcttattcctttcccttcggattctccttttctcttcttcttctggagataactagccaacttttttgtacaaa

SEQ ID NO: 183811 - DNA, 2713 bp, Homo Sapiens
gcgggatggccgagcgccgcacgcgtagcacgccgggactagctatccagcctcccagcagcctctgcgacgggcgcggtgcgtaagtacctcgccggtggtggccgttctccgtaagatggcggaccggcggcggcagcgcgcttcgcaagacaccgaggacgaggaatctggtgcttcgggctccgacagcggcggctccccgttgcggggaggcgggagctgcagcggtagcgccggaggcggcggcagcggctctctgccttcacagcgcggaggccgaaccggggcccttcatctgcggcgggtggagagcgggggcgccaagagtgctgaggagtcggagtgtgagagtgaagatggcattgaaggtgatgctgttctctcggattatgaaagtgcagaagactcggaaggtgaagaaggtgaatacagtgaagaggaaaactccaaagtggagctgaaatcagaagctaatgatgctgttaattcttcaacaaaagaagagaagggagaagaaaagcctgacaccaaaagcactgtgactggagagaggcaaagtggggacggacaggagagcacagagcctgtggagaacaaagtgggtaaaaagggccctaagcatttggatgatgatgaagatcggaagaatccagcatacatacctcggaaagggctcttctttgagcatgatcttcgagggcaaactcaggaggaggaagtcagacccaaggggcgtcagcgaaagctatggaaggatgagggtcgctgggagcatgacaagttccgggaagatgagcaggccccaaagtcccgacaggagctcattgctctttatggttatgacattcgctcagctcataatcctgatgacatcaaacctcgaagaatccggaaaccccgatatgggagtcctccacaaagagatccaaactggaacggtgagcggctaaacaagtctcatcgccaccagggtcttgggggcaccctaccaccaaggacatttattaacaggaatgctgcaggtaccggccgtatgtctgcacccaggaattattctcgatctgggggcttcaaggaaggtcgtgctggttttaggcctgtggaagctggtgggcagcatggtggccggtctggtgagactgttaagcatgagattagttaccggtcacggcgcctagagcagacttctgtgagggatccatctccagaagcagatgctccagtgcttggcagtcctgagaaggaagaggcagcctcagagccaccagctgctgctcctgatgctgcaccaccaccccctgataggcccattgagaagaaatcctattcccgggcaagaagaactcgaaccaaagttggagatgcagtcaagcttgcagaggaggtgccccctcctcctgaaggactgattccagcacctccagtcccagaaaccaccccaactccacctactaagactgggacctgggaagctccggtggattctagtacaagtggacttgagcaagatgtggcacaactaaatatagcagaacagaattggagtccggggcagccttctttcctgcaaccacgggaacttcgaggtatgcccaaccatatacacatgggagcaggacctccacctcagtttaaccggatggaagaaatgggtgtccagggtggtcgagccaaacgctattcatcccagcggcaaagacctgtgccagagccccccgcccctccagtgcatatcagtatcatggagggacattactatgatccactgcagttccagggaccaatctatacccatggtgacagccctgccccgctgcctccacagggcatgcttgtgcagccaggaatgaaccttccccacccaggtttacatccccaccagacaccagctcctctgcccaatccaggcctctatcccccaccagtgtccatgtctccaggacagccaccacctcagcagttgcttgctcctacttacttttctgctccaggcgtcatgaactttggtaatcccagttacccttatgctccaggggcactgcctcccccaccaccgcctcatctgtatcctaatacacaggccccatcacaggtatatggaggagtgacctactataaccccgcccagcagcaggtgcagccaaagccctccccaccccggaggactccccagccagtcaccatcaagccccctccacctgaggttgtaagcaggggttccagttaatacaagtttctgaatattttaaatcttaacatcatataaaaagcagcagaggtgagaactcagaagagaaatacagctggctatctactaccagaagggcttcaaagatatagggtgtggctcctaccagcaaacagctgaaagaggaggacccctgccttcctctgaggacaggctctagagagagggagaaacaagtggacctcgtcccatcttcactcttcacttgagttggctgtgttcttcacttctgggaaattgaagtgtcttctgttcccaaggaagctccttcctgtttgttttgttttctaagatgttcatttttaaagcctggcttcttatccttaatattattttaattttttctctttgtttctgtttcttgctctctctccctgcctttaaatgaaacaagtctagtcttctgggttttctagcccctctggattcccttttgactcttccgtgcatcccagataatgg

SEQ ID NO: 183812 - DNA, 1382 bp, Homo Sapiens
ttctttaatggtgtttctttcctgtgttgtggtacatcataggtggcaatacctggtttttactctattgcataaagaagctgtattctactccttatcacccctacctctgtcctgcttaacttccaccacgttgacatattttagtatctgtagtgtcgctactgaactcagccttttccatttgtcagctgatggtaggaattagagaaagctgggcagtactttgaagaaataaaaaccagagcataataatgaagaattaaggcaaaaatgaatagtcactttattttgaagggtgggcagattagatatttttaaaattataaattccccaattctcttatggctgaataatatttcctgttcatcataggttggatgaattcattcctaactttttcttctcctggcttgtggggtcccaggccccatcacaggtatatggaggagtgacctactataaccccgcccagcagcaggtgcagccaaagccctccccaccccggaggactccccagccagtcaccatcaagccccctccacctgaggttgtaagcaggggttccagttaatacaagtttctgaatattttaaatcttaacatcatataaaaagccagaggtgagaactcagaagagaaatacagctggctatctactaccagaagggcttcaaagatatagggtgtggctcctaccagcaaacagctgaaagaggaggacccctgccttcctctgaggacaggctctagagagagggagaaacaagtggacctcgtcccatcttcactcttcacttgagttggctgtgttcgggggagcagagagagccagacagccccaagcttctgagtctagatacagaagcccatgtcttctgctgttcttcacttctgggaaattgaagtgtcttctgttcccaaggaagctccttcctgtttgttttgttttctaagatgttcatttttaaagcctggcttcttatccttaatattattttaattttttctctttgtttctgtttcttgctctctctccctgcctttaaatgaaacaagtctagtcttctggttttctagcccctctggattcccttttgactcttccgtgcatcccagataatggagaatgtatcagccagccttccccaccaagtctaaaaagacctggcctttcacttttagttggcatttgttatcctcttgtatacttgtattcccttaactctaaccctgtggaagcatggctgtctgcacagagggtcccattgtgcagaaaagctcagagtagtgggtaggagcccttctctttgacttaagtttttaggagtctgagcatccatcaatacctgtactatgatggggcttctgtttctctgct

SEQ ID NO: 183813 - DNA, 2660 bp, Homo Sapiens
ttggattacattcctccttgtttgcagtggaacattttttccatatagctccaatcctgctaatccgaagccaaagagagtgtttcttcagcatatgactagaacattccatgacttggaaggaaatgcagttaaacgggactctggaatatggatcaatgggtttgattatactggaatttctcacataacccctcacattcctgagatcaatgatagtatccgagctcactgtgaggagaatgcacctctttgtggttttccttggtatcttccagtgcactttctgatcaggaaaaactggtatcttcctgccccagaagtttctccaagaaatcctcctcatttccgactcatatccaaagaacagacaccttgggattctataaaattgacttttgaagcaacaggaccaagccatatgtccttctatgttcgagcccacaaagggtcaacactttctcagtggtctcttggcaatggcaccccagtcacaagtaaaggaggagactactttgtcttttactcccatggactccaggcctctgcatggcagttctggatagaagtgcaggtttcagaagaacatcctgaaggaatggtcaccgtggccattgctgcccactatctgtctggggaagacaagagatcccctcaactggatgctctgaaggaaaagttcccagattggacatttccctctgcctgggtgtgcacctacgatctctttgtattttaatcttgtggatgagctctaagtacatgcccagtggatactccatgtgacatggtttctccctatgttacgtggatgtttgtaacgtaagtcaatgaattttaatgatcatatgttcaaagagctttctgggttaacgcttttcagggccaagcactataagggtttagctgtggcgcagtgatgcatggcctgttgacacttgaaaatgccagtcttttggcacttcagcacatgtgggtactgccactacacacacgtcattttatatgaccttaaggacaaagccaacaatccacttcaatagctgcccctttaggatcaagaaagatgtacactgtcagagcattgttaatgagacaaaagttgtttccaatttaagccccaaaaccatttgttgtattagtggatggtgggtaaaatatcattcactgaggtaatgattccccttgagaatataactctgtgtaggtcactggaaagtgattgccatagggctgggagagaagcattgcactcttgaggctgtagcctgtgtcaagctgtttcttcaggcagcctctcaaatgtgctttgtctctctgtgctgaggcctggaccctgtgctgagctggtgactcactgtcctgacaagtggacacacagatgcactgctgtgctgctttcctgaggtggttttctatgcctgttttcctctgaaacatgtctgttacccctctccatcttaccaagttgaaaaggggaatatttggccacatacccctctggttttcgtaggttcttttggttcagaatattgtttgtgccagtacatgaccttaacttccttcctcagagcactgagctgccatctgggctattctggggtagaaggaaggctgggagtggtgggaattttataaatatttattctcttttctttgtttcataggagtcttgtgttatacaaggttagtccttcatggtataatcttactgatgcactgggcctatctttttgttttccagccagttgaatagattagtttttctcagtaacttactatccagcagactggctttcctgagacttgaggttgtggcttatactggaatgagaccactgtacgtgtaggtggttcagatcctgcgtaatggcagcatgaggacttaaaaggtggttttcattttgaagatggctatgtagcttgtaaggtgtatcacagcagtacctctcatggctttttggttccagcagtgagggcattggtgagatcaatggtaaactgtgcaagctttctttttatcattaggaaatgtgaaacgttggacaaattttgagttttaacaaggacaaaaagttgaaagaaaaggcacagttaacaaaaaagggtggctagatttatcttgggtgatggaggaaatgagagaggaatgctcttgaaaggtggtctgtggatctgtctgaatagaaagagcacagtaagtatgcattgccggagaaaacgtccttgaagctgcttgtctcatgtgtatgatgtgctttttaaatcatgcccctcgttgcctgcctaatctgtgactccctaaaaactaactgggcccatgtagatggggctgcaaccagagctgaataacatgttaggctcacacatgcatcagcactgcacactggaatcattgctcttcctggactttgtagaaatcagtctcaagtgcttcaagagtctggctcctgctacttttatctgtcaggtagcacataaggtttgcagggtttatattttgtatagaatcacagttgtggagaaaaagtaataatttctcaatgaattttaaaaatgggcctattttctatccccgtggttcatctgatataattagtgttccctgtgaattccccccctctatgggaaaggatgcctttactctttatcagtaataa

SEQ ID NO: 183814 - DNA, 3181 bp, Homo Sapiens
  misc_feature (2928)..(2936): n is a, c, g, or t
gccaactttgtacaaaaaagttgggaacgagtctccagcaccatgtctggtttgtctggcccaccagcccggcgcggcccttttccgttagcgttgctgcttttgttcctgctcggccccagattggtccttgccatctccttccatctgcccattaactctcgcaagtgcctccgtgaggagattcacaaggacctgctagtgactggcgcgtacgagatctccgaccagtctgggggcgctggcggcctgcgcagccacctcaagatcacagattctgctggccatattctctactccaaagaggatgcaaccaaggggaaatttgcctttaccactgaagattatgacatgtttgaagtgtgttttgagagcaagggaacagggcggatacctgaccaactcgtgatcctagacatgaagcatggagtggaggcgaaaaattacgaagagattgcaaaagttgagaagctcaaaccattagaggtagagctgcgacgcctagaagacctttcagaatctattgttaatgattttgcctacatgaagaagagagaagaggagatgcgtgataccaacgagtcaacaaacactcgggtcctatacttcagcatcttttcaatgttctgtctcattggactagctacctggcaggtcttctacctgcgacgcttcttcaaggccaagaaattgattgagtaatgaatgaggcatattctcctcccaccttgtacctcagccagcagaacatcgctgggacgtgcctggcctaaggcatcctaccaacagcaccatcaaggcacgttggagctttcttgccagaactgatctcttttggtgtgggaggacatggggtaccacctacacccaacaagtcaatgagggacttctttttaatttggtaggattttgactggttttgcaacaataggtctattattagagtcacctatgacaaaaaataggggttacctagataatgccaaagtcagcatttgtcctgggttcccttgtgtgatctgtttggactatgttttcttttcttctcccacttgctcagcagcttgggcttccattctagttcttttaccaagatttttgtgtgaccatgttgacttcatttggattgccctctttcaatttccttgtgaaaacacccttaactttctctttacccttagctgaaatgtttacatagcttctggtgatatcttttcatgattttatatctcttaaaatggtgatggatgtgacacctcataaaagtgagctttgaactgtagataactcttaaagaaaatgtcattttagacaattaaaatatttgtgctcaactgcttgaacttttttcgtgtatgtgtatttaattctatgcaatattatcacatgtgtagattcatgtgaccaccatcacaagagacagaacagttctgtcacatggatcccttgcactgcccttttacagccgcagccacatccctttcttataccctcaccccaacctgtggctaccactgttctgtcctccatctctgtaattttgtcatttcaagaatgttgtatgaatggaatcatacagaatgtaatcttacgaggctgatcttttttcattcagcataattcccttgaaatccatccaagttgttgcatgtatgaatagtttcttcctttttttcttttaaaaatgttttatatatttagggggtataagtacagatttcttacatgcatatattgcatcgtggtgaagtgggggcagttccttttgattgctgagtagtattccatggtatggatgtaccacagtttgcttaaccattcacccactaaaggacataagagttgttttcagttttttgccctaataaagctgctgtgaacattcatgtacaggtttttatgtgaacatacattttcattttctgggataaatgctcaaaagggcaactgttgggttgtatggtaaacacatatatttttgtaagaaactaccctactctttttccagagtggctctactttttacatacagccactcatacaattcagacagcaatgtatgattgatccagtttcttcacatcctcaccagcatttggtattactactattttttatcttaaccattcacatagatgtgtgtaatgataccacatgtggttttaatttgcatttccaatggctaatgatgttgagtatctttttgtgtgctaatttgccatctatgtatcctcttcggtgaaatgtcttcatgtcttttgtctattttctatttaggtcatttgttctttttactattgagttttgagaggttttttatatatcctagataaaattcctctgttagatatgtggttgcttgaatttttaacataacttctaccaaggaaaaataagtaaaatttccaacccttgcatggccagtcacttacttaattcctgtccttcagtgttccatctagagaattaagagatatgatgtataaaatagacatcgagggccattaagagagtaaatacttaaaaatacatgttatgaaagcaaagccaataatcactgtaggagtatgagttgcctaagggccaaaactaatgtaaataagagaaagtgtggatataaatgaccattgtttataaacagttatgaaaaatgctgtgacttgaaatctttcccacatctcccaagaaagtaggtaggagtttatcctttccgtaatctctttttaaccctgctgactattacagggcttgtttaatcacagtggcaagaattacatgtatcttacagtaaagaaacagaatactggaatcgttagagaaccctgatgtgttgacctggataaagtacaaaggtggaagagggaatgagttatgctgttaaaatctcaggctattctgttaatgttcctgctactatgaacccaaacnnnnnnnnncccccttttgactccttgtgtcttcctctcctgtggcataaaagtagttctgtcgttaacttgtacaacattgccatctgctgttgagaattggtaggtactgcttctgagaacctggctgcagatccttagcatggcagcaaatgttgagaaagtctatctgtagtattacatatactaaagttacagaggatgcattcaagtagagaaaataatatgtggggttaagatacatccctttaaac

SEQ ID NO: 183815 - DNA, 2216 bp, Homo Sapiens
ttggtttcctcctcggctgcgccgcgtgtcctcggagcgcggtccctgtattggtctcctgctcctagaggttgagaacaaaaacatgcacctggagtttccccggagccctctgcgtggttgagcttcggtggaatttcggggctcttggctgccagccgcgcttgcctggtagcaacagaaaccagtcctgctcgcctccgtggacatttcattaccatccagaagtgtctcccactgaaggcatccgtggttgtttttaagccacaaaaaagccacacccaagatcacctgacacccaccctgacaagtgtccatgatgctgggccctgagggaggtgaaggctttgtggtcaagctccgtggcctgccctggtcctgctctgttgaggacgtgcagaacttcctctctgactgcacgattcatgatggggccgcaggtgtccatttcatctacactagagagggcaggcagagtggtgaggcttttgttgaacttggatcagaagatgatgtaaaaatggccctgaaaaaagacagggaaagcatgggacaccggtacattgaggtgttcaagtcccacagaaccgagatggattgggtgttgaagcacagtggtcccaacagtgccgacagcgccaacgatggcttcgtgcggcttcgaggactcccatttggatgcacaaaggaagaaattgttcagttcttctcagggttggaaattgtgccaaacgggatcacattgcctgtggaccccgaaggcaagattacaggggaagcgttcgtgcagtttgcctcgcaggagttagctgagaaggctctagggaaacacaaggagaggatagggcacaggtacattgaggtgtttaagagcagccaggaggaagttaggtcatactcagatccccctctgaagttcatgtccgtgcagcggccagggccctatgaccggcccgggactgccaggaggtacattggcatcgtgaagcaggcaggcctggaaaggatgaggcctggtgcctacagcacaggctacgggggctacgaggagtacagtggcctcagtgatggctacggcttcaccaccgacctgttcgggagagacctcagctactgtctctccggaatgtatgaccacagatacggcgacagtgagttcacagtgcagagcaccacaggccactgtgtccacatgaggggcctgccgtacaaagcgaccgagaacgacatttacaacttcttctctcctctcaaccctgtgagagtccatattgagattggcccagatggaagagtgacgggtgaagcagatgttgagtttgctactcatgaagaagctgtggcagctatgtccaaagacagggccaatatgcagcacagatatatagaactcttcttgaattcaacaacaggggccagcaatggggcgtatagcagccaggtgatgcaaggcatgggggtgtctgctgcccaggccacttacagtggcctggagagccagtcagtgagtggctgttacggggccggctacagtgggcagaacagcatgggtggctatgactagttttgttaggaacatttgagttacttcaatcattttcacaggcagccaacaagcaattaagagcagttataatagaggaagctgggggacccattttgcaccatgagtttgtgaaaaatctggattaaaaaattacctcttcagtgttttctcatgcaaaattttcttctagcatgtgataatgagtaaactaaaactattttcagcttttctcaattaacattttggtagtatacttcagagtgatgttatctaagtttaagtagtttaagtatgttaaatgtggatcttttacaccacatcacagtgaacacactggggagacgtgcttttttggaaaactcaaaggtgctagctccctgattcaaagaaatatttctcatgtttgttcattctagtttatattttcatttaaaatcctttaggttaagtttaagctttttaaaagttagttttgagaattgagacacaatactaatactgtaggaattggtgaggccttgacttaaaactttctttgtactgtgatttccttttgggtgtattttgctaagtgaaacttgttaaattttttgttaactaaatttttttcttaaaataaagactttttcacaatgactgggcacagattactcagccaaagatagccaaa

SEQ ID NO: 183816 - DNA, 1276 bp, Homo Sapiens
  misc_feature (1066)..(1090): n is a, c, g, or t
cccccgcgtcctttggtggcctggcgctgcgagttactgaaataggtgggcacggtgatcactgcgtgcttcacgggctggcccaggtacgcctcggctgtctctttcatcttgctcagcaccatggacgagatctcctcggggtagaacgtcttgtcctccccgcggtagcatacgcgcactttgggcttgccgccctcgctcaccacctggaagggccagtgcttcatgtccgactgcaccgtggtgtccgcgaacttgcgcccgatcagccgcttggcatcgaacacggtgttgtgggggttcagggccgcctggctcttggccgcgtccccgaccagccgctccgtgtcggtgaaggccacgtagctgggcgtggtgcggttgccctggtcgttggccaggatctccacgcggccctgctgaaacacgcccacgcacgagtaggtggtgcccaggtcgatgcccaccgcgagctcccgtggggcctgcatggctgaagcttcttgtcggatgctggaggccacggaggctgctgccgctccgccgtcgaggggcgctcagcagtgaggctctccctgcggtttctctgccgccagcccggctcggatctgctcagctccgcttccacgggcttttcatccttttgcacctccccgaccccgccgccgcgaaccttcccgcaccttcccgcccagtcgagagcctcccgcccgcccgcccgggctgactcagccgggcggcgcagcgcggcgctgaccccgggagaaggttcgggcggatcgggccgtgagccgagaggctgggcggctacgccaggccagcccgcctctgactcagggctgctgaaagaaacgcggggaaggttctagctcctcccggctggctctgaggacgcgcggttgtggcagaggctgcaaaagcagcaactttagaggcaaggtctccccggggctgtgggaggtcagatccctgaggcgagcacgggcctgcgggctgccttggagggccgctgagagcccagcggctcaggaaggccgaagatatgttaccatgcgaatacagnnnnnnnnnnnnnnnnnnnnnnnnncttaaaacagttttatcttgaacaaaatattttccaaaccacgatttaagacagtgcctgtttccttaaggaatggccagagataatcagctttaagagatgacactgcagctctttcatcgacattagcattggtggtgtagtggtagacttctcgcccgcaacgcgggaggcgagaattcccaa

SEQ ID NO: 183817 - DNA, 1687 bp, Homo Sapiens
  misc_feature (124)..(136): n is a, c, g, or t
  misc_feature (1224)..(1285): n is a, c, g, or t
ttggggcttcgcggttcggtcctcgcacccggcagccgccactggtgctgagctgctaggaagcccctatcgccgagctcgttggagcttgaacccattgtcacccctccgactcaccggcccnnnnnnnnnnnnncatggttgaagcagatcgcccaggaaagctcttcattggtgggcttaatacggaaacaaatgagaaagctcttgaagcagtatttggcaaatatggacgaatagtggaagtactcttgatgaaagaccgtgaaaccaacaaatcaagaggatttgcttttgtcacctttgaaagcccagcagacgctaaggatgcagccagagacatgaatggaaagtcattagatggaaaagccatcaaggtggaacaagccaccaaaccatcatttgaaagtggtagacgtggaccgcctccacctccaagaagtagaggccctccaagaggtcttagaggtggaagaggaggaagtggaggaaccaggggacctccctcacggggaggacacatggatgacggtggatattccatgaattttaacatgagttcttccaggggaccactcccagtaaaaagaggaccaccaccaagaagtgggggtcctcctcctaagagatctgcaccttcaggaccagttcgcagtagcagtggaatgggaggaagagctcctgtatcacgtggaagagatagttatggaggtccacctcgaagggaaccgctgctctctcgtagagatgtttatttgtccccaagagatgatgggtattctactaaagacagctattcaagcagagattacccaagttctcgtgatactagagattatgcaccaccaccacgagattatacttaccgtgattatggtcattccagttcacgtgatgactatccatcaagaggatataggtaagtgactttgcttctgtggcttacatgtaagaaaagttgcaatgaaagttgattctctgggacttaaaggtttctctttaatttagcgatagagatggatatggtcgtgatcgtgactattcagatcatccaagtggaggttcctacagagattcatatgagagttatggtaagatactggttaagggtctttagtatcaccagcttgagtttttaggttcgtgagccagtttattaggctgtgtggtgcttgcttttaaagggatgtttgcttgcttttaaaggggtaactttatcagctnnnnnnnnnnnnnnnnnnnnnnnnnnnnnnnnnnnnnnnnnnnnnnnnnnnnnnnnnnnnnngcttgctttggaggggattttgcttgcttaaattggcagccttatgtgttttcccccaacagtgaaaatacaatttaaaaattttattaacaagatcaaatatttaccattgcaatatgaaggcaagttctacagttcaaaattgcaacttatcactggaaagtggctgagtgtctactataaaataacaagctctctggaatatcctcttgaaatacacaccgtcttcagtcttttcaaacaaacattaaaatgaatccaattccatatctcagcagatgagcaaatctctgttatggccagcaatggcagagtttaaaaccttctacctagttgagaaagtaaacttttaatacaagaattctgtaaattcagatttaaaatgttgtatatatacaattt

SEQ ID NO: 183818 - DNA, 3468 bp, Homo Sapiens
  misc_feature (1345)..(1407): n is a, c, g, or t
ttggattgtgcttttcacaattcttcaggttttaaattctgctaagctcacaatctgatgttgaaaagaggacatgttagtaatgactctgtccctttattttcttcaccactcccctacaaaattttaaattcttgaaatcttttgctaattgagattttcatcttgtgcaaacacagggcatttttggcagttggagaacaaagcaatccaaggtaaacagctgtaggctttggattggtgtgtaagaaatatgcgtggcccgcatgtcttagaaatgtaattaaaggaacgatttagttatagtccacttttttggggggatgtggttttgtggagtaacatgtcctacactattctaccagaatttggaatttttccatgaagatgtacggaaatctgatgttgaatatgaaaatggcccccaaatggaattccaaaaggtgagttcaccagatctgggttccgaccaataccatgcacattaagtacctgcctctgcagatccattgctgattaacgtgtgtggtttccctcctccgttctccctctcaggttaccacaggggctgtaagacctagtgaccctcctaagtgggaaagaggaatggagaatagtatttctgatgcatcaagaacatcagaatataaaactgagatcataatgaaggaaaattccatatccaatatgagtttactcagagacagtagaaactattcccaggaaactgtgcctaaggccagtttcggtttctctggcattagtccattagaagatgaaataaacaaagggtctaaaatctcaggcctgcaatactctatacctgacaccgagaaccagacgctgaattacggaaagacaaaggagatggaaaagcaaaatacggataagtgtcacgtttcctctcacactagactaacagaatcaagcgtgcatgattttaaaacagaagatcaagaggttatcacgacagattttggccaagttgttctaagacccaaagaggcaaggcatgctaacgtgaaccctaatgagatggagaatcaagttcaagttctcccactgaagaaaatgcagccactgacaatattgccttcatgattaccgaaaccactgtccaggttctttccagtggggaggtgcatgatattgttagccaaaagggagaagacatacagacggttaatatcgatgccagaaaagagatgaccccccgacaagaagggactgacaatgaggatccagtcgtgtgcctggacaagaaaccagtgatcatcattttcgatgagcccatggacatccggtctgcctataagagactttcaactatctttgaggaatgtgnnnnnnnnnnnnnnnnnnnnnnnnnnnnnnnnnnnnnnnnnnnnnnnnnnnnnnnnnnnnnnngggattctgtagtccagaataataacacttcccagatgtctcataagaaggtggccccaggcaatcttagaaccggacaacaggtggaaacaaagtcacagccacactccctggccacagagaccagaaacccaggaggacaggaaatgaacagaacggagctgaacaagttcagccacgtggattctccaaattcggaatgcaagggtgaggacgcgaccgatgaccagtttgaaagccccaagaaaaagtttaaattcaaattccctaagaagcaactcgccgctctcactcaagccattcgcaccggaactaaaacagggaagaagactttgcaagtggtagtctatgaagaagaggaagaggatggcactctgaaacagcacaaagaagccaagcgcttcgaaatcgctaggtctcaacctgaagacacccctgaaaacacagtgaggaggcaagagcagcccagcatcgagagtacatctccgatttcaagaactgatgaaattagaaaaaacacctacagaacattggatagcctggagcagaccattaaacagctcgaaaatacaatcagtgaaatgagtcccaaagccctagttgatacctcatgttcttccaacagagattctgttgcaagttcatcccacatagcccaagaggcctctccccgacccttgctagttccggatgaaggtcccactgccctagagccccctacgtcgataccttcagcttcacgtaagggctccagcggggccccacagacgagcaggatgcctgtccccatgagtgccaagaacagacccggaaccctggacaaacccggcaagcagtccaaactgcaggatccccgccaatatcgtcaggctaatggaagtgctaagaaatctggtggggactttaagcctacttccccctccttacctgcttctaagattccagccctttctcccagctctgggaaaagcagttctctgccctcttctagtggtgacagctctaacctccctaatccacctgctactaaaccatcgattgcttctaaccctctcagcccccaaacaggaccacctgctcactctgcctccctcatcccttctgtctctaatggctctttgaagtttcagagcctcactcatacaggtaaaggtcaccatctttcattctcaccgcagagtcaaaatggccgagcaccccctcctttgtcattttcctcctcccctccttctcctgcctcctccgtctcactgaatcaaggtgccaagggcaccaggaccatccatactcccagcctcaccagctacaaggcacagaatggaagttcaagcaaagccaccccatccacagcaaaagaaacctcttaaaggtcaaatcctattaggcacaagtcggagttacatttaaaaaaaattaacagtctacaacaactgttttcacaagagaatgtaacatattgctgtatcgtttgaggcttaatgctaaatatgtgctaaatactggattaatagatttcagtaaagctcgttcgttttgtttggttttctttttacctagttgctatagtgtctacagtctatactcaatacctataaaatgcagtaagcatgtgttacagaaagaggttctggtgggagagaaaggtgcgtgtgagacaggagaattgtcttaagcatataaaacatgtatgattccagaattttagtatgttttgtataaaactatttttcattacggagactagaagtgaacagagaattacacaagtgtgactatacaaattgtaaaacagatactataatatttccttttattttagtgttatttagctttattacagatttctatttttgtcaaaacttcatggttcctttcaagatcttttttgccaaaacattttgatactatagcattgtacatttgaaagtagtgttctagactataaaaccaatgaacttctacatgagccctacagacaggcatgtgtagaaggcaatttatcaaacctattgcactgccatgaaaagtgtgtataataatttgctagcccaagcaagctag

SEQ ID NO: 183819 - DNA, 1423 bp, Homo Sapiens
ttggcacagtgccacccaaggagaagaagaatttggaatttttccatgaagatgtacggaaatctgatgttgaatatgaaaatggcccccaaatggaattccaaaaggttaccacaggggctgtaagacctagtgaccctcctaagtgggaaagaggaatggagaatagtatttctgatgcatcaagaacatcagaatataaaactgagatcataatgaaggaaaattccatatccaatatgagtttactcagagacagtagaaactattcccaggaaactgtgcctaaggccagtttcggtttctctggcattagtccattagaagatgaaataaacaaagggtctaaaatctcaggcctgcaatactctatacctgacaccgagaaccagacgctgaattacggaaagacaaaggagatggaaaagcaaaatacggataagtgtcacgtttcctctcacactagactaacagaatcaagcgtgcatgattttaaaacagaagatcaagaggttatcacgacagattttggagttgttctaagacccaaggaggcaaggcatgctaacgtgaaccctaatgaggatggagaatcaagttcaagttctcccactgaagaaaatgcagccactgacaatattgccttcatgattaccgaaaccactgtccaggttctttccagtggggaggtgcatgatattgttagccaaaagggagaagacatacagacggttaatatcgatgccagaaaagagatgaccccccgacaagaagggactgacaatgaggatccagtcgtgtgcctggacaagaaaccagtgatcatcattttcgatgagcccatggacatccggtctgcctataagagactttcaactatctttgaggaatgtgatgaggaattagagagaatgatgatggaggaaaagatagaggaggaggaagaggaggaaaatggggattctgtagtccagaataataacacttcccagatgtctcataagaaggtggccccaggcaatcttagaaccggacaacaggtggaaacaaagtcacagccacactccctggccacagagaccagaaacccaggaggacaggaaatgaacagaacggagctgaacaagttcagccacgtggattctccaaattcggaatgcaagggtgaggacgcgaccgatgaccagtttgaaagccccaagaaaaagtttaaattcaaattccctaagaagcaactcgccgctctcactcaagccattcgcaccggaactaaaacagggaagaagactttgcaagtggtagtctatgaagaagaggaagaggatggcaccctgaaacagcacaaagaagccaagcgcttcgaaatcgctaggtctcaacctgaagacacccctgaaacacagtgaggaggcaagagcagccc

SEQ ID NO: 183820 - DNA, 1247 bp, Homo Sapiens
  misc_feature (311)..(319): n is a, c, g, or t
ctttgtacaaaaaagttggaaagctgaccccttaaagcccgggtagtggtcgtcgtggttttccttgtagttcgtggtctgagaccaggcctcaagtggaaacggcgtcaccatgatcgcacggcggaacccagaacccttacggtttctgccggatgaggcccggagcctgcccccgcccaagctgaccgacccgcggctcctctacatcggcttcttgggctactgctccggcctgattgataacctgatccggcggaggccgatcgcgacggctggtttgcatcgccagcttctatatattacggccnnnnnnnnngctggatattatcttgtaaaacgtgaagactacctgtatgctgtgagggaccgtgaaatgtttggatatatgaaattacatccagaggattttcctgaagaagataagaaaacatatggtgaaatttttgaaaaattccatccaatacgttgaagtcttcaaaatgcttgctccagtttcactgatacctgctgtttctgaatttgatggaacatgtttcttatgacagttgaagcttatgctaatctgtatgttgacaccttgtaattaaaatacgtaccatgagtactctgactctttattgttgtaagaaaaatagttcatcatcagagaatggtcagtttccattcacccatctgaaagattttaagatgaggttgaattctagtttagagttagcagactacccaaatctggcccactgccaataaagtctcattggaacacagccatgctcatttgtttacatgttgtttatggcgactgccatgctgcaagagcagaattgagtagttgtgatagagacctatggcctgcaaagcctaattaatatgtagccctttcagaaaaggtttgcctgcccctgtcctagtgcaaagtgaatttagagtgagccagattatggaggattctgtgactcttgccaaataattttgacttcatcctgtaggtattaagtcattaaggcgttttaaatcatacagtcaggtttgtatttctgagctgtctataatgaatgatatagaaagtggtttcgaaggaggagactccagacaaggaaaacagaaatcttatgttggccagttgtctttgctcttaagtgggttatcctggagaaaatggactcaggagctaatactgtctacagtggagcttggtgcaattagaagcaaaagactgtacctaactggaatgaggttacttttta

SEQ ID NO: 183821 - DNA, 1192 bp, Homo Sapiens
  misc_feature (174)..(189): n is a, c, g, or t
  misc_feature (268)..(280): n is a, c, g, or t
ttggataaaatcctgcactgaatctgtgtctcctctgttacctacttttgccagtgaaatttaagttttaaaatactttcagaatgtatttttactactgcaagtttttggtctttaaaatgtcaagtagcatctctctctttctctctgtctctttctgtttctctctccagnnnnnnnnnnnnnnnnaatttccatatgggctaaagaatccaaatattttaaaaatctgtctctcttttcttctctcataaagtgaattattccnnnnnnnnnnnnnatgtaagtgtatatattcttagtttttcttgaaatcattgtaatgttaactttgttgtttcaaatatcttggtgattgcttcattatctcttcaacaaaaaaaacctttaattttgccattgaaactgtagaactatgccatgcttttattagaagcagtgctctgtgttaacaacaagaatggtgtaattagaattgggatgtggatatttactgtatgacaacacatttacagttctgtaatgcaaggatgcagtttaaaaatgtgaagtagtgatggtttttgaaataagctttaaaatatagggatcttgaaggctccctggggtaactattttataacttagataaaatggctagtcatatctgtgtgtttgtaaagttatttttttaatattttaagattacaattttaacaaatgtagaaatgagccaaactatttaaattttaaaacagtaaaacaaaatgaaacttaatagctcacaaaattccagtccatgtttcatgacttattttagtcaatgaattttctatttatactaaacatatggacattttaaatgtgtttctaatatttttgattatctataatgtgcctgtcttcaattcacaagattgggttataacaattatttgccagattaacactagggaattatttgataaccagcttatcttatcagtagttttattgctgatcaggcaaaaatagttttccaaagttatttttaataaagtatatacaaaattcttatatattactagtcatgataaagtaaattaagcagtttttaaaacttagtgtgagtttgttcatcacaggtctgatatgagtttaagggatttcgcactccctgaatcagagaagtaagaccccttccttagattcctgttatacattttttaaaatg

SEQ ID NO: 183822 - DNA, 1753 bp, Homo Sapiens
  misc_feature (523)..(545): n is a, c, g, or t
  misc_feature (1455)..(1465): n is a, c, g, or t
ttggctcataatccttctgcaactgaaattacatattgcggagacattttcatatcatcaatgtgacatttacaccacactttcaaagacaatcactgaaacaaaaattgtctttatgagctaaaaatatgcagaatctctgcctagaatctttattcaaacttttattagccagtgaaacacttgcttgccaactgccaagccatacttattaagttcgaacatgtttcacttaaggagagacacctagcttagtcatggcaagttgccattttgtaaactaaggattttggactgagatttcttaaatctttcttcaaatctcccacaagtatatacttttaaattatggagtattttaagtctacaaaaaggtataataataatataatgaattcctatatacctaatacccagtttaagacaccaaatataacaagtataattacatcctccaatgtaccgtttccttattccacagatatctttttcattattgtgaagtgatgttcagatttctagnnnnnnnnnnnnnnnnnnnnnnnaacatcagaactgaaataaaaaattatggatacgtgttttgaattgcaaactattcctcaggaattccaattaaatttattttacttgaataggaatgatcataaaagtgattctttttttgtgactagaaattcttaagccgatggtcactatagctcatccttaatgtatggctcatttgcttttgtcactaaacggttttgtgttagaaccaccaaaattatagcttttaagagcttcctttgaccactgtctttttcttaccctacttctcttatctttgatcgtatatttctcataatgtgaaatatgatgagattcacttaggggcagcatgttagttttgggaggcaatgtcaactgtgtctctgaattcctgtcttccaaattgaagccagaccatgctgatgacctcaagtagcactgactatttgacaatagggctgataatgtaatcggcttgaattttgacttagtaactttttatgtaatactttcggagaaattctctttaggacaaagcagagagtccaatttattgagggatagattgtatctcttaaagtggtcatattattattaattttgccaaaagaagaagaatttattgaatatttatactataaaatgcagtaacattctacttgcttattacatttaaatccttgtgtaactgaatgtttacatgtcaagaggaaaagctgtaagaaaatgctgtcacagacccatccctgtggcatcgtcagcagaatactgcttgcttacaatctttattatgcattcttataacataacctcagagtatctttaccaaaggtttttaaagtaaatctctttttaagatagacttattcttttataataatgaatgtgcactcatacatatgtagaaacatttagatttagagnnnnnnnnnnnctttcacaaggtataataaggaaaggatcctacaatattttattctatgggtttcttaaatatatgatttatattactgtcttttctattaatcatttgatttaaacaatgccaagtcactcttttttagttgcatgaaattttgcctgcaacagagagaaaaagattgtattactttaatgattataatcatactgtctgctgatataatatcataattgttgtggtttaaatacataaatagtagaaaatcagagtctataacagaaagtttgtaaaaatatactg

SEQ ID NO: 183823 - DNA, 1222 bp, Homo Sapiens
tttgtacaaaaaagttggcccagtgcttgtcatatcccctagagatggggaccatgctgcgctcagaagctggggcctggcgcctgaagcagctgctcagcttcgccctggggggactcttgggcaatgtgtttctgcatctgctgcccgaagcctgggcctacacgtgcagcgccagccctggtggtgaggggcagagcctgcagcagcagcaacagctggggctgtgggtcattgctggcatcctgaccttcctggcgttggagaagatgttcctggacagcaaggaggaggggaccagccaggcccccaacaaagaccccactgctgctgccgccgcactcaatggaggccactgtctggcccagccggctgcagagcccggcctcggtgccgtggtccggagcatcaaagtcagcggctacctcaacctgctggccaacaccatcgataacttcacccacgggctggctgtggctgccagcttccttgtgagcaagaagatcgggctcctgacaaccatggccatcctcctgcatgagatcccccatgaggtgggcgactttgccatcctgctccgggccggctttgaccgatggagcgcagccaagctgcaactctcaacagcgctggggggcctactgggcgctggcttcgccatctgtacccagtcccccaagggagtagaggagacggcagcctgggtcctgcccttcacctctggcggctttctctacatcgccttggtgaacgtgctccctgacctcttggaagaagaggacccgtggcgctccctgcagcagctgcttctgctctgtgcgggcatcgtggtaatggtgctgttctcgctcttcgtggattaactttccctgatgccgacgcccctgccccctgcagcaataagatgctcggattcactctgtgaccgcatatgtgagaggcagagagggcgagtggctgcgagagagaatgagcctcccgtcagacaggagggaggtgcgtgtggatgtatgtggtgtgcacatgtggccagaggtgtgtgcgcgagaccgacactgtgatccctgtgctgggtccggggcccagtgtagcgcctgtccccagccatgctgtggttacctctccttgccgccctgtcaccttcacctcccggagtaagcagcgaggaagagcagcactggtcccaagcagaggccttgctctgctgggaccccgggagtga

SEQ ID NO: 183824 - DNA, 1210 bp, Homo Sapiens
  misc_feature (1094)..(1142): n is a, c, g, or t
tgagcgcggcggcagcagcagtggggtcttgttgggggcctggctggtccctcctccttgctgtccaggaacatcttctccaacgccaggaaggtcaggatgccagcaatgacccacagccccagctgttgctgctgctgcaggctctgcccctcaccacttgcagggggcggcaatgccaggccaggccaggccaagccaagccagggccataggagggggccatttggaatgggatctcatccagggcaccagggcagtgacaagggtgggttgggcagctggggcccagaactcccactgggaccagggcccagagaccaggacaatgaccctccctccctcccaggcaagctcctgccagaaacccagaatccctctcctggtcatcctggccatccctgggcgtgggcaccaggcccccactcctggcactgtcttgcccctggcgtgtggcctcacttaccagggctggcgctgcacgtgtaggcccaggcttcgggcagcagatgcagaaacacattgcccaagagtccccccagggcgaagctgagcagctgcttcaggcgccaggccccagcttctgagcgcagcatggtccccatctctaggggaatgacaagcaacgggaagaccccactgagccccaccatgagggaacccaggagggagcagatccaggtgtccagccgctctccgctcagcagagccccccaggactcgctttccttgttgtccaggcgacaggccgtcgcagtcccccggctccggagggccggctgggaacccccagcccttcccaagagctccagggcaagggcagcgaggaagaggagccttgggcccgccatgccacagccagggcagggacatccaggcatgccacgtacttctgatggagatgggaggggaagaaagcagctgcctctgggtggtggcagagatgcccatgtctaggacctccaggccttaactaatcaggggcactgatgaagccagcggggctccactggggaccacaggcaagactgggccaggacgaggcggtcacgcagaggtgaggggaccacaggctagcgggagggaatacacgnnnnnnnnnnnnnnnnnnnnnnnnnnnnnnnnnnnnnnnnnnnnnnnnncgggtgggacgcggagaggacagcgagggagggatggggcgtggggcgcggagcgatgggggagccaa

SEQ ID NO: 183825 - DNA, 927 bp, Homo Sapiens
caactttgtacaaaaaagttggcaaggtcttcgttcaaacgattaggtgcctaactggcaaatgccttagtttcttaaaacgtattttctgatgtggctttacatttcaaaagtgaacttgattcaacctgagaaaactgattaaaaaattagtttaaatttgccagcagggaagtaaaataattatgggaagagtgtcttaagcctaatattaaatcagttttgttaaggggaaaactcaatagttctgttacttaggctgttagatccaagttgatttttgtgtctacagctaaattttgtttacaattaggctattttttaatataggatttagaaaccaagggtatgtgttttaaaattacactttttcttaacctgtctagctgtcggaaaaggtaacagaagatggaactcgaaatcccaatgaaaaacctacccagcaaagaagcatagcttttagctctaataattctgtagcaaagccaatacaaaaatcagctaaagctgccacagaagaggcatcttcaagatcaccaaaaatagatcagaaaaaaagtccatatggactgtggatacctatctaaaagaagaaaactgatggctaagtttgcatgaaaactgcactttattgcaagttagtgtttctagcattatcccatccctttgagccattcaggggtacttgtgcatttaaaaaccaacacaaaaagatgtaaatacttaacactcaaatattaacatttttaggtttctcttgcagatatgagagatagcacagatggaccaaaggttatgcacaggtgggagtcttttgtatatagttgtaaatattgtcttggttatgtaaaaatgaaattttttagacacagtaattgaactgtattcctgttttgtatatttaataaatttcttgttttcattctt

SEQ ID NO: 183826 - DNA, 1788 bp, Homo Sapiens
  misc_feature (1034)..(1070): n is a, c, g, or t
  misc_feature (1079)..(1091): n is a, c, g, or t
ctttgtacaaaaaagttggtggaggttgtggaattcgccgttcgaaagcagggactaaaagccccacttcgtcttacgttccgaaaggaaggcgtctgttgagcctttctctcagtcgtgagggaggcgtcgacggcgtgcggaagtcctgagttgaggcttgcgggatcctttccggagaaagcgcaggctaaagccgcaggtgaagatgtccaactacgtgaacgacatgtggccgggctcgccgcaggagaaggattcgccctcgacctcgcggtcgggcgggtccagccggctgtcgtcgcggtctaggagccgctctttttccagaagctctcggtcccattcccgcgtctcgagccggttttcgtccaggagtcggaggagcaagtccaggtcccgttcccgaaggcgccaccagcggaagtacaggcgctactcgcggtcatactcgcggagccggtcgcgatcccgcagccgccgttaccgagagaggcgctacgggttcaccaggagatactaccggtctccttcgcggtaccggtcccggtcccgtagcaggtcgcgctctcggggaaggtcgtactgcggaagggcgtacgcgatcgcgcggggacagcgctactacggctttggtcgcacagtgtacccggaggagcacagcagatggagggacagatccaggacgaggtcgcggagcagaaccccctttcgcttaagtgaaaaagatcgaatggagctgttagaaatagcaaaaaccaatgcagcgaaagctctaggaacaaccaacattgacttgccagctagtctcagaactgttccttcagccaaagaaacaagccgtggaataggtgtatcaagtaatggtgcaaagcctgaaaaatcatgaatgtggtctgcagacattgatgaagaaaatctgttgatgttttgagagattacagaagaggaggcctgcttcacttgcagataagtttattataattctccagaaatgtgcaggatgtgcattagcaaattgcactgtacttttnnnnnnnnnnnnnnnnnnnnnnnnnnnnnnnnnnnnngggggcttnnnnnnnnnnnnntgctgtatctaaatgaatctgtgtaattgggcccagatgtgggtttgctcagtattagtagacaaggtctttgttcagacgattaggtgcctaactggcaaatgccttagtttcttaaaacgtattttctgatgtggctttacatttcaaaagtgaacttgattcaacctgagaaaactgattaaaaaattagtttaaatttgccagcagggaagtaaaataattatgggaagagtgtcttaagcctaatattaaatcagttttgttaaggggaaaactcaatagttctgttacttaggctgttagatccaagttgatttttgtgtctacagctaaattttgtttacaattaggctattttttaatataggatttagaaaccaagggtatgtgttttaaaattacactttttcttaacctgtctagctgtcggaaaaggtaacagaagatggaactcgaaatcccaatgaaaaacctacccagcaaagaagcatagcttttagctctaataattctgtagcaaagccaatacaaaaatcagctaaagctgccacagaagaggcatcttcaagatcaccaaaaatagatcagaaaaaaagtccatatggactgtggatacctatctaaaagagaaactgatggctaagtttgcatgaaaactgcactttattgcagttagtgtttctagcattatccc

SEQ ID NO: 183827 - DNA, 2256 bp, Homo Sapiens
  misc_feature (1089)..(1353): n is a, c, g, or t
  misc_feature (1934)..(1970): n is a, c, g, or t
  misc_feature (1979)..(1991): n is a, c, g, or t
taaaagccaactttgtacaaaaaagttggcgtaggagggggaggttgtggaattcgccgttcgaaagcagggactaaaagccccacttcgtcttacgttccgaaaggaaggcgtctgttgagcctttctctcagtcgtgagggaggcgtcgacggcgtgcggaagtcctgagttgaggcttgcgggatcctttccggagaaagcgcaggctaaagccgcaggtgaagatgtccaactacgtgaacgacatgtggccgggctcgccgcaggagaaggattcgccctcgacctcgcggtcgggcgggtccagccggctgtcgtcgcggtctaggagccgctctttttccagaagctctcggtcccattcccgcgtctcgagccggttttcgtccaggagtcggaggagcaagtccaggtcccgttcccgaaggcgccaccagcggaagtacaggcgctactcgcggtcatactcgcggagccggtcgcgatcccgcagccgccgttaccgagagaggcgctacgggttcaccaggagatactaccggtctccttcgcggtaccggtcccggtcccgtagcaggtcgcgctctcggggaaggtcgtactgcggaagggcgtacgcgatcgcgcggggacagcgctactacggctttggtcgcacagtgtacccggaggagcacagcagatggagggacagatccaggacgaggtcgcggagcagaaccccctttcgcttaagtgaaaaagatcgaatggagctgttagaaatagcaaaaaccaatgcagcgaaagctctaggaacaaccaacattgacttgccagctagtctcagaactgttccttcagccaaagaaacaagccgtggaataggtgtatcaagtaatggtgcaaagcctgaagtaagtattctaggtttgtcggaacaaaactttcagaaagccaactgtcaaatctgattagccacttatatcttagactatactttttgggaagtctagagatgtatataatgtgctaaattcaaagtagcaaatctgaagataggcaatgtcaaacccatgaaaatgggagattaatgagctttatttnnnnnnnnnnnnnnnnnnnnnnnnnnnnnnnnnnnnnnnnnnnnnnnnnnnnnnnnnnnnnnnnnnnnnnnnnnnnnnnnnnnnnnnnnnnnnnnnnnnnnnnnnnnnnnnnnnnnnnnnnnnnnnnnnnnnnnnnnnnnnnnnnnnnnnnnnnnnnnnnnnnnnnnnnnnnnnnnnnnnnnnnnnnnnnnnnnnnnnnnnnnnnnnnnnnnnnnnnnnnnnnnnnnnnnnnnnnnnnnnnnnnnnnnnnnnnnnnnnnnnnnnntacatttatttttttcattttcagttaacagtgtactcttataacaccgttattagctggtactttggtgatttctattactagtttttctaagctatttacagagtgtttgtagctttcatttgcagcattatgttcccacaaattctgtactcagcatatacagtatagtttatctgctctatttctgtcttatagaaatcatgaatgtggtctgcagacattgatgaagaaaatctgttggtaattgatacatgggctaaagcatcagaggtttaatttgaagtttatgttcacacactgaaaacttagtttttttgttggtagatccatgtgcatgctagaatttgggacaggcactatttgcataaagtattaaagtcaatttttaaactaagcaaaggtacacgttgtaacggtggggcatctgtgaaaaagatgtccctttcataatatatgcaatatattccagatgttttgagagattacagaagaggaggcctgcttcacttgcagataagtttattataattctccagaaatgtgcaggatgtgcattagcaaattgcactgtacttttnnnnnnnnnnnnnnnnnnnnnnnnnnnnnnnnnnnnngggggcttnnnnnnnnnnnnntgctgtatctaaatgaatctgtgtaattgggcccagatgtgggtttgctcagtattagtagacaaggtctttgttcagacgattaggtgcctaactggcaaatgccttagtttcttaaacgtattttctgatgtgggctttacatttcaaaagtgaacttgattcaccctgataaaactgattaaaaatttagtttaaatttgccagcagggaagtaaaataattatgggaagagtgtcttaaacctaatattaaatcagttttg

SEQ ID NO: 183828 - DNA, 1446 bp, Homo Sapiens
ttggctcaccaacacacaccacgagctacgcctggacgtggagttcaagccactcgcccctgacggggtcctgctgttcagcggggggaagagcgggcctgtggaggacttcgtgtccctggcgatggtgggcggccacctggagttccgctatgagttggggtcagggctggccgttctgcggagcgccgagccgctggccctgggccgctggcaccgtgtgtctgcagagcgtctcaacaaggacggcagcctgcgggtgaatggtggacgccctgtgctgcgctcctcgcccggcaagagccagggcctcaacctgcacaccctgctctacctggggggtgtggagccttccgtgccactgtccccggccaccaacatgagcgctcacttccgcggctgtgtgggcgaggtgtcagtgaatggcaaacggctggctcacctacagtttcctaggcagccagggcatcgggcaatgctatgacagctccccatgtgagcgccagccttgccaacatggtgccacgtgcatgcccgctggcgagtatgagttccagtgcctgtgtcgagatggattcaaaggagacctgtgtgagcacgaggagaacccctgccagctccgtgaaccctgtctgcatgggggcacctgccagggcacccgctgcctctgcctccctggcttctctggcccacgctgccaacaaggctctggacatggcatagcagagtccgactggcatcttgaaggcagcgggggcaatgatgcccctgggcagtacggagcctatttccacgatgatggcttcctcgccttccctggccatgtcttctccaggagcctgcccgaggtgcccgagaccatcgagctggaggttcggaccagcacagccagtggcctcctgctctggcagggtgtggaggtgggagaggccggccaaggcaaggacttcatcagcctcgggcttcaagacgggcaccttgtcttcaggtaccagctgggtagtggggaggcccgcctggtctctgaggaccccatcaatgacggcgagtggcaccgggtgacagcactgcgggagggccgcagaggttccatccaagtcgacggtgaggagctggtcagcggccggtccccaggtcccaacgtggcagtcaacgccaagggcagcgtctacatcggcggagcccctgacgtggccacgctgaccgggggcagattctcctcaggcatcacaggctgtgtcaagaacctggtgctgcactcggcccgacccggcgccccgcccccacagcccctggacctgcagcaccgcgcccaggccggggccaacacacgcccctgcccctcgtaggcacctgcctgctccacacggactctcgggccacgctctagctcgacaatgtcgagtatattattattaatattattatgaatttttgtaagaaacc

SEQ ID NO: 183829 - DNA, 2395 bp, Homo Sapiens
ttggaacagatttcttggttattgtgctattgccacacctgggttgggttttatagccatttccatcatcagtttcctgtctctgctgggggttatcttagtgcctctcatgaatcgggtgtttttcaaatttctcctgagtttccttgtggcactggccgttgggactttgagtggtgatgcttttttacaccttcttccacattctcatgcaagtcaccaccatagtcatagccatgaagaaccagcaatggaaatgaaaagaggaccacttttcagtcatctgtcttctcaaaacatagaagaaagtgcctattttgattccacgtggaagggtctaacagctctaggaggcctgtatttcatgtttcttgttgaacatgtcctcacattgatcaaacaatttaaagataagaagaaaaagaatcagaagaaacctgaaaatgatgatgatgtggagattaagaagcagttgtccaagtatgaatctcaactttcaacaaatgaggagaaagtagatacagatgatcgaactgaaggctatttacgagcagactcacaagagccctcccactttgattctcagcagcctgcagtcttggaagaagaagaggtcatgatagctcatgctcatccacaggaagtctacaatgaatatgtacccagagggtgcaagaataaatgccattcacatttccacgatacactcggccagtcagacgatctcattcaccaccatcatgactaccatcatattctccatcatcaccaccaccaaaaccaccatcctcacagtcacagccagcgctactctcgggaggagctgaaagatgccggcgtcgccactttggcctggatggtgataatgggtgatggcctgcacaatttcagcgatggcctagcaattggtgctgcttttactgaaggcttatcaagtggtttaagtacttctgttgctgtgttctgtcatgagttgcctcatgaattaggtgactttgctgttctactaaaggctggcatgaccgttaagcaggctgtcctttataatgcattgtcagccatgctggcgtatcttggaatggcaacaggaattttcattggtcattatgctgaaaatgtttctatgtggatatttgcacttactgctggcttattcatgtatgttgctctggttgatatggtacctgaaatgctgcacaatgatgctagtgaccatggatgtagccgctgggggtatttctttttacagaatgctgggatgcttttgggttttggaattatgttacttatttccatatttgaacataaaatcgtgtttcgtataaatttctagttaaggtttaaatgctagagtagcttaaaaagttgtcatagtttcagtaggtcatagggagatgagtttgtatgctgtactatgcagcgtttaaagttagtgggttttgtgatttttgtattgaatattgctgtctgttacaaagtcagttaaaggtacgttttaatatttaagttattctatcttggagataaaatctgtatgtgcaattcaccggtattaccagtttattatgtaaacaagagatttggcatgacatgttctgtatgtttcagggaaaaatgtctttaatgctttttcaagaactaacacagttattcctatactggattttaggtctctgaagaactgctggtgtttaggaataagaatgtgcatgaagcctaaaataccaagaaagcttatactgaatttaagcaaagaaataaaggagaaaagagaagaatctgagaattggggaggcatagattcttataaaaatcacaaaatttgttgtaaattagaggggagaaatttagaattaagtataaaaaggcagaattagtatagagtacattcattaaacatttttgtcaggattatttcccgtaaaaacgtagtgagcacttttcatatactaatttagttgtacatttaactttgtataatacagaaatctaaatatatttaatgaattcaagcaatatatcacttgaccaagaaattggaatttcaaaatgttcgtgcgggtatataccagatgagtacagtgagtagttttatgtatcaccagactgggttattgccaagttatatatcaccaaaagctgtatgactggatgttctggttacctggtttacaaaattatcagagtagtaaaactttgatatatatgaggatattaaaactacactaagtatcatttgattcgattcagaaagtactttgatatctctcagtgcttcagtgctatcattgtgagcaattgtcttttatatacggtactgtagccatactaggcctgtctgtggcattctctagatgtttcttttttacacaataaatttccttatatcagcttg

SEQ ID NO: 183830 - DNA, 1884 bp, Homo Sapiens
  misc_feature (85)..(93): n is a, c, g, or t
  misc_feature (1663)..(1673): n is a, c, g, or t
  misc_feature (1707)..(1735): n is a, c, g, or t
ttgggtaaattatgcgagtgcagctttaatgatcccaatgctaaggagatgcacttaaaagggcgaagacacagacttcaatatnnnnnnnnngtaaatccagatttgcaagtagaagtaaagcctagtattcgagcaagaaagattcaagaagagaaaatgaggaagcaaatgcagaaggaggagtactggcgaagacgagaagaagaggagcgttggagaatggaaatgagacgttatgaagaggacatgtactggaggagaatggaggaagaacaacatcattgggatgatcgccgccgaatgccagatggaggttatcctcatggtcctccaggcccattaggccttctgggagtccgaccaggcatgcctcctcagcctcaggggcctgcacccttacgtcgtcctgactcatctgatgaccgttatgtaatgacaaaacatgccaccatttatccaactgaagaggagttacaggcagttcagaaaattgtttctattactgaacgtgctttaaaactcgtttcagacagtttgtctgaacatgagaagaacaagaacaaagagggagatgataagaaagagggaggtaaagacagagctttgaaaggagttttgcgagtgggagtattggcaaaaggattacttctccgaggagatagaaatgtcaaccttgttttgctgtgctcagagaaaccttcaaagacattattaagccgtattgcagaaaacctacccaaacagcttgctgttataagccctgagaagtatgacataaaatgtgctgtatctgaagcggcaataattttgaattcatgtgtggaacccaaaatgcaagtcactatcacactgacatctccaattattcgagaagagaacatgagggaaggagatgtaacctcgggtatggtgaaagacccaccggacgtcttggacaggcaaaaatgccttgacgctctggctgctctacgccacgctaagtggttccaggctagagctaatggtctgcagtcctgtgtgattatcatacgcattcttcgagacctctgtcagcgagttccaacttggtctgattttccaagctgggctatggagttactagtagagaaagcaatcagcagtgcttctagccctcagagccctggggatgcactgagaagagtttttgaatgcatttcttcagggattattcttaaaggtagtcctggacttctggatccttgtgaaaaggatccctttgataccttggcaacaatgactgaccagcagcgtgaagacatcacatccagtgcacagtttgcattgagactccttgcattccgccagatacacaaagttctaggcatggatccattaccgcaaatgagccaacgttttaacatccacaacaacaggaaacgaagaagagatagtgatggagttgatggatttgaagctgaggggaaaaaagacaaaaaagattatgataacttttaaaaagtgtctgtaaatcttcagtgttaaaaaaacagatgcccatttgttggctgtttttcattcataataatgtctacattgaaaaatttatcaagaatttaaaggatttcatggaagaaccaagtttttctatgatattaaaaaatgtacagtgttaggtattatttgaatggaaagacacccnnnnnnnnnnntgtgctccgactagggggaaaacagtagttccgnnnnnnnnnnnnnnnnnnnnnnnnnnnnnctggttgccctagcttccccccctatttttgtgtcttttattaactagtgcattgtcttattaaatcttcactgtatttaatgcaggatgtgtgcttcagttgctctgtgtattttgatattttaatttagaggttttgtttgcttttt

SEQ ID NO: 183831 - DNA, 1336 bp, Homo Sapiens
  misc_feature (735)..(745): n is a, c, g, or t
  misc_feature (779)..(807): n is a, c, g, or t
ttgggtttttatattatatgtaatatttattttctgtttttgtgacttgttctatgtagctttttcagtctttaaaattttttcagtctttaaaattttagtttgaaaatgagtaattcctttggtaagctgttaaacacatttttatgttgtatttttaggctatggagttactagtagagaaagcaatcagcagtgcttctagccctcagagccctggggatgcactgagaagagtttttgaatgcatttcttcagggattattcttaaaggtagtcctggacttctggatccttgtgaaaaggatccctttgataccttggcaacaatgactgaccagcagcgtgaagacatcacatccagtgcacagtttgcattgagactccttgcattccgccagatacacaaagttctaggcatggatccattaccgcaaatgagccaacgttttaacatccacaacaacaggaaacgaagaagagatagtgatggagttgatggatttgaagctgaggggaaaaaagacaaaaaagattatgataacttttaaaaagtgtctgtaaatcttcagtgttaaaaaaacagatgcccatttgttggctgtttttcattcataataatgtctacattgaaaaatttatcaagaatttaaaggatttcatggaagaaccaagtttttctatgatattaaaaaatgtacagtgttaggtattatttgaatggaaagacacccnnnnnnnnnnntgtgctccgactagggggaaaacagtagttccgnnnnnnnnnnnnnnnnnnnnnnnnnnnnnctggttgccctagcttccccccctatttttgtgtcttttattaactagtgcattgtcttattaaatcttcactgtatttaatgcaggatgtgtgcttcagttgctctgtgtattttgatattttaatttagaggttttgtttgctttttgacactagttgtaagttactttgttatagatggtatcctttaccccttcttaatattttacagcagtacgtttttttgtaacgtgagactgcagagtttgtttttctatatgtgaaggattacaacacaaaaagttatcctgccattcgagtgctcagaactgaatgtttctgcagatcttgtggcatttgtctctagtgtgatatataaaggtgtaattaagacagagttctgtttattctaaatcaagtttgctgttagttgtgcattagcagtataaaagctaatatatactatatggtcttgcaacagttttaaagcctctgcataattgataataaaaattgcatgacattcttgtttttaatagacttttaaaa

SEQ ID NO: 183832 - DNA, 1974 bp, Homo Sapiens
  misc_feature (226)..(258): n is a, c, g, or t
  misc_feature (977)..(985): n is a, c, g, or t
  misc_feature (1400)..(1416): n is a, c, g, or t
ttgggtaattaatggagagaagtggatacatttgggacaagttttagggtagagttgattgaattttctaatataatttcccttatctaaaataaatataaaataaacagcaagtaatgtcattagcaaaaaacataaagtgagaaatgtgcattaaaatgatgtataacataaccatatttatttaagaatgtattccaatatcaaacagcaaatttcaacaatnnnnnnnnnnnnnnnnnnnnnnnnnnnnnnnnntacatgcacattttttcttgacgataatggaacctgatatacgtgaagttttgtatccttcacaatatattggtgagctttttcttgttaaaattctttggaagtataatttttttctggcagcttaaaattccatttcatagttttactataattgaatcatttgtaactgttggatgtttaggctttacttatttacttactgctataaagctgtgatgagcacatttattggcaaaaaacagacactctccactgctggtggtgaattatgttgatatgatttttcttcacatattaaatgatttgaaaatgttaatgtcctttccagtaattcaatttctaggagtctctccaaaggaccccaaactttttaattatattccatgctttgaactgtcttttccttaggatctaaacgctcttcccacagcaatgcttatttttatggcttcttcaagaacaagcgaatagttttgtttgacactctactagaagagtactctgtactaaacaaagacatccaggaggattctggcatggaaccccgcaatgaggaagaagggaacagtgaagaaataaaagctaaagttaaaaataagaaacaaggatgtaaaaatgaggaggtactcgctgtactaggccatgaactggggcactggaagttgggacatacagtcaaaaatatcattattagccagatgaattctttcctgtgnnnnnnnnnatttgctgtattaattggtcgaaaggagctttttgctgcatttggtttttatgatagccaacccactcttattggactattgatcatcttccagtttattttttcaccttacaatgaggttctttctttttgcctaacagtcctaagccgcagatttgagtttcaagctgatgcatttgccaagaaacttgggaaggctaaagacttatattctgctttaatcaaacttaacaaagataacttgggattccctgtttctgactggttgttctcaatgtggcattattctcatcctccactgctagagagacttcaagctttgaaaactatgaagcaacactgagatgtccaggatctgtgactgaagacatttctgattatttctgtcctggcagcatgttccagctcttgatgnnnnnnnnnnnnnnnnnagaagaaaaattaagtacagaaaagcccagatttaaatacatttaatatgtcattttaaaaatgattttaataattcatttcttaaaacactgaatgaattttgaagcttaatgtttttaaaggcatagttttatctttgacatctaatttaccatcaagttgtaaaattatttggaaaaatacagaactcgttttatttgtatacttatatggaatctgcatgtgaggtgtttgagggcatatgtttgaaagagggagcatcaccacaggaatcctttctgtgaggtggaaacagtggtcctgaatcattgtgctcacacctaacttgaaaatctggtcttactttcatgctgttatgatttcacctggtgaatcagtgttttaaataagaaaggtaatagttggtaaggccaatgttatttaaatgaaagtagttagaaaaatgctctcctattctaccaaatttttaatttctttcttccctttcttgctacacagtgatcaagagttttctcatagtgctttgaagttagaaattatgtataggatattttaaa

SEQ ID NO: 183833 - DNA, 1428 bp, Homo Sapiens
  misc_feature (621)..(629): n is a, c, g, or t
  misc_feature (1044)..(1060): n is a, c, g, or t
catggcttcaatcaacagactttggggttcttcatgaaagatgcaatcaagaaatttgttgtgactcagtgtattttgttgcctgtgtcttcacttctactttacattattaaaattgggggtgactatttttttatttatgcctggctgttcacattagttgtgtctctggttcttgtcacaatctatgctgactatattgcccctttatttgacaaattcacacctctgcctgagggaaagcttaaagaagaaattgaagtaatggcaaagagtattgactttcctttgacgaaggtgtatgttgtggaaggatctaaacgctcttcccacagcaatgcttatttttatggcttcttcaagaacaagcgaatagttttgtttgacactctactagaagagtactctgtactaaacaaagacatccaggaggattctggcatggaaccccgcaatgaggaagaagggaacagtgaagaaataaaagctaaagttaaaaataagaaacaaggatgtaaaaatgaggaggtactcgctgtactaggccatgaactggggcactggaagttgggacatacagtcaaaaatatcattattagccagatgaattctttcctgtgnnnnnnnnnatttgctgtattaattggtcgaaaggagctttttgctgcatttggtttttatgatagccaacccactcttattggactattgatcatcttccagtttattttttcaccttacaatgaggttctttctttttgcctaacagtcctaagccgcagatttgagtttcaagctgatgcatttgccaagaaacttgggaaggctaaagacttatattctgctttaatcaaacttaacaaagataacttgggattccctgtttctgactggttgttctcaatgtggcattattctcatcctccactgctagagagacttcaagctttgaaaactatgaagcaacactgagatgtccaggatctgtgactgaagacatttctgattatttctgtcctggcagcatgttccagctcttgatgnnnnnnnnnnnnnnnnnagaagaaaaattaagtacagaaaagcccagatttaaatacatttaatatgtcattttaaaaatgattttaataattcatttcttaaaacactgaatgaattttgaagcttaatgtttttaaaggcatagttttatctttgacatctaatttaccatcaagttgtaaaattatttggaaaaatacagaactcgttttatttgtatacttatatggaatctgcatgtgaggtgtttgagggcatatgtttgaaagagggagcatcaccacaggaatcctttctgtgagtggaaacagtggtcctgaatcattgtgctcacacctaacttgaaatctggtcttactttcatgctgttatgatttcacctgg

SEQ ID NO: 183834 - DNA, 1995 bp, Homo Sapiens
ttgggcttgactttgtgtctcttcaacaagaaaactctagagcccaagaaaatgctaagctttgtgaaacaaacattaaagaacttgaaagacagcttcaacagtatcgtgaacaaatgcagcaagggcagcacatggaagcaaatcattaccaaaaatgtcagaaacttgaggatgagctgatagcccagaagcgtgaggttgaaaacctgaagcaaaaaatggaccaacagatcaaagagcatgaacatcaattagttttgctccagtgtgaaattcaaaaaaagagcacagccaaagactgtaccttcaaaccagattttgagatgacagtgaaggagtgccagcactctggagagctgtcctctagaaacactggacaccttcacccaacacccagatcccctctgttgagatggactcaagaaccacagccattggaagagaagtggcagcatcgggttgttgaacagatacccaaagaagtccaattccagccaccaggggctccactcgagaaagagaaaagccagcagtgttactctgagtacttttctcagacaagcaccgagttacagataacttttgatgagacaaaccccattacaagactgtctgaaattgagaagataagagaccaagccctgaacaattctagaccacctgttaggtatcaagataacgcatgtgaaatggaactggtgaaggttttgacacccttagagatagctaagaacaagcagtatgatatgcatacagaagtcacaacattaaaacaagaaaagaacccagttcccagtgctgaagaatggatgcttgaagggtgcagagcatctggtggactcaagaaaggggatttccttaagaagggcttagaaccagagaccttccagaactttgatggtgatcatgcatgttcagtcagggatgatgaatttaaattccaagggcttaggcacactgtgactgccaggcagttggtggaagctaagcttctggacatgagaacaattgagcagctgcgactcggtcttaagactgttgaagaagttcagaaaactcttaacaagtttctgacgaaagccacctcaattgcagggctttacctagaatctacaaaagaaaagatttcatttgcctcagcggccgagagaatcataatagacaaaatggtggctttggcatttttagaagctcaggctgcaacaggttttataattgatcccatttcaggtcagacatattctgttgaagatgcagttcttaaaggagttgttgaccccgaattcagaattaggcttcttgaggcggagaaggcagctgtgggatattcttattcttctaagacattgtcagtgtttcaagctatggaaaatagaatgcttgacagacaaaaaggtaaacatatcttggaagcccagattgccagtgggggtgtcattgaccctgtgagaggcattcgtgttcctccagaaattgctctgcagcaggggttgttgaataatgccatcttacagtttttacatgagccatccagcaacacaagagttttccctaatcccaataacaagcaagctctgtattactcagaattactgcgaatgtgtgtatttgatgtagagtcccaatgctttctgtttccatttggggagaggaacatttccaatctcaatgtcaagaaaacacatagaatttctgtagtagatactaaaacaggatcagaattgaccgtgtatgaggctttccagagaaacctgattgagaaaagtatatatcttgaactttcagggcagcaatatcagtggaaggaagctatgttttttgaatcctatgggcattcttctcatatgctgactgatactaaaacaggattacacttcaatattaatgaggctatagagcagggaacaattgacaaagccttggtcaaaaagtatcagaagcctcatcacacttacagaacttgctgattctttgctgagccggttagtcccc

SEQ ID NO: 183835 - DNA, 1731 bp, Homo Sapiens
  misc_feature (158)..(233): n is a, c, g, or t
  misc_feature (408)..(534): n is a, c, g, or t
  misc_feature (1020)..(1052): n is a, c, g, or t
ttggcatctcttgatgtgtttattggccatttgtatatctttagtgaaatgtctgttcagatcctttgcccattttaattgggttatggagtttcttgggcttcttgaatatgtacattaatgtttttcatcaaatttgggaagtttcagccattatnnnnnnnnnnnnnnnnnnnnnnnnnnnnnnnnnnnnnnnnnnnnnnnnnnnnnnnnnnnnnnnnnnnnnnnnnnnnttatgtaaatatacatattttcatattacctttgcatatctgcccatatactttaaaccatctctagattgcttataatacctaatacaggcgtgagccaccgcgcccggcctatgctgcagattttttaaaacattatttagaattaatgtactaaaatgtaaactagtatctnnnnnnnnnnnnnnnnnnnnnnnnnnnnnnnnnnnnnnnnnnnnnnnnnnnnnnnnnnnnnnnnnnnnnnnnnnnnnnnnnnnnnnnnnnnnnnnnnnnnnnnnnnnnnnnnnnnnnnnnnnnnnnntcagggtctatagcagtgcccattccttctttaagaaaaatgttttaccaaatatgagaattgaccttttattattctgtcaacatttacatcttggtttgtttttaggcacttgctgctggaggagtagggtccattgttcgtgtcttgactgcaagaaaaactgtgtagtctggcaggaagtggattatctgcctcgggagtgggaattgctggtacaaagaccaaaacaaccaaatgccaccgctgccctgtggggtagcatctgtttctctcagctttgccttcttgctttttcatatctgtaaagaaaaaaattacatatcagttgtcctttaatgaaaattgggataatatagaagaaattgtgttaaaatagaagtgtttcatcctttcaaaaccatttcagtgatgtttataccaatctgtatatagtataatttacattcaagtttaattgtgcaacttttaacccctgttggctgnnnnnnnnnnnnnnnnnnnnnnnnnnnnnnnnnaactaatactgagagatttggtcagaatttgaggccagtttcctagctcattgctagtcaggaaatgatatttataaaaaatatgagagactggcagctattaacattgcaaaactggaccatatttcccttatttaataagcaaaatatgtttttggaataagtggtgggtgaataccactgctaagttatagctttgtttttgcttgcctcctgattatctgtactgtgggtttaagtatgctactttctctcagcatccaataatcatggcccctcaatttatttgtggtcacccagggttcagagcaagaagtcttgctttatacaaatgtatccataaaatatcagagcttgttgggcatgaacatcaaacttttgttccactaatatggctctgtttggaaaaaactgcaaatcagaaagaatgatttgcagaaagaaagaaaactatggtgtaatttaaactctgggcagcctctgaatgaaatgctactttctttagaaatataatagctgccttagacattatgaggtatacaactagtatttaagataccatttaatatgccccgtaaatgtcttcagtgttcttcagggtagttgggatctcaaaaggatttggttcagatccaacaaatacacattctgtgttttagctcagtgttttctaaaaaaa

SEQ ID NO: 183836 - DNA, 1628 bp, Homo Sapiens
  misc_feature (225)..(235): n is a, c, g, or t
  misc_feature (420)..(442): n is a, c, g, or t
  misc_feature (1029)..(1041): n is a, c, g, or t
gttgttatttgttaaccgatcttagtcttttccaattctgcttaaacattagaccatatatttcaaagtttacaaaacatttaacggcttccaatgtttcttagacaaagtacctgtactttgcaggattattatgcatacatggaaatgaccttcctatctctccaaaataagcttgaaattaaaatatgaaaaatttcacaaaacttggggcagacaaaattnnnnnnnnnnngctctaagttaaaattggtcatcaggccaaagagcaggcatatcctactaactttcgaccaggaagatttgttcctagctgaaaacattttagcctctctcagatgaagatagttctttcttctcctgtctatacagaaaaattacacatctctctcaataacactatttatcaaacttcagtgnnnnnnnnnnnnnnnnnnnnnnngtcctattctttatactgcctaacctgatgtttatgtaaggaaaaaaatatggaaagcatgcattcttctataaagtactaatgtttgacagggtttgctacatctttaacatttagtgtttccaacttatcttccctgaactctgcatccaaatataatattcctacctgccaagatataaaaaaggcacagatcatacaactttttttgctaatgaaaatgacaaatgtcacatcacacacatttcagggtccactaaaatactggaaaagtggaccaaaacataaactgacacaggacatgaaatgacatagcatttcatgaagacttctatacgagattgaaaacagaagtctaatatgattaccataaatgctatatattaagaaaaactgagaatgtactggtgaatgatcacccaatgcaggaaaatggtccaaattaacaaagaatatcactgctcagtactttagaaaataaaactaaaatctgcccctgaagtgctaagtagttttaaaagcaatgtttcaaattttaaggtatctttttgtgcaaatctgaaaattgttgcttatggccaataccnnnnnnnnnnnnnttcttagcataatttgtgttcatttcatgccctgtgccatcttgcctactatttgtctttggcctaacaaagttttctaatatggaataagaattacggaaatggtataggaaatataacttcagaattatgcagtttagggtactccattcacgagtggttgctgaccatccacgctgtctggcttctctttcttctggttacgatctttacccgtgcgcagccgactaccttcactggaggtattctgtaatgttttagtgtggacactcctttcattattgcagtcaactctgatctgaagggatccatctgttgttcttcctttagcctctcttggattacgtggacgattatctgttcgggagtgatcgtcgtttcctttgaagcctcctccacgtcctcttcctccttgtcctcttcctccccctccacgccgccgtccgtctcctctgcgcaggaagctctccctctcttcctctgttggagctaatgaccaatcactgagttcgtctctgtggtcagattctgaagtatatccaggaccgcgtctgccgtgccccctatttctgtaaggtctactccaa

SEQ ID NO: 183837 - DNA, 1441 bp, Homo Sapiens
ttggcccggcgccagcagggctgaagagaagatggaggagctggtggtggaagtgcggggctccaatggcgctttctacaaggcatttgtaaaggatgttcatgaagattcaataacagttgcatttgaaaacaagtgtattccagagcaaatgaaaaagagccttgctgttggtggttagctaaagtgaggatgataaagggtgagttttatgtgatagaatatgcagcatgtgatgcaacttacaatgaaattgtcacaattgaacgtctaagatctgttaatcccaacaaacctgccacaaaagatactttccataagatcaagctggatgtgccagaagacttacggcaaatgtgtgccaaagaggcggcacataaggattttaaaaaggcagttggtgccttttctgtaacttatgatccagaaaattatcagcttgtcattttgtccatcaatgaagtcacctcaaagcgagcacatatgctgattgacatgcactttcggagtctgcgcactaagttgtctctgataatgagaaatgaagaagctagtaagcagctggagagttcaaggcagcttgcctcgagatttcatgaacagtttatcgtaagagaagatctgatgggtctagctattggtactcatggtgctaatattcagcaagctagaaaagtacctggggtcactgctattgatctagatgaagatacctgcacatttcatatttatggagaggatcaggatgcagtgaaaaaagctagaagctttctcgaatttgctgaagatgtaatacaagttccaaggaacttagtaggcaaagtaataggaaaaaatggaaagctgattcaggagattgtggacaagtcaggagttgtgagggtgaggattgaggctgaaaatgagaaaaatgttccacaagaagaggaaattatgccaccaaattcccttccttccaataattcaagggttggacctaatgccccagaagaaaaaaaacatttagatataaaggaaaacagcacccatttttctcaacctaacagtacaaaagtccagaggggtatggtaccatttgtttttgtgggaacaaaggacagcatcgctaatgccactgttcttttggattatcacctgaactatttaaaggaagtagaccagttgcgtttggagagattacaaattgatgagcagttgcgacagattggagctagttctagaccaccaccaaatcgtacagataagaaaaaagctatgtgactgatgatggtcaaggaatgggtcgaggtagtagaccttacagaaatagggggcacggcagacgcggtcctggatatacttcaggaactaattctgaagcatcaaatgcttctgaaacagaatctgaccacagagacgaactcagtgattggtcattagctccaacagaggaagagaggga

SEQ ID NO: 183838 - DNA, 1299 bp, Homo Sapiens
  misc_feature (1210)..(1222): n is a, c, g, or t
ttgggctttctcgaatttgctgaagatgtaatacaagttccaaggaacttagtaggcaaagtaataggaaaaaatggaaagctgattcaggagattgtggacaagtcaggagttgtgagggtgaggattgaggctgaaaatgagaaaaatgttccacaagaagaggaaattatgccaccaaattcccttccttccaataattcaagggttggacctaatgccccagaagaaaaaaaacatttagatataaaggaaaacagcacccatttttctcaacctaacagtacaaaagtccagagggtgttagtggcttcatcagttgtagcaggggaatcccagaaacctgaactcaaggcttggcagggtatggtaccatttgtttttgtgggaacaaaggacagcatcgctaatgccactgttcttttggattatcacctgaactatttaaaggaagtagaccagttgcgtttggagagattacaaattgatgagcagttgcgacagattggagctagttctagaccaccaccaaatcgtacagataaggaaaaaagctatgtgactgatgatggtcaaggaatgggtcgaggtagtagaccttacagaaatagggggcacggcagacgcggtcctggatatacttcaggaactaattctgaagcatcaaatgcttctgaaacagaatctgaccacagagacgaactcagtgattggtcattagctccaacagaggaagagagggagagcttcctgcgcagaggagacggacggcggcgtggagggggaggaagaggacaaggaggaagaggacgtggaggaggcttcaaaggaaacgacgatcactcccgaacagataatcgtccacgtaatccaagagaggctaaaggaagaacaacagatggatcccttcagatcagagttgactgcaataatgaaaggagtgtccacactaaaacattacagaatacctccagtgaaggtagtcggctgcgcacgggtaaagatcgtaaccagaagaaagagaagccagacagcgtggatggtcagcaaccactcgtgaatggagtaccctaaactgcataattctgaagttatatttcctataccatttccgtaattcttattccatattagaaaactttgttaggccaaagacaaatagtagcaagatggcacagggcatgaaatgaacacaaattatgctaagaannnnnnnnnnnnnggtattggccataagcaacaattttcagatttgcacaaaagataccttaaaatttgaaacattgcttttaaaactac

SEQ ID NO: 183839 - DNA, 943 bp, Homo Sapiens
gccaactttgtacaaaaaagttggcttcggtttctggagctggccgtcaacatgtcctttcctaaggcgcccttgaaacgattcaatgacccttctggttgtgcaccatctccaggtgcttatgatgttaaaactttagaagtattgagaggaccagtatcctttcggaaatcacaaagatttaaacaacaaaaagaatctaaacaaaatcttaatgttgacaaagatactaccttgcctgcttcagctagaaaagttaagtcttcggaatcaaagaaggaatctcaaaagaatgataaagatttgaagatattagagaaagagattcgtgttcttctacaggaacgtggtgcccaggacaggcggatccaggatctggaaactgagttggaaaagatggaagcaaggctaaatgctgcactaagggaaaaaacatctctctctgcaaataatgctacactggaaaaacaacttattgaattgaccaggactaatgaactactaaaatctaagttttctgaaaatggtaaccagaagaatttgagaattctaagcttggagttgatgaaacttagaaacaaaagagaaacaaagatgaggggtatgatggctaagcaagaaggcatggagatgaagctgcaggtcacccaaaggagtctcgaagagtctcaagggaaaatagcccaactggagggaaaacttgtttcaatagagaaagaaaagattgatgaaaaatctgaaacagaaaaactcttggaatacatcgaagaaattagttgtgcttcagatcaagtggaaaaatacaagctagatattgcccagttagaagaaaatttgaaagagaagaatgatgaaattttaagccttaagcagtctcttgaggagaatattgttatattatctaaacaagtagaagatctaaatgtgaaatgtcagctgcttg

SEQ ID NO: 183840 - DNA, 1687 bp, Homo Sapiens
  misc_feature (137)..(216): n is a, c, g, or t
  misc_feature (1307)..(1316): n is a, c, g, or t
ttgggtaaaacttaagtcaatcaatccaccttgtgtgcctttttttggaatatatttaacaaatattctgaagaccgaagaagggaataatgattttttaaaaaagaaagggaaagatttaatcaatttcagtaagnnnnnnnnnnnnnnnnnnnnnnnnnnnnnnnnnnnnnnnnnnnnnnnnnnnnnnnnnnnnnnnnnnnnnnnnnnnnnnnngaggagattctttgaaaaccttaaccccatgggaagtgcatctgaaaaagagtttacagattatttgttcaacaagtcactagaaattgaacctcgaaactgcaaacagccacctcgatttcctaggaaatcaactttttccttaaaatctcctggaataaggcctaacacaggccgacatggctctacctcaggtactttacgaggtcacccaacaccattagaaagagaaccatgtaaaataagctttagtcggattgctgaaactgagctggaatcaacagtgtcagcaccaacctctccaaatacaccatctactccaccagtatctgcttcttcagaccttagtgtatttttagatgtggatctcaacagctcctgtggcagcaatagcatctttgctccagtgcttttgccacattcaaagtctttctttagttcatgtggtagtttacataaactaagtgaagagcccctgattcctcctcctcttcctcctcgaaaaaagtttgatcatgatgcttcaaattccaagggaaatatgaaatctgatgatgatcctcctgctattccaccgagacagcctcctcctccaaaggtaaaacccagagttcctgttcctactggtgcatttgatgggcctctgcatagtccacctccgccaccaccaagagatcctcttcctgatacccctccaccagttccccttcggcctccagaacactttataaactgtccatttaatcttcagccacctccactggggcatcttcacagagattcagactggctcagagacattagtacgtgtccaaattcgccaagcactcctcctagcacaccctctccaagggtaccgcgtcgatgctatgtgctcagttctagtcagaataatcttgctcatcctccagctccccctgttccaccaaggcagaattcaagccctcatctgccaaaactgccaccaaagacttacaaacgggagctttcgcaccccccattgtacagactgcctttgctagaaaatgcagaaactccccaatgaccttagccatatgtagtcattgacactggaatggtatttgtaaagnnnnnnnnnnaatttattcaaaaaaagacatagtattttagtactttttacaaataatgctcttacaaaaatgctactgatcaaataagcttttaagaattggaaaaataaaaatacaaaagtccttcaccattatcctcaggtgatcagtagcattgccttgtcttggatcctcagtgctgccaaaaggccagtataaagaatttatatttgcactgtaaactctgcaaaaatatggtttaaagtgacatgattgcactgaaaagggatagtgcttttgtgaaatttttcaaatttgagtaatagatgcctttttaaaggcagtgaatttacacaaatatgggagggtatatggtgttactgatttttaaacctctttga

SEQ ID NO: 183841 - DNA, 1600 bp, Homo Sapiens
  misc_feature (137)..(216): n is a, c, g, or t
  misc_feature (1307)..(1316): n is a, c, g, or t
ttgggtaaaacttaagtcaatcaatccaccttgtgtgcctttttttggaatatatttaacaaatattctgaagaccgaagaagggaataatgattttttaaaaaagaaagggaaagatttaatcaatttcagtaagnnnnnnnnnnnnnnnnnnnnnnnnnnnnnnnnnnnnnnnnnnnnnnnnnnnnnnnnnnnnnnnnnnnnnnnnnnnnnnnngaggagattctttgaaaaccttaaccccatgggaagtgcatctgaaaaagagtttacagattatttgttcaacaagtcactagaaattgaacctcgaaactgcaaacagccacctcgatttcctaggaaatcaactttttccttaaaatctcctggaataaggcctaacacaggccgacatggctctacctcaggtactttacgaggtcacccaacaccattagaaagagaaccatgtaaaataagctttagtcggattgctgaaactgagctggaatcaacagtgtcagcaccaacctctccaaatacaccatctactccaccagtatctgcttcttcagaccttagtgtatttttagatgtggatctcaacagctcctgtggcagcaatagcatctttgctccagtgcttttgccacattcaaagtctttctttagttcatgtggtagtttacataaactaagtgaagagcccctgattcctcctcctcttcctcctcgaaaaaagtttgatcatgatgcttcaaattccaagggaaatatgaaatctgatgatgatcctcctgctattccaccgagacagcctcctcctccaaaggtaaaacccagagttcctgttcctactggtgcatttgatgggcctctgcatagtccacctccgccaccaccaagagatcctcttcctgatacccctccaccagttccccttcggcctccagaacactttataaactgtccatttaatcttcagccacctccactggggcatcttcacagagattcagactggctcagagacattagtacgtgtccaaattcgccaagcactcctcctagcacaccctctccaagggtaccgcgtcgatgctatgtgctcagttctagtcagaataatcttgctcatcctccagctccccctgttccaccaaggcagaattcaagccctcatctgccaaaactgccaccaaagacttacaaacgggagctttcgcaccccccattgtacagactgcctttgctagaaaatgcagaaactccccaatgaccttagccatatgtagtcattgacactggaatggtatttgtaaagnnnnnnnnnnaatttattcaaaaaaagacatagtattttagtactttttacaaataatgctcttacaaaaatgctactgatcaaataagcttttaagaattggaaaaataaaaatacaaaagtccttcaccattatcctcacgtgatcagtagcattgccttgtcttggatcctcagtgctgccaaaaggccagtataaagaatttatatttgcactgtaactctgcaaaaatatggtttaagtgacatgattgcactgaaaagggatagtgcttttgtgaatttttcaaattt

SEQ ID NO: 183842 - DNA, 1863 bp, Homo Sapiens
ttggataatctttatttgcttacctgaccactttttattaagctgttttgtttaaaagcttttggttataggcatgaatattgttttgatggttaacttcactgacttatctgtaagtgtcattttatagtactttacagttgtcaaaaaaaatcttacatatattgatctagttgatcggtagaggaagcttgtgaagtaggtaggacaggttatgatgtcttcactgtatggacgtgaacccagggttctaataggttggcttgcccaaggtcacctgctagcttgtaaggtaggaatagggctcaaagtaaaacttttggttcagaagcttgactcataaactatactatatattcccaaaaatgtcagtattgacaacacagtctaactcttaaataaaattatgctaattagttacattcaaaataatgtttataaatttatttgtctatactagtagaagtgatcagtgacatactataaataatcctaaatggttatatttgatagaattcataacacattaaagagaaaatttcacattaaaggaaggtttaaaaatctattttcagattataaaaggtgtctttactggttttcattccttttatctacatgtaattggacatgtaaacttgttaaaaatcaaaatcttactgattgtacagggagaaattaagcattctgttttaaaaattaggcttattgctagactgtaagtttaaaaacaattcatgttcaaaggagcttttcaaattacccagtccaccacagaatcagctaatgtgacagaagtaaatatagtgcgtcataattgctaaaaacagggtgaatttctttcacttaagttggaaaaccagcctctaaaaaattaggtgctggtaatgagagcttaataccatggttccctgcaggtctcagaaacattagtagttcctttcttggccctcactgtccttccagtgttggcctctggcctcttcccctcacatttatgttcattctccgggcttatattcattctctgctgctttctcccttcacccgtgggactctcacccttcttgctcattctccagcacccattcctactttagtctctttgaaatcttttttggagattttccttcagctacaaatgttccagtacaaccaatattactcctgaggggcaaagactttttcatatttatgtccctagtatctggtatggcgcctggcatatggcatttcagaatatgttcatagttgaaacagtaggatagatatttgtcatcttgacaagtagccctttgcaatttatacttgagttcactcctggtcaatggcacatggctggaaaatgcagaaagcaagttcacttacagcctgaggcttataaagcttgtacagctgcctcccggcagtccaggaaaactgcaaaaaatgggaagtaaggtcctggcaggcagacccggcatgtagccgctggccatcttgaatcctagggcatgaagttgccccaaagttcagcacttggttaagcctgatccctctggtttatcacaaagaataggatgggataaagaaagtggacacttaaataagctataaattatatggtccttgtctagcaggagacaactgcacaggtatactaccagcgtttggatattgatatatacatggcaaatctgaatattgttttatgagaggcctggcaatgggtaaaacaccaaacttgaaatcagaacataggtgcaaatggccactcctgtagtttcttttctgtaaaatgggatctggacgaatgataccaaacgtttctttctaacattgtattttataactctggcctatgattgtgttgtgtcttgcatt

SEQ ID NO: 183843 - DNA, 816 bp, Homo Sapiens
ttggcgagaaggcgggggtgcagcagcctgtgtatgccaccattggctccggtatcgtcaacacggccttcactgtcgtgtcgctgtttgtggtggagcgagcaggccggcggaccctgcacctcataggcctcgctggcatggcgggttgtgccatactcatgaccatcgcgctagcactgctggagcagctaccctggatgtcctatctgagcatcgtggccatctttggctttgtggccttctttgaagtgggtcctggccccatcccatggttcatcgtggctgaactcttcagccagggtccacgtccagctgccattgccgttgcaggcttctccaactggacctcaaatttcattgtgggcatgtgcttccagtatgtggagcaactgtgtggtccctacgtcttcatcatcttcactgtgctcctggttctgttcttcatcttcacctacttcaaagttcctgagactaaaggccggaccttcgatgagatcgcttccggcttccggcaggggggagccagccaaagtgacaagacacccgaggagctgttccatcccctgggggctgattcccaagtgtgagtcgccccagatcaccagcccggcctgctcccagcagccctaaggatctctcaggagcacaggcagctggatgagacttccaaacctgacagatgtcagccgagccgggcctggggctcctttctccagccagcaatgatgtccagaagaatattcaggacttaacggctccaggattttaacaaaagcaagactgttgctcaaatctattcagacaagcaacagg

SEQ ID NO: 183844 - DNA, 763 bp, Homo Sapiens
gccaactttgtacaaaaaagttgggtatcgtcaacacggccttcactgtcgtgtcgctgtttgtggtggagcgagcaggccgggaccctgcacctcataggcctcgctggcatggcgggttgtgccatactcatgaccatcgcgctagcactgctggagcagctaccctggatgtcctatctgagcatcgtggccatctttggctttgtggccttctttgaagtgggtcctggccccatcccatggttcatcgtggctgaactcttcagccagggtccacgtccagctgccattgccgttgcaggcttctccaactggacctcaaatttcattgtgggcatgtgcttccagtatgtggagcaactgtgtggtccctacgtcttcatcatcttcactgtgctcctggttctgttcttcatcttcacctacttcaaagttcctgagactaaaggccggaccttcgatgagatcgcttccggcttccggcaggggggagccagccaaagtgacaagacacccgaggagctgttccatcccctgggggctgattcccaagtgtgagtcgccccagatcaccagcccggcctgctcccagcagccctaaggatctctcaggagcacaggcagctggatgagacttacaaacctgacagatgtcagccgagccgggcctgaggctcatatctccaaccagcaatgatgtccagaagaatattctggactaacggctcccggatttttaacaaaagctagactgttgctc

SEQ ID NO: 183845 - DNA, 1842 bp, Homo Sapiens
ttggcgctcgggtaggcaagcgtttgcctcagcatggagggcggggccgcggcagccacccccacagcactgccttactacgtggccttctcccagctgctgggcctgaccttggtggccatgaccggcgcgtggctcgggctgtaccgaggcggcattgcctgggagagcgacctgcagttcaacgcgcaccccctctgcatggtcataggcctgatcttcctgcagggaaatgccctgctggtttaccgtgtcttcaggaacgaagctaaacgcaccaccaaggtcctgcacgggctgctgcacatctttgcgctcgtcatcgccctggttggcttggtggcggtgttcgactaccacaggaagaagggctacgctgacctgtacagcctacacagctggtgcgggatccttgtctttgtcctgtactttgtgcagtggctggtgggcttcagcttcttcctgttccccggagcttcattctccctgcggagccgctaccgcccacagcacatcttctttggtgctaccatcttcctcctttccgtgggcaccgccctgctgggcctgaaggaggcactgctgttcaacctcgggggcaagtatagcgcatttgagcccgagggtgtcctggccaacgtgctgggcctgctgctggcctgcttcggtggggcggtgctctacatcttgacccgggccgactggaagcggccttcccaggcggaagagcaggccctctccatggacttcaagacgctgacggagggagatagccccggctcccagtgatgcgcccggccggccctgggggttcgcggggtgtcttcttgcctgcccctgctgaggcgtcttcaggactgcaggctccggagagtggctctggcagcaggcgggcgcgtgggtgcagctgcatctgtttgagtgctgctttctggggtcaggtctccgcctcctctgcttctcctttctccgctgctatagaccagttcattgtgtgtggctcccgtgtctctgttgcccccttcagtgcagaaggctttgggtaggacttcgggtgttcggtcctggtcgcagagcacagatctttaaagaagcgagagaggaggccccaccctcctggcagcagatgcctggggcaaggccaggggaaactgggggggcctcagggacaggcctggaaaggccacgatggctgctgaattcaaacaaggagtccctccagcctgaataacacgtggcacaaatgggcccggcctttggcagaggagcaagtgatatgatgtgtaaagtatgttggtggtgaaagcaaggttccccaggagaggggagggactggcccctgggaagctctgagatgaggctgtggcccagctgtagtcctgaccttcctcttctttaaccctttagccctaggatggctttggtgggagaggggatagaagcccatgacttcagacagactttctcttggcagatgcaggcgggcctcctcccaggctgctccagacatgggggttggggatggggggcaccttgcagccccttcctgctggggctccctccttgtagcaccccccttgcggctcagctctggtttcctctcccaggctcacccaggctctgctcaggctgggaggcagagggcacaaaccttataattttttaaatgaaaaaccgctgctgctggctgtggctagagccccctggggctgctggagctgctgcctctgttctggaggacgagccttctccttatctgctgcccatctttccaggaagtcaggatggagtcagaacaactacagtcatcccccgtggtgtctgcacatcactcccccataa

SEQ ID NO: 183846 - DNA, 1725 bp, Homo Sapiens
ttggctgggagtgcgcgcggtcggatcacaaggcggcggcggaggaggcccagagaccggagcgcggagacctcagccagcggcctacgcccaggcctttctccaccggaggaccagggaaccgcagtcttcatcacagaggtaccgtgctccgcgctccccgcctgacccggcccagcccgctgcggcggtgcctccttccttcctccttccctcgcgctctctctttcgcccgcccgcgccttccctgcccgcctgcgtcaccgcggccgccatggctgagaatggcgagagcagcggccccccgcgcccctcccgcggccctgctgcggcccaaggctcggctgctgccccggctgagcctaaaatcatcaaagtcacggtgaagactcccaaagagaaagaggagttcgcggtgcccgagaacagctcggttcagcagtttaaggaagcgatttcgaaacgcttcaaatcccaaaccgatcagctagtgctgatttttgccggaaaaatcttaaaagatcaagataccttgatccagcatggcatccatgatgggctgactgttcaccttgtcatcaaaagccagaaccgacctcagggccagtccacgcagcctagcaatgccgcgggaactaacactacctcggcgtcgactcccaggagtaactccacacctatttccacaaatagcaacccgtttgggttggggagcctgggaggacttgcaggccttagcagcctggggcttgagctcgaccaacttctctgagctccagagccagatgcagcagcagcttatggccagccctgagatgatgatccaaataatggaaaatccctttgttcagagcatgctttcgaatcccgatctgatgaggcagctcattatggctaatccacagatgcagcaattgattcagagaaacccagaaatcagtcacctgctcaacaacccagacataatgaggcagacactcgaaattgccaggaatccagccatgatgcaagagatgatgagaaatcaagacctggctcttagcaatctagaaagcatcccaggtggctataatgctttacggcgcatgtacactgacattcaagagccgatgctgaatgccgcacaagagcagtttgggggtaatccatttgcctccgtggggagtagttcctcctctggggaaggtacgcagccttcccgcacagaaaatcgcgatccactacccaatccatgggcaccaccgccagctacccagagttctgcaactaccagcacgaccacaagcactggtagtgggtctggcaatagttccagcaatgctactgggaacaccgttgctgccgctaattatgtcgccagcatctttagtaccccaggcatgcagagcctgctgcaacagataactgaaaacccccagctgattcagaatatgctgtcggcgccctacatgagaagcatgatgcagtcgctgagccagaatccagatttggctgcacagatgatgctgaatagcccgctgtttactgcaaatcctcagctgcaggagcagatgcggccacagctcccagccttcctgcagcagatgcagaatccagacacactatcagccatgtcaaacccaagagcaatgcaggctttaatgcagatccagcaggggctacagacattagccactgaagcacctggcctgattccgagcttcactccaggtgtgggggtggggg

SEQ ID NO: 183847 - DNA, 1246 bp, Homo Sapiens
  misc_feature (537)..(559): n is a, c, g, or t
  misc_feature (703)..(728): n is a, c, g, or t
aaatattttcaaagcaaacaagagtgctatgggtcagagtacagggattgtgtgggaaggtcaacaggaatttatcactttggtcatgcagaaagatttgcctccaaagttctgatttgtaataaattcttcttggctttagaaactaaaatgtaggctatgaaatgtgttagattcaggagatagagaccaatgaaacacaaaacaaataagggcttaataacgatgcaagtgctataagattatggtaaaaaataaaataagtatatgaaaagggcacgcatgaagaattgaaagaattcatccttggtaaattaggctaggtcttgtggcaaaggcacccaaagctaatgaagaagagtaaatgatatttgactgttacatatgtatataaggacgaaaaagaaaatataccaataaacatcttcatcaatatggaattaaatacatttacctattttagagatattttaagtatgctagtatcaacataatgagaatagtattttactgtctatttttaatagaaaaacatgnnnnnnnnnnnnnnnnnnnnnnnttaaggagcaccccttcccccatttgagtatgattactcaatgggaagcagtaatacaaatggaaaaatcttccctcctatattgaggaaagaagataaaataagattaagccatgtttagcactgagtattttaacacatggnnnnnnnnnnnnnnnnnnnnnnnnnnaataccatactttagattacaatacccaaaattctaaggtcctaatgttaatgatagtatctcaatgtccattttcggtttgtttcaacatgattttctccttttgcctctgtgtcacacgtagtctttcccgctggaaggtgcaggttttggatagggccttggtgttgggtaagaggttgtttttcggggacaggaacagcaaagtagggcacctcccagaaggcagagagaagcagcagcccagccagcgaagagagcctcaccaaattagtacttaaaaggaaaaacccatgtgcttgttaatcagcgaattattggcaacttttttaatataataaaaggaaaaaaaatcaataatcatcgtatttttttcatcgaaaataacccccgaatatccctcgggaagtactttaagatttttgaacatatacgccaaagaatgtttatattgcaacaggtgacaatttgcaatagtagatcaggaaataacacatgtaataccaggttaattccaa

SEQ ID NO: 183848 - DNA, 1513 bp, Homo Sapiens
ctttgtacaaaaaagttggctaaaatagttaaatgtatttaattccatattgatgaagatgtttattggtatattttctttttcgtccttatatacatatgtaacagtcaaatatcatttactcttcttcattagctttgggtgcctttgccacaagacctagcctaatttaccaaggatgaattctttcaattcttcatgcgtgcccttttcatatacttattttattttttaccataatcttatagcacttgcatcgttattaagcccttatttgttttgggtttcattggtctctatctcctgaatctaacacatttcatagcctacattttagtttctaaagccaagaagaatttattacaaatcagaactttggaggcaaatctttctgcatgaccaaagtgataaattcctgttgaccttcccacacaatccctgtactctgacccatagcactcttgtttgctttgaaaatatttgtccaattgagtagctgcatgctgttcccccaggtgttgtaacacaactttattgattgaatttttaagctacttattcatagttttatatccccctaaactacctttttgttccccattccttaattgtattgttttcccaagtgtaattatcatgcgttttatatcttcctaataaggtgtggtctgtttgtctgaacaaagtgctagactttctggagtgataatctggtgacaaatattctctctgtagctgtaagcaagtcacttaatctttctacctcttttttctatctgccaaattgagataatgatacttaaccagttagaagaggtagtgtgaatattaattagtttatattactctcattctttgaacatgaactatgcctatgtagtgtctttatttgctcagctggctgagacactgaagaagtcactgaacaaaacctacacacgtaccttcatgtgattcactgccttcctctctctaccagtctatttccactgaacaaaacctacacacataccttcatgtggttcagtgccttcctctctctaccagtctatttccactgaacaaaacctacgcacataccttcatgtggctcagtgccttcctctctctaccagtctatttccattctttcagctgtgtctgacatgtttgtgctctgttccattttaacaactgctcttacttttccagtctgtacagaatgctatttcacttgagcaagatgatgtaatggaaagggtgttggcattggtgtctggagacctggatttgagtcttggtgctatcaatcaccgtctgtgtttgagcaaggcatttggctgctgtaagcttattgcttcatctgtaagcggtggtttgtaattcctgatcttcccacctcacagtgatgttgtggggatccagtgagatagaatacatgtaagtgtggttttgtaatttaaaaagtgctatactaagggaaagaattgaggaattaactgcatacgttttggtgttgcttttcaaatgtttg

SEQ ID NO: 183849 - DNA, 1604 bp, Homo Sapiens
  misc_feature (814)..(870): n is a, c, g, or t
gcggggccagggggtgagtggctctcgtcgctttggccgcgcccttgaccctgcccccccagccctgcctcacctgatctgccctttgacctcagtcaggtcgcctacactgactgtctcgaagatccctgtgttgaggtcccatgccaccttgaggctggtgtgataggtctttggtcggagctggccctcctcagtgggggacgggaaggccaggagcagcaggccaatgttgatgaggacctggttggtttctgggcagacctccagaatgacgatgtcatagtcgctgaaagaacagaactgatggccccaggtagcgtcgtggcggatgacctcattgataacatattcgaagtctagtgtgagctgctccactgtcaggtactggccctggacagcagtccgctcccgcatgggccgcaggttgcggccacgaagatcagtcaccacgaagggcagggagatcttgtcgtcctccaactcatcctccggctccgtcccctctccggactccagcacatagtacagcttggtgtagttgacatagccaggctcggaggcaggtgcctccgaggcaggggggctgtcccggggtgccgtctctccacacagggctaggggctcagagtgcgcacggcagcggctgccagagggtcctgggcacagggcaggccgggcttcctcagggaccccgcccttggcctctttggcccggcggaagatgtcagccacaaactccttggctttggcaatggcgggcgagggctcaggagacccagaagaacgggctggggccgcctcagggcagaannnnnnnnnnnnnnnnnnnnnnnnnnnnnnnnnnnnnnnnnnnnnnnnnnnnnnnnncagggggcaggtgctgtggtcatacaggatttggcagaaactcctgtcacctgccgagtggacggagacggcgcaggccaccagggagtagctggtgttgagcagcaccacctggtccttcttgagctggaaggcgggctggaaggtggggaaggggtagaccacctggtacttggtgtgcagcatgaagccatgccgtaggcactgtgcattcgggtctcctgggtgggctcggctggcatcctggcaagcagcacagcggcctggcggtggcacggccacggtgctgacgtagatgtcacggtggttctcgtcactcatcatcatcatgttcatgagcatcccgttggccgagcgggtgttgaagccgaagacgatgaccttggaggcgtcgctgggccactcgcatacggtcaggtacaggtcgctgtagatctcctcgtcctggaatagccgaacctgccggaccagcttgagcttgctgtgaacgttgaactcccaccagtacagatggtagatgtagaaggagaagtagtcatccccactgctgctggtgtaggagaggacgtagcggccgcatttggaaaagcccaggaagatatgtcctgcatagaggaagtcctcatccacaatgttcttgagggacacgcacacccggggaggcagcttccggaagaggcgaggggagagctgtccgctgatcttgacccgctccagctgcttgaggacgtgct

SEQ ID NO: 183850 - DNA, 1635 bp, Homo Sapiens
ttggtttcaaatgatttgaaaggagaactagatgaatatgtccaaaaatacctccctggaaaaattaaagtcataagaaatacaaagcgtgaggggttgattcgagggagaatgattggcgcggcccacgcgacaggagaagtccttgtgttcctggacagccactgtgaagtgaatgtgatgtggctgcagcccttgctggccgccatccgtgaggaccggcacaccgtggtgtgcccagtgattgacatcatcagcgccgacacgctggcctacagctcgtcccctgtcgtccgcggagggttcaactggggactgcacttcaaatgggatcttgtccccctttctgagctaggacgagcggagggagccactgcaccaataaagtcaccaacaatggctggaggtttgtttgccatgaacagacagtatttccatgaacttggacagtatgatagtggcatggatatctggggaggagaaaatttggaaatatcatttcggatctggatgtgtggcggtaagctcttcatcatcccttgctctagagtaggacacattttccgaaaaaggcgaccatatggatctcccgaaggccaggacaccatgacacacaactctttgcggctggcacatgtctggttggatgaatacaaggagcagtatttttccttaagacctgacctgaagacgaaaagctatggcaatatcagtgagcgtgtggaactgagaaagaagttgggctgtaaatcatttaaatggtatttggataatgtatacccagagatgcagatatctgggtcccacgccaaaccccaacaacccatttttgtcaatagagggccaaaacgacccaaagtccttcaacgtggaaggctctatcacctccagaccaacaaatgcctggtggcccagggccgcccaagtcagaagggaggtctcgtggtgcttaaggcctgtgactacagtgacccaaatcagatctggatctataatgaagagcatgaattggttttaaatagtctcctttgtctagatatgtcagagactcgctcatcagacccgccacggctcatgaaatgccacgggtcaggaggatcccagcagtggacctttgggaaaaacaatcggctataccaggtgtcggttggacagtgcctgagagcagtggatcccctgggtcagaagggctctgtcgccatggcgatctgcgatggctcctcttcacagcagtggcatttggaaggttaaggtggatgctgtggcgggaacgttgcttcatcaggcgttgcctccggtgtggagtttggggctttaggaaagcctgggttgggtggagcagaaccatcttggagaagatgacagttccctgtcctcccggagatgcctgggtgtgttagcagaggtgacacgtgtctgacagagacgggagctctgagtgtccacgggtgaagaagtgagtgtccacgggtgaagaagtgagtatgtttcacctggacattaagtgatgtttgagctgctgttaaggaatttcttgcttatagaggcaaaccacagtatcattttaactcctaaaattgggcttgtacagaaagaataaacccaaggaaaatggatattctattccgatttatt

SEQ ID NO: 183851 - DNA, 1113 bp, Homo Sapiens
  misc_feature (421)..(509): n is a, c, g, or t
  misc_feature (715)..(731): n is a, c, g, or t
ctttgtacaaaaaagttgggatgctaagacccccgaggactgggatgaagagatggacggagagtgggaacccccagtgattcagaaccctgagtacaagggtgagtggaagccccggcagatcgacaacccagattacaagggcacttggatccacccagaaattgacaaccccgagtattctcccgatcccagtatctatgcctatgataactttggcgtgctgggcctggacctctggcaggtcaagtctggcaccatctttgacaacttcctcatcaccaacgatgaggcatacgctgaggagtttggcaacgagacgtgggtcttatcaaaggcagcagataaacaaatgaaggacaaacaggacgaggagcagaggcttaaggaggaggaagaagactagaaacgcaaagaggannnnnnnnnnnnnnnnnnnnnnnnnnnnnnnnnnnnnnnnnnnnnnnnnnnnnnnnnnnnnnnnnnnnnnnnnnnnnnnnnnnnnnnnntccccggccaggccaaggacgagctgtagagaggcctgcctccagggctggactgaggcctgagcgctcctgccgcagagcttgccgcgccaaataatgtctctgtgagactcgagaactttcatttttttccaggctggttcggatttggggtggattttggttttgttcccctcctccactctcccccaccccctccccgcccnnnnnnnnnnnnnnnnnaaactggtattttatctttgattctccttcagccctcacccctggttctcatctttcttgatcaacatcttttcttgcctctgtccccttctctcatctcttaactcccctccaacctggggggcagtggtgtggagaagccacaggcctgagatttcatctgctctccttcctggagcccataggagggcagcaaaagggggtggtgtctccaaccccccagcactgaggaagaacggggctcttctcatttcacccctccctttctcccctgcccccaggactgggccacttctgggtggggcagtgggtcccagattggctcacactgagaatgtaagaactacaaacaaaatttctattaaattaaattttgtgtctc

SEQ ID NO: 183852 - DNA, 3170 bp, Homo Sapiens
  misc_feature (2055)..(2106): n is a, c, g, or t
  misc_feature (2964)..(2972): n is a, c, g, or t
ttggtgccttgccagtacatgctgcagacaatgaaggatgagcaagttttctacattcaatacttgaagtccatggcattttcagtgtactgccagtgcaggcgaccactgcctacacagatccacattaaatccctcacgggatttgggcctgcagccagcattgagatgaccctcaagaaccctgagcggcccagcccaatccagctttactcccctccctttatattggccccaatcaaagacaagcagacagagctgggagagacgtttggtgaggcgagccagaaatacaatgtgctcttcgtgggctattgtctgtctcacgaccagcgctggcttttggcttcctgcactgacctccatggggaattattagagacctgcgttgtaaatattgctttaccaaacaggtcacggaggagtaaagtatctgcacgtaaaattggactacagaagttatgggagtggtgcatagggattgtccaaatgacatctctaccctggagagttgtaatcgggcgacttgggcgtcttggccatggggagcttaaagattggagtatcctccttggagaatgttcactacagacaatcagcaaaaagctcaaggatgtgtgccggatgtgtggaatctctgccgcagactctccttctatccttagtgcctgcctggttgccatggagccccaggggtcctttgtagtgatgccagatgctgtcacaatgggctctgtttttggccgaagtactgcactgaacatgcagtcatctcagctcaacacccctcaagatgcttcttgtacacacatcttggtgttcccaacatcatcaaccatccaggtggctccagccaactaccccaatgaagatgggtttagccccaacaatgatgatatgtttgttgaccttccattcccagatgatatggacaatgatattggcatattaatgactgggaacctccattcctctcccaactcttccccagtaccctccccaggctctccttctggaattggtgtgggctctcacttccagcatagtcggagccagggtgagcgtcttctttctagagaagcaccagaggagctaaagcagcagcccctggcccttgggtattttgtatcaactgccaaagctgagaatcttccccagtggttttggtcatcgtgtccccaggctcaaaaccagtgccctctcttcttaaaggcttcgctgcatcaccacatttcagtagcacagacagacgaacttctgcctgccaggaattctcagcgggttccacaccctcttgactccaaaaccacgtcggatgttttaaggtttgttttggagcagtacaacgctctgtcctggctcacgtgcaatccggccacccaggaccgtacttcctgccttcccgtccactttgtggtgctcactcagttgtacaatgccatcatgaatatactttaattggaaaagcacttgttctctctggctcagttccttctccctgcaacctcagtccaaggaacctgctacactctgcaaataacccacatccttttcttcagaccactctccacagtcctgcactgtgattccttctcagcaggcacatgtcaattctgcagtgttcattaccagagtgactccttgacacttctctcatggacctggaaacttccataagtggtgactttcagccagtgcggtggtgtgtgtagccccaaccactggtccccaggaagtggtggtggttgatggcttttcagcgggaaacagaagagacagtgtccttttgcacaagagtctgtgttttcagcctctgtatacaattgagggcagtctagccctttggatgaaatcctcttagttactggtgtatggcctgtgggttacctgaactccataatctgggactttttaaaaataagaaccagctcaagtacatggtttcatactggggtttctgtctccctagtgttcccatccagattagcatgagtgctttggttgacttcaaacctgtgtgtcaatgcagaaggtctggagacagcttcattttgnnnnnnnnnnnnnnnnnnnnnnnnnnnnnnnnnnnnnnnnnnnnnnnnnnnnaattcacaaggaccaggtacagtagctgaaacccaattcagatccaccataggattctttgactacatacctctgtcctagaagccggaaaaggagtaaaaacacattggggagatcatgcctaaaagtaatatattcaaaaccacccagcagtaggttttgttaacaacaaactggattttaaaagttctgccatgttaagtggccagcatttcatgaaggataacatttttatacagaaggcagtcaagctcaactcagagccatggaggcaagtaccttaattagttttatatagtcacaacggaaatatattttctagtgaattcttattggaagccaggtctctcctctcattagatcaaaagggacttatgtacatacaacaattgaaagtgtttgctcatgaaatcagttataaatatggtgaattttttctggaccataggaatattatttcaaagaaatattacaacttaaccattaaattagtacttgaagttgagcctttgtggtgggactttttaaaaaaatgcctttttaaagcattaatggctaattgaagtattttatgactcctcattcctggcccagagggttgtctttgaaaccctgtttctaacccttgtgttgtgtgtttctgtctgaggacagtgggtgtgtactggcctcccgggagccactgtgaccaggcctttgagctcttgtcatctgtggagagaatcatgcaaattttaaaagttcttccaagagacttccatgtcctggttattaacaaaaaaggaaaaatgtaataattgatatgattttgtaaaagtatttttcttgaaataatctaaagtttaaaacattatattnnnnnnnnngttgtgtggtgggaatgtgaaagcagagaaataacttgtaaatggataattttgttctctgtaccaccagttgaaagggggttgactttcgcaatgtataggataaaaaatctgatatatcaaaccatttgtatctaatgtgtacagtgtaaaattgactttaaaaatattgcagtgctattttttcttaatcagaaa

SEQ ID NO: 183853 - DNA, 1198 bp, Homo Sapiens
  misc_feature (206)..(222): n is a, c, g, or t
  misc_feature (989)..(998): n is a, c, g, or t
ttggctttgttgatacgtaaattgtcttggggtttacggaaattaactattatgtttgcactaagatttgctgggagtggtaggtggacatatctatatatcaataaggactaaccgtcttttttgtacataggagattgataatactgtatttgttttaagcccacagtgttttactccactttcaaaaagatcaatttggcacnnnnnnnnnnnnnnnnnaatggaaataagatttggtctctcattttaggttaaatgataactagaaagattaaactagacagatagtttaggtggagtatatttttaaaactcagaacatgtatattggtcctgtgttaccaagtttatatgtgacagttgaaaaagaaattcccttgaaatgatcatgaggttaaaattttcttcattaggggacttggagaaccagtagtcgtaagattagttgatagtttcactcccaagcaatgaattgcttctgtgtgtttccctgtaggactcaatagtaaatgctgtctgtcttacacatttataaggaccctgcaagacgacgacaaaggcctttggcctgtgctactaaacaagaagcctatgaaaaatttcttctttaaacttgttttttctctttccagtaagttcacatttggataattttaaaaagaaaagtaattacctttgtgtttccagaacactataattggggtgtatcttaattcagttaaatattattagtagacctggattttcccccttgaccccatcagtctataaaggttaaactgcaacttttatgaaatggtctttaatatttccacaataatcctgtgctatatttgttttaagaaacaaagtaactctatacacttcaagactttacaggattttttaaatcctgtattgttggatcaattaataaagatgcaaaaaaactttatagagatgtaaaaacaaaactataatggatctcctatttttctttaaatacnnnnnnnnnnggtaaatgaactattctccttgtaaagctaaattccccattctgtctaataaaggaagactgaaaaaaggttttaaagaacataaatggaaagatacaaatgctttgaaggaataaacgaaatgttaaacagggtcaatccatttgaagaaaaagttggacaaataatcagcattgctccctctttatttaatatttggg

SEQ ID NO: 183854 - DNA, 620 bp, Homo Sapiens
  misc_feature (159)..(169): n is a, c, g, or t
ttggatttgttttaacaaacaaagtaactctatacacttcaagactttacaggattttttaaatcctgtattgttggatcaattaataaagatgcaaaaaaactttatagagatgtaaaaacaaaactataatggatctcctatttttctttaaatacnnnnnnnnnnnggtaaatgaactattctccttgtaaagctaaattccccattctgtctaataaaggaagactgaaaaaaggttttaaagaacataaatggaaagatacaaatgctttgaaggaataaacgaaatgttaaaacagggtcaatccatttgaagaaaaagttggacaaaataatcagcattgctccctcttttatttaatatttgggtactgattatatccacatggaagtagaaggtaaggagtttaggaaaatactagaatctactctgcttacattcttgtttaagtgtttacacagtttggttcaattataaacatttggccttttactatgttatttttattttgtatgaatacattatcctccttatttatttttgttagatttattacttatgttattttgttatgcatttacaactccatttttaaataaagtgtttctggaacttt

SEQ ID NO: 183855 - DNA, 3309 bp, Homo Sapiens
ttggcgccattgtgcttcgctgccgactgcatttcctcagtcacgggcctagaactccaaggagaaaggcggcggtgcgtgttgctgcgagtgggacgcgcactggtcggtgccggctcaggagccgggaaaaatctttaagaatggagtctaaaccttcaaggattccaagaagaatttctgttcaaccttccagctccttaagtgctaggatgatgtctggaagcagaggaagtagtttaaatgatacctatcactcaagagactcttcatttagattggattctgaatatcagtctacatcagcatcagcatctgcgtcaccatttcaatctgcatggtatagtgaatctgagataactcagggagcacgctcaagatcgcagaaccagcaacgggatcatgattcaaaaagacctaaactttcctgtacaaactgtactacctcagctgggagaaatgttggaaatggtttaaacacattatcagattcatcttggaggcatagtcaagttcctagatcttcatcaatggtacttggatcatttggaacagacttaatgagagagaggagagatttggagagaagaacagattcctctattagtaatcttatggattatagtcaccgaagtggtgatttcacaacttcatcatatgttcaagacagagttccttcatattcacaaggagcaagaccaaaagaaaactcaatgagcactttacagttgaatacatcatccacaaaccaccaattgccttctgaacatcagaccatactaagttctagggactccagaaattctttaagatcaaatttttcttcaagagaatcagaatcttcccgaagcaatacgcagcctggattttcttacagttcaagtagagatgaagccccaatcataagcaattcagaaagggttgtttcatctcaaagaccatttcaagaatcttctgacaatgaaggtaggcggacaacgaggagattgctgtcacgcatagcttctagcatgtcatctacttttttttcacgaagatctagtcaggattccttgaatacaagatcattgaattctgaaaattcttacgtttctccaagaatcttgacagcttcacagtcccgtagtaatgtaccatcagcttctgaagttcctgataatagggcatctgaagcttctcagggatttcgatttcttaggcgaagatggggtttgtcatctcttagccacaatcatagctctgagtcagattcagaaaattttaaccaagaatctgaaggtagaaatacaggaccatggttatcttcctcacttagaaatagatgcacacctttgttctctagaaggaggcgagagggaagagatgaatcttcaaggatacctacctctgatacatcatctagatctcatatttttagaagagaatcaaatgaagtggttcaccttgaagcacagaatgatcctcttggagctgctgccaacagaccacaagcatctgcagcatcaagcagtgccacaacaggtggctctacatcagattcggctcaaggtggaagaaatacaggaatatcagggattcttcctggttccttattccggtttgcagtccccccagcacttgggagtaatttgaccgacaatgtcatgatcacagtagatattattccttcaggttggaattcagctgatggtaaaagtgataaaactaaaagtgcgccttcaagagatccagaaagattgcagaaaataaaagagagcctccttttagaggactcagaagaagaagaaggtgacttatgtagaatttgtcaaatggcagctgcatcatcatctaatttgctgatagagccatgcaagtgcacaggaagtttgcagtatgtccaccaagactgtatgaaaaagtggttacaggccaaaattaactctggttcttcattagaagctgtaaccacctgtgaactatgtaaagagaagttggagcttaacctggaggattttgatattcatgaactacatagagctcatgcaaatgaacaagctgagtatgagtttatcagctctggtctctacctagtggtgttattgcacttgtgcgaacaaagcttttctgatatgatgggaaatacaaatgaaccaagcacacgtgtccgatttattaaccttgcaagaactcttcaggcacatatggaagatctcgaaacttcagaggatgattccgaagaagacggagaccataacaggacatttgatattgcctaacttcatataagacagatggatgatctgtgaacataagtgtttattaaaaatggcaattaaatataaattacttttgtgggggaatgcctaataaatacattgactatatataaaatgaatatatacatacacatgtatgcctgtatatatatattcattctccagtgttgctgaattaaaattctgctggactttttaacatagcaaatccgatgtttataaactggtaatcaaaaaggttttttcttttaggtgagtgggaaagtattacccttgttttaaatatctaagcaatgcctatcaacccttttttgtgttatgattactgtagtcatatttatgaaaaaaggtttgtgttttactcttgctagtgagaaaagtgggacaaaatatacttttgaaataaaatgctatatggcacctaattattttttcttttaaaatgccttaagttgcagtctcattttgataatcatttgcttccagtgtttaaaaattaaaaaaagaatggggagaaggttatgagaagagcattattaagtttccaaatttaatttgaattccaaattcacctagcaataaaatctaatttttaaaaagtatataaatataaaatgtataaatgatggatagatttttgtattgatttgcaaaatgcagattatatttgataggctatagtatgtagatattccttttaggaatattacagctgtaaattatatgagacttgccagtcaaatgctatttggtttaaaaaaattattgcaatctcaagttaatggaatatttttaaatcccacattcagagtttaaaacactggttttcaatgtgttttttagtgttgtcacttgtttatagataaatatataaataacctgtttggatcctggtcctttttaactgttccttggtaaattctgagccatttatttgatgacttaatatttttcactacctttggagaacagatgaacattattcacccatgaatggatctatactgtgtggccatgagttgtgtatacttccataacactgtattttttc

SEQ ID NO: 183856 - DNA, 1196 bp, Homo Sapiens
  misc_feature (1050)..(1087): n is a, c, g, or t
actttgtacaaaaaagttggcttgaagtttctggaagaaaattgggaaggttccctcaagtccaagcttttgttaggagtgataaacccaaactgttcagaggactgcaaatcaagtatgtccgtggttcagaccctgtattaaagcttttggacgacaatgggaacattgctgaagaactgagcattctcaaatggaacacagacagtgtagaagaattcctgagtgaaaagttggaacgcatataaatcttgcttaaattttgtcctatccttttgttaccttatcaaatgaaatattacagcacctagaaaataatttagttttgcttgcttccattgatcagtcttttacttgaggcattaaatatctaattaaatcgtgaaatggcagtatagtccatgatatctaaggagttggcaagcttaacaaaacccattttttataaatgtccatcctcctgcatttgttgataccactaacaaaatgctttgtaacagacttgcggttaattatgcaaatgatagtttgtgataattggtccagttttacgaacaacagatttctaaattagagaggttaacaagacagatgattactatgcctcatgtgctgtgtgctctttgaaaggaatgacagcagactacaaagcaaataagatatactgagcctcaacagattgcctgctcctcagagtctctcctatttttgtattacccagctttctttttaatacaaatgttatttatagtttacaatgaatgcactgcataaaaactttgtagcttcattattgtaaaacatattcaagatcctacagtaagagtgaaacattcacaaagatttgcgttaatgaagactacacagaaaacctttctagggatttgtgtggatcagatacatacttggcaaatttttgagttttacattcttacagaaaagtccatttaaaagtgatcatttgtaagaccaaaatataaataaaaagtttcaaaaatctatctgaatttggaattcttctggtttgttctttcatgtttaaaaatgatnnnnnnnnnnnnnnnnnnnnnnnnnnnnnnnnnnnnnnaaccaaaatgtaaaaatggctgtaatatttaaaacttataacatcttattgttggtaatagtgctttatatttgtctgattttatttttcaaagttttttcatttatga

SEQ ID NO: 183857 - DNA, 1368 bp, Homo Sapiens
ttggatcagaaacgtctgcagggatgatgccctgaagaatctctcgcacactcctgtctccaagtttgtcctggaccgaatatttgtctgtgacaagcacaagattcttttctgccagactcccaaagtgggcaacacccagtggaagaaagtgctgattgttctaaatggagcattttcttccattgaggagatccccgaaaacgtggtgcacgaccacgagaagaacggccttcctcggctctcttccttcagtgatgcagaaattcagaagcgattgaaaacatacttcaagttttttattgtaagagatcccttcgaaagacttatttctgcatttaaggataaatttgttcacaatccccggtttgagccttggtacaggcatgagattgctcctggcatcatcagaaaatacaggaggaaccggacagagacccgggggatccagtttgaagatttcgtgcgctacctcggcgatccgaaccacagatggctagaccttcagtttggggaccacatcattcactgggtgacgtatgtagagctctgtgctccctgtgagataatgtacagtgtgattggacaccacgagaccctggaggacgatgccccatacatcttaaaagaggctggcattgaccacctggtgtcatacccgactatccctccgggcattaccgtgtataacagaaccaaggtggagcactatttcctgggcatcagcaaacgagacatccgacgcctgtatgcccgtttcgaaggggactttaagctctttgggtaccagaaaccagactttttgctaaactaatgcataagacctatgaattcaaatatctttattagacctggggctaaccaggtgaagatctgagcccagaaatgacccttcctccaccacacccctcctttgaggacgcccggggtctcccacaggcctgtgagttgcctcggcatatgacgcagaaccccaactgttacaacttagtttggatgtaagatgctctgaggaccctgcccacacccctgcgtgcattaggatgtcgctggcctttgctcacctcagaggggagaaaaggctaaagatttgcagtttgacagcccagcagggaggaagcatcacacagcgttaggagccgtttccttcaggtgttaaggaaggggatgcccctgaggttctcctggctagtcagggtggcttcacccatcactggtgggttgcagaacagcacccaggactctgaggagggacagagaagcaagggggctgctgaaatcgcagagacttttgcagcatcagatctgaggagtaaaacggcacctctggccttcatcttggtgctgcgacaattgtggaggcaaagc

SEQ ID NO: 183858 - DNA, 1834 bp, Homo Sapiens
  misc_feature (1287)..(1299): n is a, c, g, or t
ttggctcacctttctgagaagggggccttttgagctagaagctttctattctgatccccaaggagttccatatccagaagcaaaaataggccgctttgtagttcagaatgtttctgcacagaaagatggagaaaaatctagagtaaaagtcaaagtgcgagtcaacacccatggcattttcaccatctctacggcatctatggtggagaaagtcccaactgaggagaatgaaatgtcttctgaagctgacatggagtgtctgaatcagagaccaccagaaaacccagacactgatgcaaatgaaaaaaaagttgaccagcctccagaagctaaaaagcccaaaataaaggtggtgaatgttgagctgcctattgaagccaacttggtctggcagttagggaaagaccttcttaacatgtatattgagacagagggtaagatgataatgcaagataaattggaaaaagaaaggaatgatgctaaaaatgcagttgaggaatatgtgtatgagttcagagacaagctgtgtggaccatatgaaaaatttatatgtgagcaggatcatcaaaattttttgagactcctcacagaaactgaagactggctgtatgaagaaggagaggaccaagctaaacaagcatatgttgacaagttggaagaattaatgaaaattggcactccagttaaagttcggtttcaggaagctgaagaacggccaaaaatgtttgaagaactaggacagaggctgcagcattatgccaagatagcagctgacttcagaaataaggatgagaaatacaaccatattgatgagtctgaaatgaaaaaagtggagaagtctgttaatgaagtgatggaatggatgaataatgtcatgaatgctcaggctaaaaagagtcttgatcaggatccagttgtacgtgctcaggaaattaaaacaaaaatcaaggaattgaacaacacatgtgaacccgttgtaacacaaccgaaaccaaaaattgaatcacccaaactggaaagaactccaaatggcccaaatattgataaaaaggaagaagatttagaagacaaaaacaattttggtgctgaacctccacatcagaatggtgaatgttaccctaatgagaaaaattctgttaatatggacttggactagataaccttaaattggcctattccttcaattaataaaatatttttgccatagtatgtgactctacataacatactgaaactatttatattttcttttttaaggatatttagaaattttgtgtattatatggnnnnnnnnnnnnngcttaagtctgtagtctttatgatcctaaaagggaaaattgccttggtaactttcagattcctgtggaattgtgaattcatactaagctttctgtgcagtctcaccatttgcatcactgaggatgaaactgacttttgtcttttggagaaaaaaaactgtactgcttgttcaagagggctgtgattaaaatctttaagcatttgttcctgccaaggtagttttcttgcattttgctctccattcagcatgtgtgtgggtgtggatgtttataaacaagactaagtctgacttcataagggctttctaaaaccatttctgtccaagagaaaatgactttttgctttgatattaaaaattcaatgagtaaaacaaaagctagtcaaatgtgttaacagcatgcagaacaaaaactttaaactttctctctcactatacagaatattgtcatgtgaaagtgtggaatggaagaaatgtctatcctgttgtaactgattgtgaacacttttatgagctttaaaataaagtttcatctta

SEQ ID NO: 183859 - DNA, 1198 bp, Homo Sapiens
ttggctcaatgcagatgaagcagtagccagaggatgtgcattacagtgtgcaatactttccccggcatttaaagttagagaattttccgtcacagatgcagttccttttccaatatctctgatctggaaccatgattcagaagatactgaaggtgttcatgaagtctttagtcgaaaccatgctgctcctttctccaaagttctcacctttctgagaagggggccttttgagctagaagctttctattctgatccccaaggagttccatatccagaagcaaaaataggccgctttgtagttcagaatgtttctgcacagaaagatggagaaaaatctagagtaaaagtcaaagtgcgagtcaacacccatggcattttcaccatctctacggcatctatggtggagaaagtcccaactgaggagaatgaaatgtcttctgaagctgacatggagtgtctgaatcagagaccaccagaaaacccagacactgataaaaatgtccagcaagacaacagtgaagctggaacacagccccaggtacaaactgatgctcaacaaacctcacagtctcccccttcacctgaacttacctcagaagaaaacaaaatcccagatgctgacaaagcaaatgaaaaaaaagttgaccagcctccagaagctaaaaagcccaaaataaaggtggtgaatgttgagctgcctattgaagccaacttggtctggcagttagggaaagaccttcttaacatgtatattgagacagagggtaagatgataatgcaagataaattggaaaaagaaaggaatgatgctaaaaatgcagttgaggaatatgtgtatgagttcagagacaagctgtgtggaccatatgaaaaatttatatgtgagcaggatcatcaaaattttttgagactcctcacagaaactgaagactggctgtatgaagaaggagaggaccaagctaaacaagcatatgttgacaagttggaagaattaatgaaaattggcactccagttaaagttcggtttcaggaagctgaagaacggccaaaaatgtttgaagaactaggacagaggctgcagcattatgccaagatagcagctgacttcagaaataaggatgagaaatacaaccatattgatgagtctgaaatgaaaaaagtggagaaatctgttaatgaagtgatggaatgggatgaa

SEQ ID NO: 183860 - DNA, 3449 bp, Homo Sapiens
  misc_feature (3020)..(3040): n is a, c, g, or t
  misc_feature (3232)..(3269): n is a, c, g, or t
ccaactttgtacaaaaaagttggggtggacgggcactcgatgcggaagctgatcgcagacctgcagcccaacacagagtactcgtttgtgctgatgaaccgtggcagcagcgcagggggcctgcagcacctggtgtccatccgcacagcccccgacctcctgcctcacaagccgctgcctgcctctgcctacatagaggacggccgcttcgatctctccatgccccatgtgcaagacccctcgcttgtcaggtggttctacattgttgtggtacccattgaccgtgtgggcgggagcatgctgacgccaaggtggagcacacccgaggaactggagctggacgagcttctagaagccatcgagcaaggcggagaggagcagcggcggcggcggcggcaggcagaacgtctgaagccatatgtggctgctcaactggatgtgctcccggagacttttaccttgggggacaagaagaactaccggggcttctacaaccggcctctgtctccggacttgagctaccagtgctttgtgcttgcctccttgaaggaacccatggaccagaagcgctatgcctccagcccctactcggatgagatcgtggtccaggtgacaccagcccagcagcaggaggagccggagatgctgtgggtgacgggtcccgtgctggcagtcatcctcatcatcctcattgtcatcgccatcctcttgttcaaaaggaaaaggacccactctccgtcctctaaggatgagcagtcgatcggactgaaggactccttgctggcccactcctctgaccctgtggagatgcggaggctcaactaccagaccccaggtatgcgagaccacccacccatccccatcaccgacctggcggacaacatcgagcgcctcaaagccaacgatggcctcaagttctcccaggagtatgagtccatcgaccctggacagcagttcacgtgggagaattcaaacctggaggtgaacaagcccaagaaccgctatgcgaatgtcatcgcctacgaccactctcgagtcatccttacctctatcgatggcgtccccgggagtgactacatcaatgccaactacatcgatggctaccgcaagcagaatgcctacatcgccacgcagggccccctgcccgagaccatgggcgatttctggagaatggtgtgggaacagcgcacggccactgtggtcatgatgacacggctggaggagaagtcccgggtaaaatgtgatcagtactggccagcccgtggcaccgagacctgtggccttattcaggtgaccctgttggacacagtggagctggccacatacactgtgcgcaccttcgcactccacaagagtggctccagtgagaagcgtgagctgcgtcagtttcagttcatggcctggccagaccatggagttcctgagtacccaactcccatcctggccttcctacgacgggtcaaggcctgcaaccccctagacgcagggcccatggtggtgcactgcagcgcgggcgtgggccgcaccggctgcttcatcgtgattgatgccatgttggagcggatgaagcacgagaagacggtggacatctatggccacgtgacctgcatgcgatcacagaggaactacatggtgcagacggaggaccagtacgtgttcatccatgaggcgctgctggaggctgccacgtgcggccacacagaggtgcctgcccgcaacctgtatgcccacatccagaagctgggccaagtgcctccaggggagagtgtgaccgccatggagctcgagttcaagttgctggccagctccaaggcccacacgtcccgcttcatcagcgccaacctgccctgcaacaagttcaagaaccggctggtgaacatcatgccctacgaattgacccgtgtgtgtctgcagcccatccgtggtgtggagggctctgactacatcaatgccagcttcctggatggttatagacagcagaaggcctacatagctacacaggggcctctggcagagagcaccgaggacttctggcgcatgctatgggagcacaattccaccatcatcgtcatgctgaccaagcttcgggagatgggcagggagaaatgccaccagtactggccagcagagcgctctgctcgctaccagtactttgttgttgacccgatggctgagtacaacatgccccagtatatcctgcgtgagttcaaggtcacggatgcccgggatgggcagtcaaggacaatccggcagttccagttcacagactggccagagcagggcgtgcccaagacaggcgagggattcattgacttcatcgggcaggtgcataagaccaaggagcagtttggacaggatgggcctatcacggtgcactgcagtgctggcgtgggccgcaccggggtgttcatcactctgagcatcgtcctggagcgcatgcgctatgagggcgtggtcgacatgtttcagaccgtgaagaccctgcgtacacagcgtcctgccatggtgcagacagaggaccagtatcagctgtgctaccgtgcggccctggagtacctcggcagctttgaccactatgcaacgtaactaccgctcccctctcctccgccacccccgccgtggggctccggaggggacccagctcctctgagccataccgaccatcgtccagccctcctacgcagatgctgtcactggcagagcacagcccacggggatcacagcgtttcaggaacgttgccacaccaatcagagagcctagaacatccctgggcaagtggatggcccagcaggcaggcactgtggcccttctgtccaccagacccacctggagcccgcttcaagctctctgttgcgctcccgcatttctcatgcttcttctcatggggtggggttggggcaaagcctcctttttaatacattaagtggggtagactgagggattttagcctcttccctctgatttttcctttcgcgaatccgtatctgcagaatgggccactgtaggggttggggtttannnnnnnnnnnnnnnnnnnnncttgagttcactttggatccttattttgtatgacttctgctgaaggacagaacattgccttcctcgtgcagagctggggctgccagcctgagcggaggctcggccgtgggccgggaggcagtgctgatccggctgctcctccagcccttcagacgagatcctgtttcagctaaatgcagggaaactcaatgnnnnnnnnnnnnnnnnnnnnnnnnnnnnnnnnnnnnnnaggccacattgacagtggtgggcggggagaagatagggaacactcatccctggtcgtctatcccagtgtgtgtttaacattcacagcccagaaccacagatgtgtctgggagagccctggcaaggcattcctcatcaccatcgtgtttgcaaaggttaaacaaaaacaaaaaccacaaaa

SEQ ID NO: 183861 - DNA, 1698 bp, Homo Sapiens
gctgctcctctccgccttgctcgatggcttctagaagctcgtccagctccagttcctcgggtgtgctccacgtggcgtcagcatgctcccgcccacacggtcaatgggtaccacaacaatgtagaaccacgtgacaagcgaggggtcttgcacatggggcatggagagatcgaagcggccgtcctctatgtaggcagaggcaggcagcggcttgtgaggcaggaggtcgggggctgtgcggatggacaccaggtgctgcaggccccctgcgctgctgccacggttcatcagcacaaacgagtactctgtgttgggctgcaggtctgcgatcagcttccgcatcgagtgcccgtccacctccacactctgcccattgtacagaatcttaaagggcacagctgacttataggagtcgggaacctcccagctgagcagcacagacgtcttcattgcagccgccacccggaagttcttggcaaacacttgctccaccggcatggtccgggactggatgctggggctgagtgggccagagcctttgctggtccatgcgcggaccttgatgtcgtaagtggtgtctggcttgaggccagtaagggtaaagcgggtgtctgtcgtgatgttctgcagctcctgttggctgttgatgtctcggaacaccacggtgtagctgatgatgcgcccgttcctctccgccagcactggcgggtcccaggccagttctgtggtagacgtggtcagtcctgtcacatgcaggttttgggggaagccgctgggcaggtcctcgggggtcctgatctccttctcgaactcctcacccaagccagcccggttcttggcagcaagccggaagatgtaggtggtccccttgtgcaggccggtgactgtgaagtgctggtcatccttgccgaaatctatggtgttgggccgcgcctcgtcggcccggcagtactgcagccggtagcccagcagctcgccaggcagttccttgggtgggtgccactggagcagcgcagtgttcatggccgtggtgctgatcatcatggtgggccggcctgggactgcacctgttgtagtgacaattttgggcttgctgcgggcaccatcccccttggtggtataggcagcaacagtaacggagtaggtggtctccggggtcaggccgctgatagtggtttcatagtcctcggactcctctggccgccactgggcctcggctagcatgacgtcttggatgatggggagtccacggggctcgccattctccagccgcacgtaggtgacctggtagccgcggatctggccatgctgcttgctggggacaggcagcttccagtagacatgcacagcagtggagttcagtggctccacctccaccttccgcggaggcccgctgggcacgtcctcatcggtgcgcaccagcaccgggctgctctcggggccggggcccacgtctgtgtgtgcccgcacccacacccggtactccgtccacttctccaggcccaccaggtcccagctggagtgctcacggctgatgccatccaccacatgccgcccgcggtcctcgccgtccaccgcctcgtaggccacggagtactgggtgataacgccgttgcggctgtcggcaggcggcgggacccaacttacccggaccgtggtggagcccatgctcacacacatcaccttctggggagccaa

SEQ ID NO: 183862 - DNA, 1393 bp, Homo Sapiens
acttgaactcgagctccatggcggtcacactctcccctggaggcacttggcccagcttctggatgtgggcatacaggttgcgggcaggcacctctgtgtggccgcacgtggcagcctccagcagcgcctcatggatgaacacgtactggtcctccgtctgcaccatgtagttcctctgtgatcgcatgcaggtcacgtggccatagatgtccaccgtcttctcgtgcttcatccgctccaacatggcatcaatcacgatgaagcagccggtgcggcccacgcccgcgctgcagtgcaccaccatgggccctgcgtctagggggttgcaggccttgacccgtcgtaggaaggccatgaactgaaactgacgcagctcacgcttctcactggagccactcttgtggagtgcgaaggtgcgcacagtgtatgtggccagctccactgtgtccaacagggtcacctgaataaggccacaggtctcggtgccacgggctggccagtactgatcacattttacccgggacttctcctccagccgtgtcatcatgaccacagtggccgtgcgctgttcccacaccattctccagaaatcgcccatggtctcgggcagggggccctgcgtggcgatgtaggcattctgcttgcggtagccatcgatgtagttggcattgatgtagtcactcccggggacgccatcgatagaggtaaggatgactcgagagtggtcgtaggcgatgacattcgcatagcggttcttgggcttgttcacctccaggtttgaattctcccacgtgaactgctgtccagggtcgatggactcatactcctgggagaacttgaggccatcgttggctttgaggcgctcgatgttgtccgccaggtcggtgatggggatgggtgggtggtctcgcatacctaggggaggtagggcatacacaggcagcattagtgtgaggcttgagcagtgtggcagagaaagccccaacgcatgtatgtgcacatgtgaacatgtgtgaccatggagcacttggaactggtggcatggagacagcagcacatgcggcgacagggatggcggagggtgggagaggacagagggcggtgttgtgccatgagcatgtggagcctgttttggtggcggggtgctgagtgggggcactaggccctgcctggcaggtctctcaagatggaagagaggcttccttcctcccaggaggggtgggacgcccaggtcggtggcagcagacgtgacaggagctgggctccatcgcatctgcctgcagacagccctcctgcccctcaccggtggcagtcaccatgggagactcacagccatcgtcatcccgggcaccaagtgtgtagatggagtggtcatgaagtacagacacaccaa

SEQ ID NO: 183863 - DNA, 1270 bp, Homo Sapiens
  misc_feature (64)..(84): n is a, c, g, or t
  misc_feature (278)..(313): n is a, c, g, or t
  misc_feature (470)..(535): n is a, c, g, or t
ttgggatttttcctttcgcgaatccgtatctgcagaatgggccactgtaggggttggggtttannnnnnnnnnnnnnnnnnnnncttgagttcactttggatccttattttgtatgacttctgctgaaggacagaacattgccttcctcgtgcagagctggggctgccagcctgagcggaggctcggccgtgggccgggaggcagtgctgatccggctgctcctccagcccttcagacgagatcctgtttcagctaaatgcagggaaactcaatgttnnnnnnnnnnnnnnnnnnnnnnnnnnnnnnnnnnnnaggccacattgacagtggtgggcggggagaagatagggaacactcatccctggtcgtctatcccagtgtgtgtttaacattcacagcccagaaccacagatgtgtctgggagagcctggcaaggcattcctcatcaccatcgtgtttgcaaaggttnnnnnnnnnnnnnnnnnnnnnnnnnnnnnnnnnnnnnnnnnnnnnnnnnnnnnnnnnnnnnnnnnngagtcagcccttggcttctgcttcaaaccctcaagaggggaagcaactccgtgtgcctggggttcccgagggagctgctggctgacctgggcccacagagcctggctttggtccccagcattgcagtatggtgtggtgtttgtaggctgtggggtctggctgtgtggccaaggtgaatagcacaggttagggtgtgtgccacaccccatgcacctcagggccaagcgggggcgtggctggcctttcaggtccaggccagtgggcctggtagcacatgtctgtcctcagagcaggggccagatgattttcctccctggtttgcagctgttttcaaagcccccgataatcgctcttttccactccaagatgccctcataaaccaatgtggcaagactactggacttctatcaatggtactctaatcagtccttattatcccagcttgctgaggggcagggagagcgcctcttcctctgggcagcgctatctagataggtaagtgggggcggggaagggtgcatagctgttttagctgagggacgtggtgccgacgtccccaaacctagctaggctaagtcaagatcaacattccagggttggtaatgttggatgatgaaacattcatttttaccttgtggatgctagtgctgtagagttcactgttgtacacagtctgttttctatttgttaagaaaaactacagcatcattgcataattcttgatgtaataaattt

SEQ ID NO: 183864 - DNA, 1883 bp, Homo Sapiens
  misc_feature (58)..(68): n is a, c, g, or t
ttggattctgctgccatcttagctgtggacaaaggggggtcagctggcatgagaatannnnnnnnnnnaagtgcggtagtttttaaactgtttgtttttaaacaaactatagaactcttcattgtcagcaaagcaaagagtcactgcatcaatgaaagttcaagaacctcctgtacttaaacacgattcgcaacgttctgttattttttttgtatgtttagaatgctgaaatgtttttgaagttaaataaacagtattacatttttaaaactcttctctattataacagtcaatttctgactcacagcagtgaacaaacccccactccattgtatttggagactggcctccctataaatgtggtagcttcttttattactcagtggccagctcacttagggctgagatgaaggagagggctacttgaagctactgtgtgattttgtttgtgtctgagtggcattcagatgaagtctggaggagttaggagaacgacataggcaaggttcagcagccttccaaggtataggaaggtgggtgattaggactgaggctatctaggtttaacttttgtcccacctccaccccctattttgtggggccaaatgcattgctaaacagcaatttcagagtgtatggtgtgtcaaaaattaaggccttattgtttttctctttcacccctaccccccgtgctcctggcacatatcacattatttgtggtgcccaacatttggggtcttgagcctgctgctggtctcctggatgccagtgagggtatgtgggatggggtggtggggtaggggacggtatcctttttttgctcctacttggaaacaccaaacaccccaaggaagatgataggctccatcttgggccacctgagctatatggcaggctaatggaatcaaccatttctgagcactaaatgtatcatgaaaagttgaatggcctgctcataactttacctcattcactggaaatgtagattgatgttcaatgttaaactggaaggagcttggtttgtgtgtcagtggttatattagtgggtagtgtaacattttatccaggttggggtgaggggagatggccacagtagcaagtggtgacactaaataccattttgaaggctgatgtgtatatacatcattactgtccgtagcaatgaaggatacagtactgtgttgtgggtgagtgttgctattgcccagcattaatatttgggtgtgtatgtttgaggctatgaaacacgcaggagtgtttttgtgctattaattttaagagaaagcagctttttcttaaaattcactgttgagaaacttgcatgtctggaggcggtgtcctctccgccctgtcgggtcctggatgagtacgagttatggtcacggtcacagcctgatctcttatgtgttcatagccattcgctctcccatcagaactgtttgtcctgaatgtgttcctctagttctagaaaatgaccactaatttaaaaaactcggttgtgaggtttgcccagaggcacttgttccagaatttcccctcctgcttcagccatgtccttgtcacttggcattctaagctaaagctttagcttcccaattcgtgatgtgctaggccaagattcgggagctgttgccagcctcgtcaaatatggaagagaaacaacctgcggtcaaaagggagtgatttgttaagtggtgcgcgtctatctcataactagatgtaccaaccagggaagggccaaggatggaaaggggtaacttttgtgcttccaaagtagctaagcagaagtgggggagcagtttagccagatgatctttgattaggcaaacattgagttttaaagaggctgtcaagttgaggcacttggtccattagctggggca

SEQ ID NO: 183865 - DNA, 618 bp, Homo Sapiens
  misc_feature (504)..(515): n is a, c, g, or t
aaagacaactttgtacaaaaaagttggcatgaagtggcccttagataaactggagcaccctgaaactgtatcaaagttgtacatatttccaaacatttttaaaatgaaaaggcactctcgtgttctcctcactctgtgcactttgctgttggtgtgacaaggcatttaaagatgtttctggcattttctttttatttgtaaggtggtggtaactatggttattggctagaaatcctgagttttcaactgtatatatctatagtttgtaaaaagaacaaaacaaccgagacaaacccttgatgctccttgctcggcgttgaggctgtggggaagatgccttttgggagaggctgtagctcagggcgtgcactgtgaggctggacctgttgactctgcagggggcatccatttagcttcaggttgtcttgtttctgtatatagtgacatagcattctgctgccatcttagctgtggacaaaggggggtcagctggcatgagaatannnnnnnnnnnnaagtgcggtagtttttaaactgtttgtttttaaacaaactataaaactcttcattgtcagcaaaacaaagagtcactgcattaatgaaagttccaagaacctc

SEQ ID NO: 183866 - DNA, 943 bp, Homo Sapiens
tgtacaaaatacatgaatcagcagggctgccattctttgaaatatttgtagatgcacctctaaatatttgtgaaagcagagacgtaaaaggcctctataaaagggccagagctggggagattaaaggatttacaggtattgattctgattatgagaaacctgaaactcctgagcgtgtgcttaaaaccaatttgtccacagtgagtgactgtgtccaccaggtagtggaacttctgcaagagcagaacattgtaccctatactataatcaaagatatccacgaactctttgtgccggaaaacaaacttgaccacgtccgagctgaggctgaaactctcccttcattatcaattactaagctggatctccagtgggtccaggttttgagcgaaggctgggccactcccctcaaaggtttcatgcgggagaaggagtacttacaggttatgcactttgacaccctgctagatgatggcgtgatcaacatgagcatccccattgtactgcccgtctctgcagaggataagacacggctggaagggtgcagcaagtttgtcctggcacatggtggacggagggtagctatcttacgagacgctgaattctatgaacacagaaaagaggaacgctgttcccgtgtttgggggacaacatgtacaaaacacccccatatcaaaatggtgatggaaagtggggactggctggttggtggagaccttcaggtgctggagaaaataagatggaatgatgggctggaccaataccgtctgacacctctggagctcaaacagaaatgtaaagaaatgaatgctgatgcggtgtttgcattccagttgcgcaatcctgtccacaatggccatgccctgttgatgcaggacactcgccgcaggctctagagagggctacaagcacccggtcctcctactacaccctctgggcggct

SEQ ID NO: 183867 - DNA, 1693 bp, Homo Sapiens
  misc_feature (1215)..(1223): n is a, c, g, or t
  misc_feature (1512)..(1522): n is a, c, g, or t
ttgggtttggaaggggcattgtgcacatttgattcatgcttcaaggatggcacaccttatatctagttttcgtgcatcacatggctctttccacagatggcgtgatcaacatgagcatccccattgtactgcccgtctctgcagaggataagacacggctggaagggtgcagcaagtttgtcctggcacatggtggacggagggtagctatcttacgagacgctgaattctatgaacacagaaaagaggaacgctgttcccgtgtttgggggacaacatgtacaaaacacccccatatcaaaatggtgatggaaagtggggactggctggttggtggagaccttcaggtgctggagaaaataagatggaatgatgggctggaccaataccgtctgacacctctggagctcaaacagaaatgtaaagaaatgaatgctgatgcggtgtttgcattccagttgcgcaatcctgtccacaatggccatgccctgttgatgcaggacactcgccgcaggctcctagagaggggctacaagcacccggtcctcctactacaccctctgggcggctggaccaaggatgacgatgtgcctctagactggcggatgaagcagcacgcggctgtgctcgaggaaggggtcctggatcccaagtcaaccattgttgccatctttccgtctcccatgttatatgctggccccacagaggtccagtggcactgcaggtcccggatgattgcgggtgccaatttctacattgtggggagggaccctgcaggaatgccccatcctgaaaccaagaaggatctgtatgaacccactcatgggggcaaggtcttgagcatggcccctggcctcacctctgtggaaatcattccattccgagtggctgcctacaacaaagccaaaaaagccatggacttctatgatccagcaaggcacaatgagtttgacttcatctcaggaactcgaatgaggaagctcgcccgggaaggagagaatcccccagatggcttcatggcccccaaagcatggaaggtcctgacagattattacaggtccctggagaagaactaagcctttggctccagagtttctttctgaagtgctctttgattaccttttctatttttatgattagatgctttgtattaaattgcttctcaatgatgcattttaatcttttataatgaagtaaaagttgtgtctataattnnnnnnnnntatatatatatacacacacacatatacatacaaagtcaaactgaagaccaaatcttagcaggtaaaagcaatattcttatacatttcataataaaattagctctatgtattttctactgcacctgagcaggcaggtcccagatttcttaaggctttgtttgaccatgtgtctagttacttgctgaaaagtgaatatattttccagcatgtcttgacaacctgtactcttccaatgtcatttatcagttgtaaaatatatcagattgtgtcctcttctgtacaattgacnnnnnnnnnnntttttttttctcactctaaaagaggtgtggctcacatcaagattcttcctgatattttacctcatgctgtacaaagccttaatgttgtaatcatatcttacgtgttgaagacctgactggagaaacaaaatgtgcaataacgtgaattttatcttagagatctgtgcagcc

SEQ ID NO: 183868 - DNA, 1199 bp, Homo Sapiens
  misc_feature (85)..(105): n is a, c, g, or t
  misc_feature (864)..(876): n is a, c, g, or t
ttgggtcttgacaacctgtaatcttccaatgtcatttatcagttgtaaaatatatcagattgtgtcctcttctgtacaattgacnnnnnnnnnnnnnnnnnnnnnctcactctaaaagaggtgtggctcacatcaagattcttcctgatattttacctcatgctgtacaaagccttaatgttgtaatcatatcttacgtgttgaagacctgactggagaaacaaaatgtgcaataacgtgaattttatcttagagatctgtgcagcctatttctgtcacaaaagttatattgtctaataagagaagtcttaatggcctctgtgaataatgtaactccagttacacggtgacttttaatagcatacagtgatttgatgaaaggacgtcaaacaatgtggcgatgtcgtggaaagttatctttcccgctctttgctgtggtcattgtgtcttgcagaaaggatggccctgatgcagcagcagcgccagctgtaataaaaaataattcacactatcagactagcaaggcactagaactggaaaagaccacagaaaacaaagaatccaaccctttcatcttacaggtgaacaaactgtgatgatgcacatgtatgtgttttgtaagctgtgagcaccgtaacaaaatgtaaatttgccattattaggaagtgctggtggcagtgaagaagcacccaggccacttgactcccagtctggtgccctgtctacaccagacaacacaggagctgggtcagattcccctcagctgcttaacaaagttcctcgaacagaaagtgcttacaaagctgccttctcggatactgaaaggtcgagttttctgaactgcactgattttattgcagttgnnnnnnnnnnnnngctattccaaagatttcaagctgttctgagacatcttctgatggctttacttcctgagaggcaatgtttttactttatgcataattcattgttgccaaggaataaagtgaagaaacagcaccttttaatatataggtctctctggaagagacctaaattagaaagagaaaactgtgacaattttcatattctcattcttaaaaaacactaatcttaactaacaaaagttcttttgagaataagttacacacaatggccacagcagtttgtctttaatagtatagtgcctatactcatgtaatcggttactcactactgccttt

SEQ ID NO: 183869 - DNA, 1184 bp, Homo Sapiens
  misc_feature (468)..(488): n is a, c, g, or t
  misc_feature (745)..(779): n is a, c, g, or t
gaaagggttggattctttgttttctgtggtcttttccagttctagtgccttgctagtctgatagtgtgaattattttttattacagctggcgctgctgctgcatcagggccatcctttctgcaagacacaatgaccacagcaaagagcgggaaagataactttccacgacatcgccacattgtttgacgtcctttcatcaaatcactgtatgctattaaaagtcaccgtgtaactggagttacattattcacagaggccattaagacttctcttattagacaatataacttttgtgacagaaataggctgcacagatctctaagataaaattcacgttattgcacattttgtttctccagtcaggtcttcaacacgtaagatatgattacaacattaaggctttgtacagcatgaggtaaaatatcaggaagaatcttgatgtgagccacacctcttttagagtgagnnnnnnnnnnnnnnnnnnnnngtcaattgtacagaagaggacacaatctgatatattttacaactgataaatgacattggaagagtacaggttgtcaagacatgctggaaaatatattcacttttcagcaagtaactagacacatggtcaaacaaagccttaagaaatctgggacctgcctgctcaggtgcagtagaaaatacatagagctaattttattatgaaatgtataagaatattgcttttacctgctaagatttggtcttcagtttgacttnnnnnnnnnnnnnnnnnnnnnnnnnnnnnnnnnnnttttttaattatagacacaacttttacttcattataaaagattaaaatgcatcattgagaagcaatttaatacaaagcatctaatcataaaaatagaaaaggtaatcaaagagcacttcagaaagaaactctggagccaaaggcttagttcttctccagggacctgtaataatctgtcaggaccttccatgctttgggggccatgaagccatctgggggattctctccttcccgggcgagcttcctcattcgagttcctgagatgaagtcaaactcattgtgccttgctggatcatagaagtccatggcttttttggctttgttgtaggcagccactcggaatggaatgatttccacagaggtgaggccaggggccatgctcaagaccttgcccccatgagccaa

SEQ ID NO: 183870 - DNA, 1042 bp, Homo Sapiens
  misc_feature (551)..(570): n is a, c, g, or t
  misc_feature (833)..(861): n is a, c, g, or t
aatggcaaatttacattttgttacggtgctcacagcttacaaaacacatacatgtgcatcatcacagtttgttcacctgtaagatgaaagggttggattctttgttttctgtggtcttttccagttctagtgccttgctagtctgatagtgtgaattattttttattacagctggcgctgctgctgcatcagagccatcctttctgcaagacacaatgaccacagcaaagagcgggaaagataactttccacgacatcgccacattgtttgacgtcctttcatcaaatcactgtatgctattaaaagtcaccgtgtaactggagttacattattcacagaggccattaagacttctcttattagacaatataacttttgtgacagaaataggctgcacagatctctaagataaaattcacgttattgcacattttgtttctccagtcaggtcttcaacacgtaagatatgattacaacattaaggctttgtacagcatgaggtaaaatatcaggaagaatcttgatgtgagccacacctcttttagagtgnnnnnnnnnnnnnnnnnnnngtcaattgtacagaagaggacacaatctgatatattttacaactgataaatgacattggaagagtacaggttgtcaagacatgctggaaaatatattcacttttcagcaagtaactagacacatggtcaaacaaagccttaagaaatctgggacctgcctgctcaggtgcagtagaaaatacatagagctaattttattatgaaatgtataagaatattgcttttacctgctaagatttggtcttcagtttgactttgtaagnnnnnnnnnnnnnnnnnnnnnnnnnnnnnttttttaattatagacacaacttttacttcattataaaagattaaaatgcatcattgagaagcaatttaatacaaagcatctaatcataaaaatagaaaaggtaatcaaagagcacttcagaaagaaactctggagccaaaggcttagttcttctcctagggaccatgtaataatcttgcc

SEQ ID NO: 183871 - DNA, 882 bp, Homo Sapiens
  misc_feature (371)..(383): n is a, c, g, or t
  misc_feature (707)..(718): n is a, c, g, or t
ctttgtacaaaaaagttggcagactagcaaggcactagaactggaaaagaccacagaaaacaaagaatccaaccctttcatcttacaggtgaacaaactgtgatgatgcacatgtatgtgttttgtaagctgtgagcaccgtaacaaaatgtaaatttgccattattaggaagtgctggtggcagtgaagaagcacccaggccacttgactcccagtctggtgccctgtctacaccagacaacacaggagctgggtcagattcccctcagctgcttaacaaagttcctcgaacagaaagtgcttacaaagctgccttctcggatactgaaaggtcgagttttctgaactgcactgattttattgcagttgnnnnnnnnnnnnngctattccaaagatttcaagctgttctgagacatcttctgatggctttacttcctgagaggcaatgtttttactttatgcataattcattgttgccaaggaataaagtgaagaaacagcaccttttaatatataggtctctctggaagagacctaaattagaaagagaaaactgtgacaattttcatattctcattcttaaaaaacactaatcttaactaacaaaagttcttttgagaataagttacacacaatggccacagcagtttgtctttaatagtatagtgcctatactcatgtaatcggttactcactactgcctttnnnnnnnnnnnnccagcatatttattgaaaacatgagacaggattatagtgccttaaccgatatattttgtgacttaaaaaatacatttaaaactgctcttctgctctagtaccatgcttagtgcaaatgattatttctatgtacaactgatgcttgttcttattttaataaattt

SEQ ID NO: 183872 - DNA, 1591 bp, Homo Sapiens
  misc_feature (603)..(637): n is a, c, g, or t
  misc_feature (894)..(904): n is a, c, g, or t
actttgtacaaaaaagttgggtcctggatcccaagtcaaccattgttgccatctttccgtctcccatgttatatgctggccccacagaggtccagtggcactgcaggtcccggatgattgcgggtgccaatttctacattgtggggagggaccctgcaggaatgccccatcctgaaaccaagaaggatctgtatgaacccactcatgggggcaaggtcttgagcatggcccctggcctcacctctgtggaaatcattccattccgagtggctgcctacaacaaagccaaaaaagccatggacttctatgatccagcaaggcacaatgagtttgacttcatctcaggaactcgaatgaggaagctcgcccgggaaggagagaatcccccagatggcttcatggcccccaaagcatggaaggtcctgacagattattacaggtccctggagaagaactaagcctttggctccagagtttctttctgaagtgctctttgattaccttttctatttttatgattagatgctttgtattaaattgcttctcaatgatgcattttaatcttttataatgaagtaaaagttgtgtctataattaaaaaannnnnnnnnnnnnnnnnnnnnnnnnnnnnnnnnnnaagtcaaactgaagaccaaatcttagcaggtaaaagcaatattcttatacatttcataataaaattagctctatgtattttctactgcacctgagcaggcaggtcccagatttcttaaggctttgtttgaccatgtgtctagttacttgctgaaaagtgaatatattttccagcatgtcttgacaacctgtactcttccaatgtcatttatcagttgtaaaatatatcagattgtgtcctcttctgtacaattgacnnnnnnnnnnntttttttttctcactctaaaagaggtgtggctcacatcaagattcttcctgatattttacctcatgctgtacaaagccttaatgttgtaatcatatcttacgtgttgaagacctgactggagaaacaaaatgtgcaataacgtgaattttatcttagagatctgtgcagcctatttctgtcacaaaagttatattgtctaataagagaagtcttaatggcctctgtgaataatgtaactccagttacacggtgacttttaatagcatacagtgatttgatgaaaggacgtcaaacaatgtggcgatgtcgtggaaagttatctttcccgctctttgctgtggtcattgtgtcttgcagaaaggatggccctgatgcagcagcagcgccagctgtaataaaaaataattcacactatcagactagcaaggcactagaactggaaaagaccacagaaaacaaagaatccaaccctttcatcttacaggtgaacaaactgtgatgatgcacatgtatgtgttttgtaagctgtgagcaccgtaacaaaatgtaaatttgccattattaggaagtgctggtggcagtgaagaagcacccaggccacttgactcccagtctggtgccctgtctacaccagacaacacaggagctgggtcagattccccctcagctgcttaacaaagttcctc

SEQ ID NO: 183873 - DNA, 1390 bp, Homo Sapiens
ttggcggtcatctgctccacaggaaacaccaggccaaccacagctggggataaaatagcacaaccacaccctgccgtccagcgcctcccagcctgtgccccttcctagtaccaccagcaaccatcaatcccgtctcctcctgcctcctctcctgcaatccaccccgccacgactatcgccatggcagccctgatcgcagagaacttccgcttcctgtcacttttcttcaagagcaaggatgtgatgattttcaacggcctggtggcactgggcacggtgggcagccaggagctgttctctgtggtggccttccactgcccctgctcgccggcccggaactacctgtacgggctggcggccatcggcgtgcccgccctggtgctcttcatcattggcatcatcctcaacaaccacacctggaacctcgtggccgagtgccagcaccggaggaccaagaactgctccgccgcccccaccttcctccttctaagctccatcctgggacgtgcggctgtggcccctgtcacctggtctgtcatctccctgctgcgtggtgaggcttatgtctgtgctctcagtgagttcgtggacccttcctcactcacggccagggaagagcacttcccatcagcccacgccactgaaatcctggccaggttcccctgcaaggagaaccctgacaacctgtcagacttccgggaggaggtcagccgcaggctcaggtatgagtcccagctctttggatggctgctcatcggcgtggtggccatcctggtgttcctgaccaagtgcctcaagcattactgctcaccactcagctaccgccaggaggcctactgggcgcagtaccgcgccaatgaggaccagctgttccagcgcacggccgaggtgcactctcgggtgctcgctgccaacaatgtgcgccgcttctttggctttgtggcgctcaacaaggatgatgaggaactgattgccaacttcccagtggaaggcacgcagccacggccacagtggaatgccatcaccggcgtctacttgtaccgtgagaaccagggcctcccactctacagccgcctgcacaagtgggcccagggtctggcaggcaacggcgcggcccctgacaacgtggagatggccctgctcccctcctaaggaggtgcttcccatgctctttgtaaatggcactgcttggtcccaaactgaaccccactgcttgctcacatccatatcagaaggggatttttaaaaaactgttatcttcttggccaggggaaaggaccacaaaggcaatctgggggtgtggacagacccagtagaccattggaagccccagccagcagggccaggtgacagtgaagctccaccagtgggctcccttatggtactccta

SEQ ID NO: 183874 - DNA, 1518 bp, Homo Sapiens
  misc_feature (118)..(148): n is a, c, g, or t
  misc_feature (597)..(718): n is a, c, g, or t
aacgggagaaattaactccccggggccgccgggttgactgcgctgcctgggccggaggtcttctccggccagggagcgctgtgggaaggggctcgagcggccagggccaggcgaggcnnnnnnnnnnnnnnnnnnnnnnnnnnnnnnnctactcttgggagcgcccctgtccggctggctgcgcgccggttttaaatagcatctttcggacttgtcttcgcggccccagtccccgacctcggcgctgcctgggctcctgcagcctctccctaagtcttctccaaacgaccacctcacggattccttatggatcgcagctccaagaggaggcaggtgaagcctttggcagcttctctgctggaagctcttgattatgatagttcagatgacagtgattttaaagttggagatgcctcagattctgaagggagtggtaatggaagtgaagatgcttcaaaggacagtggagaaggttcctgtagtgattctgaagaaaatattttagaagaagaactgaatgaagatattaaagtaaaagaagaacaacttaaaaattctgcagaggaagaagtactatcatcagaaaaacaattaatnnnnnnnnnnnnnnnnnnnnnnnnnnnnnnnnnnnnnnnnnnnnnnnnnnnnnnnnnnnnnnnnnnnnnnnnnnnnnnnnnnnnnnnnnnnnnnnnnnnnnnnnnnnnnnnnnnnnnnnnnncaacagtatctgagaatgtggctgcttctgctgctgccaccacaccagccacaagtcctcctgctgttaacacatccccttctgttcccactacgacaaccgctacagaggaacaagtcagcgagccaaaaaaatggaaccttcgacgaaaccgaccacttctggattttgtgtccatggaagagctgaatgacatggatgactatgacagtgaggatgacaatgattggcgacctactgtagtaaagagaaaagggagatctgcatctcagaaagagggaagtgatggagacaatgaggatgatgaagatgagggaagcgggagtgatgaagacgagaatgatgaaggcaatgatgaagatcatagtagccctgccagtgaagggggttgcaagaagaagaagagtaaagttcttagcagaaacagtgctgatgatgaggaactgaccaatgatagcctgaccctatctcaaagcaagagtaatgaggactcgctgattcttgagaagagtcaaaactggagctctcaaaaaatggaccatattctgatttgctgtgtttgtctgggagataatagtgaggacgctgatgaaataattcagtgtgacaattgtggcattacagtccatgaatgttgttatggagttgatggagagagtgactctattatgagttcagcttctgaaaactccactgaaacttgggttttgtgatgcctgtaaatgtgggtgtttctctagctgtgaactgtgtcctaatcaaggatggaattttcaaggagacagatgctggaagatggg

SEQ ID NO: 183875 - DNA, 1702 bp, Homo Sapiens
  misc_feature (1307)..(1333): n is a, c, g, or t
ttgggtagactatgcaaagaaaaagtgggccaccatatctggaaactacagtctatgctttgaagcgcaaaagggaataaacatttaaagactcccccggggacctggaggatggacttttccatggtggccggagcagcagcttacaatgaaaaatcagagactggtgctcttggagaaaactatagttggcaaattcccattaaccacaatgacttcaaaattttaaaaaataatgagcgtcagctgtgtgaagtcctccagaataagtttggctgtatctctaccctggtctctccagttcaggaaggcaacagcaaatctctgcaagtgttcagaaaaatgctgactcctaggatagagttatcagtctggaaagatgacctcaccacacatgctgttgatgctgtggtgaatgcagccaatgaagatcttctgcatgggggaggcctggccctggccctggtaaaagctggtggatttgaaatccaagaagagagcaaacagtttgttgccagatatggtaaagtgtcagctggtgagatagctgtcacgggagcagggaggcttccctgcaaacagatcatccatgctgttgggcctcggtggatggaatgggataaacagggatgtactggaaagctgcagagggccattgtaagtattctgaattatgtcatctataaaaatactcacattaagacagtagcaattccagccttgagctctgggatttttcagttccctctgaatttgtgtacaaagactattgtagagactatccgggttagtttgcaagggaagccaatgatgagtaatttgaaagaaattcacctggtgagcaatgaggaccctactgttgctgcctttaaagctgcttcagaattcatcctagggaagagtgagctgggacaagaaaccaccccttctttcaatgcaatggtcgtgaacaacctgaccctccagattgtccagggccacattgaatggcagacggcagatgtaattgttaattctgtaaacccacatgatattacagttggacctgtggcaaagtcaattctacaacaagcaggagttgaaatgaaatcggaatttcttgccacaaaggctaaacagtttcaacggtcccagttggtactggtcacaaaaggatttaacttgttctgtaaatatatataccatgtactgtggcattcagaatttcctaaacctcagatattaaaacatgcaatgaaggagtgtttggaaaaatgcattgagcaaaatataacttccatttcctttcctgcccttgggactggaannnnnnnnnnnnnnnnnnnnnnnnnnncagagattttgtttgatgaagttttaacatttgccaaagaccatgtaaaacaccagttaactgtaaaatttgtgatctttccaacagatttggagatatataaggctttcagttctgaaatggcaaagaggtccaagatgctgagtttgaacaattacagtgtcccccagtcaaccagagaggagaaaagagaaaatgggcttgaagctagatctcctgccgtcaatctgatgggattcaacgtggaagagatgtgtgaggcccacgcatggatccaaagaatcctgagtctccagaaccaccacatcattgagaataatcatattctgtaccttgggagaaaggaacatgacattttgtctcagcttc

SEQ ID NO: 183876 - DNA, 1378 bp, Homo Sapiens
actttgtacaaaaaagttgggagaaaagagaacaatgggcttgaagctagatctcctgccatcaatctgatgggattcaacgtggaagagatgtatgaggcccacgcatggatccaaagaatcctgagtctccagaaccaccacatcattgagaataatcatattctgtaccttgggagaaaggaacatgacattttgtctcagcttcagaaaacttcaagtgtctccatcacagaaattatcagcccaggaaggacagagttagagattgaaggagcccgggctgacctcattgaggtggttatgaacattgaagatatgctttgtaaagtacaggaggaaatggcaaggaaaaaggagcgaggcctttggcgctcgttaggacagtggactattcagcaacaaaaaacccaagacgaaatgaaagaaaatatcatatttctgaaatgtcctgtgcctccaactcaagagcttctagatcaaaagaaacagtttgaaaaatgtggtttgcaggttctaaaggtggagaagatagacaatgaggtccttatggctgcctttcaaagaaagaagaaaatgatggaagaaaaactgcacaggcaacctgtgagccataggctgtttcagcaagtcccataccagttctgcaatgtggtatgcagagttggctttcaaagaatgtactcgacaccttgcgatccaaaatacggagctggcatatacttcaccaagaacctcaaaaacctggcagagaaggccaagaaaatctctgctgcagataagctgatctatgtgtttgaggctgaagtactcacaggcttcttctgccagggacatccgttaaatattgttcccccaccactgagtcctggagctatagatggtcatgacagtgtggttgacaatgtctccagccctgaaacctttgttatttttagtggcatgcaggctatacctcagtatttgtggacatgcacccaggaatatgtacagtcacaagattactcatcaggaccaatgagaccctttgcacagcatccttggaggggattcgcaagtggcagccctgttgattaatctctacatcattttaacagctggtatggccttaccttgggtgaactaaccaaataatgaccatcgatggctcaaagagtggcttgaatatatcccatgggttatctgtatggactgactgggttattgaaaaggactagcccacatactagcatcttagtgccttaatctgtctttatgtcttggggttggggtaggtagataccaaatgaaacactttcagaccttccttctcttgcagtggttctttaatctcctttactaaagagataatattttgcatataaatgaagaaaatttt

SEQ ID NO: 183877 - DNA, 2527 bp, Homo Sapiens
  misc_feature (1910)..(1930): n is a, c, g, or t
ctttgtacaaaaaagttggctaccaagtaaccttttattcactttaatttcataataaagttagtagagtcactcaacttacaactttatttatgtggcttggcaaaaatcactataaggcagctctaaatttgccttgataagctaaataaattacttttataacttactaaagcagaacaaacagtgaaactttctaaaatattctatctggaatagggacaggggatcttttatttataatctcatcagatgagtgagttgttcacagatattttatgtttttttaattttctccaagaatatttatagaattccaaagaatcagaatagtttcaaaataattttcagtgataaaagagtgttgtaattaatcatattacactaaaattgggatacatctaaggaactttatcttactatcagtaggttttgcattgatatttctttttaaataaactactagttctttatattttgacaaaaagaacttaaattttatcaggaactgtaagataaatatctagtgcttataaattttctgtccttaaatttatgtgacagtgcaagatacttttgctcttttcatttaatataggcatcttccattgacattaataaaacttagaaacagtataattagtataacatttactctgaatttgaagatttcctgaaacaaagtttgtacaagaagcccaccttggaattctgaaggcttattttcttgtttgataagcttttcttttaaacttaggttttaagttggggaaagacttaattaactaatatagtattttctaaggttgatcatcttataccacgaatcgttaattttgacagttctactgatccgtaaatgataaccactgcaaattttttcagtataaaatttttcactgcaaaaaaatttcagtagaaaataaggatgcagggccagttacaatagtccttaagagagttaaattatagcacatgttttgacattgtaatatcttttactacttgaacatttaaatttctaaatgagaaaggtatatatattactgtaactgtagaagggaaaagggaaagtatttggttctaaaaaatgttagccttcctcgtaaaagtagcacaagcccacttatgaatcactgagaaaaagtgaaaaacttgagttggcaaagatgcagagcagcagtgcagatggcaatgaactctctgaattctcttttaccttatttagaagaatgcagagtaaagggaccttcttggttctgcaggaacttctcaagggatgaggagacagaacccctacttccaagtgctctatttgtattacccagatgactgaagcttaagagaaggcagggaagtatacaagcagagccagttctggtacaaacaaagaatttgacagggacaatggaagggtcttcttcaccactccttaccttctatgtgatggaaagactagagcttataaaagtacttccatttttttattctcctgaataccaaaggcaattaaagtcagctacaaatgacttgccagtgtcatgttttatttttgttatagatttttaaattatttccttcaagatcaattcttatcccatataatgcttagcttccaagaatattctttactttcttctgtcttttacagctctttgcattttgtagaccttaatactcaggttaaatattcattgcatttataagatcttctgcaaaaagcccagaaatggtccttttcaggtgcctcttcaaagagctgacaccttaccttgtgcctttggcacaaatgtgcagaatagatacatcagttggtgcataatcgaaaaaaataggaattttgaacactgttcttccttctacatttatttctcttcattttagaatcacactttttatgttaaaccagnnnnnnnnnnnnnnnnnnnnncaaccagtattaagttgttaaaaccaagggaatggggccctaaccaaaaagaagtctcaactcagaaaaataagtccccagtcaggtggttcttactttcttgtgggttgcacattttgtatctctctaacatcagcgtattcctgactttaagcaggtgtttatatgtaaaataaaacctgggtatcgaagggaaatgcattctttttatggagtattgaccctgatcctctatgatgtcatatagagcaactcagggctatacttgctagattttaaccaagcagtttgaaatattaatcatcatcctctcatcttctccactctccattgccaaagtctttgtcaaaactccaaatttgttgataaaagattgtgtttgccattctcatttataatgcagtttctccttaagcctggagttttttgaatgagtgcatgagtaaatgagagaatgtgtgaacgaacatttatgaagtatctaacatgtgccaagcattgtgcctggcactttcaatcattagaatgttttatgtgattccacagcattttctgtataagagtagctcacaacattttaaatgtttccaatatgaa

SEQ ID NO: 183878 - DNA, 1481 bp, Homo Sapiens
  misc_feature (1409)..(1423): n is a, c, g, or t
ctgaaagacccaatctgatggtacaggtagggaaagatagagctaaatctatagctttggttttctaatttagaacactttctcccctccccactccaagaatagattaaaaagtagaagtataaagatgttccacttttaatgcagaaatgtagacaattagctagttattactgtcagttgtaccctcccaccacctcaaaacaagctacattctttaaatgttctaagcaacttctagtcatatttatgcacatcagcttacacgctatatgtgtgaaaagtgggatattctttcagcatcaacttgtgatttcataattgctgaaattctttaaaggaataaaaagttatagactgcttttgtgacaataaaatcaaactttaattggggagccagataatattgccttttctttccaaaattttaatttatactttttagtaaaaaacataacacatttctcattcatttaaccaattaatccaaaggaaaaaagtgaagtactataatcacaggtacactaacaaacacttttacaaagacattcagaaatatttgcagcaggttttataagactctgatataaaacaaagtaaaataaaacgttttgaaatggcaaaatcggtttacctagcctgaattgcttcaaagaggcatttgcacttcttgtcctggcttaataaaacaaagtaaaataaaacattttgaaatttcaaaatcagtttagcctaaattgcttcaaagaggcatttgcacttcttgtcctggcttaaaaacaaaccctgaaattactttcttttatccaaatcaattgaccatattaatctgcataaagtctatgaggatacgttttgataaatgctataaacacaaaattaaggcaaatctgatagttattgtcaaataaatagcacatttagaagggcctttgttaataaaatgcctttaatgtatccagaggtatagatttcaaagggcaagtatgtacctgttgcacatttgattttcacagcattcatgaaagaggagacaatgatattcccatttcactgaaaactaaggtgacttgtttaaggtcatacagtccgatcagtggcaccaacacatttaccaatggccttggaatacagagtacagggcttcctgttggtagatttaccttcctaacctcacggagatgtgatccaagtatcaaaacaagtgtgagtcccttcaggtttggaaaatactccagccataacaggtgaagaggaaagtcagctcaagatttgtcatatgctacacaatttacagtaaaacactgggaaaagcaggaagctgatgtgaggaagggtgaagaatgatttgaaagattacaaaatggcaaagttcctccaaaacctataataagctaaaacaaactggnnnnnnnnnnnnnnnggtcttaattgggaagccaatattcacaccaaaggagggagtgggaggagaagaccaa

SEQ ID NO: 183879 - DNA, 1606 bp, Homo Sapiens
  misc_feature (897)..(927): n is a, c, g, or t
  misc_feature (1107)..(1121): n is a, c, g, or t
ttggtttcaagtggcagttcagattctcaattcactaagtgcttaaaaatgatgttcaagcacaagaatttatttttctagtataaaagatctagtatcagaaagatttgtttttgtatcattaagaatcttatattttgttgccctcttgggacttagttttatttgtaagtgcataaggatattttaatgaaaggaaagtaactaaaaaatggggttgggaagagggactaaggtggtaacctcattatttgccctggtagactgattctccctgggtaaaaaaaatgggaataaaaatgagcttgcatgataatttattaaatttcatgtgaagaactccagacctccagattgtgcaactaacataaaatgagctgcttgagagattgtaaataagatgaactattgattaatttgagtacccacagagtgctgtgtcttgacgacttaaaaatgaaaaagcaggattgccttttgagtagcttgcagtctagtggggagacaagcaggcaaacagtcacaacacagcaaaagcgaccttggagcatagtgggacttttggagtaggagtgctgcatttgactgagggaatcatggatacttcgcaggagaagtgaatttgagctcagacttgaaaactgaggaggagcttaccaagggacaaggaggagaaaacaataatttccaagtaaagaaggtataaaaagttagaagtgtactgtaaactttgataggcttttaggccttttttaaagcccaacttggcttctgtccattacctataagatatttaatgtcagtcagcctttaaatgtaggaataaaatggctggcatctaagcactttagtaaaagaggtttttacaaataactaaggattgtagagcttccttcnnnnnnnnnnnnnnnnnnnnnnnnnnnnnnnacatgaactcaacttattcctaacatttgtctacctcaaagaaatttcaagattatttagataacatggatatgtgccaaatcctttgagctgttaagatgataatttcctgctttcctcctacatcttctcctcccactccctcctttggtgtgaatattggcttcccaattaagaccnnnnnnnnnnnnnnnccagtttgttttagcttattataggttttggaggaactttgccattttgtaatctttcaaatcattcttcacccttcctcacatcagcttcctgcttttcccagtgttttactgtaaattgtgtagcatatgacaaatcttgagctgactttcctcttcacctgttatggctggagtattttccagacctgaagggactcacacttgttttgatacttggatcacatctccgtgaggttaggaaggtaaatctaccaacaggaagccctgtactctgtattccaaggccattggtaaatgtgttggtgccactgatcggactgtatgaccttaaacaagtcaccttagttttcagtgaaatgggaatatcattgtctcctctttcatgaatgctgtgagaatcagatgtgcaacaggtacagacttgccctttgaaatctatacctctggatacattagaggcattttattaacaaaggcccttc

SEQ ID NO: 183880 - DNA, 1198 bp, Homo Sapiens
ttggagatcgaatagatgctgaaaagcgtaagatatatgcattccttgacatcatttttaaagacattccttcaaatagtttccacacagaaattcctcactcccattatgagagattgtggttatatgtcttaaatttattataagctgcttcaaagaaagggtctgaatgtttgaattatgagtgaaatcatgtgaaattttgagttaaactctgtgatttgattttcagggtctttaaaatatatcttaatatcttcttcctctttattcaataatttctgtcttgcacttacacactcataacagccaaatatgaggcacaaaaatgttacaatcagtttgaaagcagcatcaattaatggtagattctattcacattccacaacccagaccaaatttttttcctattacgcagatgtgctgagcactttccagattgcccctgttggccaaaagcagcctgttacatcctggaattaagcacacttaaggtatttgagacaatttattaatgaaaatttccttggcagatttgacaaatgttggcaatatttttttaaaagttaaatcatattgctttcatgaataaatgaaaatataaaggtcatggatgcaaacaaatgttacatatacacattctgtctctccagatgaaaagaacatgcaaaaccatttaataaccaaaatatcaagtaaaattagttcccaacggggcagcagctttcaaatgagtgtccaatatttgcttctgctatagctgcaagaactgtaactggacccaagtagagaatgaagccacgtatagaactacgagaacacttttctgtgtttcccccatgccgtcctgtcacatcctcttacacgtcctctcttgatttgatagacaatattggcatcctgggtctcactgaggccgtgctatgtcctcagcagctgtttttgttgtttcgttattatgcccacaacaaaaaatcattccttagaaactcaccaagtttatctactgtgtaaatttatattattgttactaccaggtctcatcttttgtcaatgtcattgaataaatttcataagagttattctcagtgtgaattttaagctaatgccagatcctgcaaaaatctatgctaaccaggctgtagtacacactgttataaagaattttacttgtgtctaaaactacagtaattttgct

SEQ ID NO: 183881 - DNA, 1637 bp, Homo Sapiens
  misc_feature (350)..(363): n is a, c, g, or t
  misc_feature (1008)..(1096): n is a, c, g, or t
ttggggctttataccacagggggcattcagatgagtcttagaggaagagaagaaacatggcaagcagattacatctgagccgtttgaattgtgtttttctttcttcccatgtttattttctaagatctacctgaacttagagactcaagatatttttttaggaaacctcctacccatgtctgaggtagcaagtgcagcctcacgacagataccaggcaatccagagccacaaaacgtgattcctccaggctctgcctggcctgaccctgtcctgtcagctgggtttacataccagtcccattcttccttttcaatacctacccccaaatcttctcctaaccaccatctgnnnnnnnnnnnnnnaaagcattttttgctttaaaagcatcctgaccccaatttctttgagctcacgggccttttgctgaaggtctctcagggtgtagtggtgtggctctctggacttaacgtcactctcagaggtcagaaccttggagatcagaactgattctcaccaggtgtgagaggtgtggtagcagattgcaatgctctgcacctcttccttgcaagtgagcaacttcaggctctctgggcagaggctggcccactgtagtttgcagacatgctctccagatggttttactaagtcccctctccctgatagggaatcctgctggaccagcgcagccctggtgtggagaggttaaaagacttgcacaggatcaccaagtcatgctgtagagccaggattcctagacccagggctctgcactctcaaggctggccccatgtgctcaagggggtctaatgtttgggctccaaactaaccatctcggagctgggctcctcatttactgccaaaccctcagcttatgtagctagaaagggccctggagtgagaaagcctggattttcaaattgatgctcccctactgactagctgtgccactctgggcaaatgctcttccttgagcctgtttccacacctgtaaagtggggatgatgatnnnnnnnnnnnnnnnnnnnnnnnnnnnnnnnnnnnnnnnnnnnnnnnnnnnnnnnnnnnnnnnnnnnnnnnnnnnnnnnnnnnnnnnnntccttcctgcctttagtagggacctgctctgtgctcacacctcggctgcatgcaccctgctgtgacggaggctagtgtggaagaggtcctgtcctcagggaattaactgtcttattgggagacaacaactgtcctccttggaacacccaagaaaccatgcaaagcagtggacaacacagaacacgccctcctcctcgctgcctgcagctccaatctgattctgcttgggaatgggcggagcacgtgggctgcttaactgctgtataggacaagccccttacccctctctgggcccatgaattcctggcttggtttatgttctgatttgacacactgattttaatcttcgaatcatgacactgagtgcagaggaggtggcattccgacagcagacatacatgttggtgtgaagactgggacgacactgggtagaatctagtttttaattattattaatataaaggatcaaattaatttaaatatgattctgaagtctacagaacttttagttctgtgctgtctatgtggacactttggtaaa

SEQ ID NO: 183882 - DNA, 1157 bp, Homo Sapiens
  misc_feature (239)..(327): n is a, c, g, or t
ttggctcaaggctggccccatgtgctcaagggggtctaatgtttgggctccaaactaaccatctcggagctgggctcctcatttactgccaaaccctcagcttatgtagctagaaagggccctggagtgagaaagcctggattttcaaattgatgctcccctactgactagctgtgccactctgggcaaatgctcttccttgagcctgtttccacacctgtaaagtggggatgatgatnnnnnnnnnnnnnnnnnnnnnnnnnnnnnnnnnnnnnnnnnnnnnnnnnnnnnnnnnnnnnnnnnnnnnnnnnnnnnnnnnnnnnnnnntccttcctgcctttagtagggacctgctctgtgctcacacctcggctgcatgcaccctgctgtgacggaggctagtgtggaagaggtcctgtcctcagggaattaactgtcttattgggagacaacaactgtcctccttggaacacccaagaaaccatgcaaagcagtggacaacacagaacacgccctcctcctcgctgcctgcagctccaatctgattctgcttgggaatgggcggagcacgtgggctgcttaactgctgtataggacaagccccttacccctctctgggcccatgaattcctggcttggtttatgttctgatttgacacactgattttaatcttcgaatcatgacactgagtgcagaggaggtggcattccgacagcaggacatacatgttggtgtgaagactgggacgacactgggtagaatctagtttttaattattattaatataaaggatcaaattaatttaaatatgattctgaagtctacagaacttttagttctgtgctgtctatgtggacactttggtaaaatgcaaattatgatatggacgttatcattggtctggtgagatgtttcatatttgtgacagttaatttaaaaattatgagttaatgctgcctgtgtctatggggttctgtcttctttgatagccatctattcatctggatcatgggaccctctctaatccttccaccaatcaaataagctattgctattggtttggagttgagatatcagtctcggaaacttctgaaaaatgctaataattacccaaggattatgtcaaattttaaaataaatgtgtgtgtgtttcttt

SEQ ID NO: 183883 - DNA, 1140 bp, Homo Sapiens
  misc_feature (292)..(380): n is a, c, g, or t
  misc_feature (1025)..(1037): n is a, c, g, or t
gggcccagagagggtaggggctgtccctatacagcagtaagcagcccacgtgctccgcccatcccaagcagaatcagattggagctgcaggcagcgaggaggagggcgtgttctgtgttgtccactgctttgcatggtttcttgggtgttccaaggaggacagttgttgtctcccaataagacagttaattccctgaggacaggacctcttccacactagcctccgtcacagcagggtgcatgcagccgaggtgtgagcacagagcaggtccctactaaaggcaggaaggannnnnnnnnnnnnnnnnnnnnnnnnnnnnnnnnnnnnnnnnnnnnnnnnnnnnnnnnnnnnnnnnnnnnnnnnnnnnnnnnnnnnnnnnatcatcatccccactttacaggtgtggaaacaggctcaaggaagagcatttgcccagagtggcacagctagtcagtaggggagcatcaatttgaaaatccaggctttctcactccagggccctttctagctacataagctgagggtttggcagtaaatgaggagcccagctccgagatggttagtttggagcccaaacattagatccccttgagcacatggggccagccttgagagtgcagagccctgggtctaggaatcctggctctacagcatgacttggtgatcctgtgcaagtcttttaacctctccacaccagggctgcgctggtccagcaggattccctatcagggagaggggacttagtaaaaccatctggagagcatgtctgcaaactacagtgggccagcctctgcccagagagcctgaagttgctcacttgcaaggaagaggtgcagagcattgcaatctgctaccacacctctcacacctggtgagaatcagttctgatctccaaggttctgacctctgagagtgacgttaagtccagagagccacaccactacaccctgagagaccttcagcaaaaggcccgtgagctcaaagaaattggggtcaggatgcttttaaagcaaaaaatgctttnnnnnnnnnnnnncagatggtggttaggagaagatttgggggtaggtattgaaaaggaagaatgggactggtatgtaaacccagctgacaggacagggtcgggccaggcagaccaa

SEQ ID NO: 183884 - DNA, 1367 bp, Homo Sapiens
  misc_feature (225)..(236): n is a, c, g, or t
  misc_feature (881)..(969): n is a, c, g, or t
ttggcctgaacttagagactcaagatatttttttaggaaacctcctacccatgtctgaggtagcaagtgcagcctcacgacagataccaggcaatccagagccacaaaacgtgattcctccaggctctgcctggcctgaccctgtcctgtcagctgggtttacataccagtcccattcttccttttcaatacctacccccaaatcttctcctaaccaccatctgnnnnnnnnnnnnaaagcattttttgctttaaaagcatcctgaccccaatttctttgagctcacgggccttttgctgaaggtctctcagggtgtagtggtgtggctctctggacttaacgtcactctcagaggtcagaaccttggagatcagaactgattctcaccaggtgtgagaggtgtggtagcagattgcaatgctctgcacctcttccttgcaagtgagcaacttcaggctctctgggcagaggctggcccactgtagtttgcagacatgctctccagatggttttactaagtcccctctccctgatagggaatcctgctggaccagcgcagccctggtgtggagaggttaaaagacttgcacaggatcaccaagtcatgctgtagagccaggattcctagacccagggctctgcactctcaaggctggccccatgtgctcaagggggtctaatgtttgggctccaaactaaccatctcggagctgggctcctcatttactgccaaaccctcagcttatgtagctagaaagggccctggagtgagaaagcctggattttcaaattgatgctcccctactgactagctgtgccactctgggcaaatgctcttccttgagcctgtttccacacctgtaaagtggggatgatgatnnnnnnnnnnnnnnnnnnnnnnnnnnnnnnnnnnnnnnnnnnnnnnnnnnnnnnnnnnnnnnnnnnnnnnnnnnnnnnnnnnnnnnnnntccttcctgcctttagtagggacctgctctgtgctcacacctcggctgcatgcaccctgctgtgacggaggctagtgtggaagaggtcctgtcctcagggaattaactgtcttattgggagacaacaactgtcctccttggaacacccaagaaaccatgcaaagcagtggacaacacagaacacgccctcctcctcgctgcctgcagctccaatctgattctgcttgggaatgggcggagcacgtgggctgcttaactgctgtataggacaagccccttacccctctctgggcccatgaattcctggcttggtttatgttctgatttgacacactgattttaatcttcgaatcatgacactgagtgcagaggaggtggcattccgacagcaaggacat

SEQ ID NO: 183885 - DNA, 1506 bp, Homo Sapiens
ctttgtacaaaaaagttggctgtcgttgcagagattgcgggcggctgagacgccgcctgcctggcacctaggagcgcagcggagccccgacaccgccgccgccgccatggagtccgagaccgaacccgagcccgtcacgctcctggtgaagagccccaaccagcgccaccgcgacttggagctgagtggcgaccgcggctggagtgtgggccacctcaaggcccacctgagccgcgtctaccccgagcgtccgcgtccagaggaccagaggttaatttattctgggaagctgttgttggatcaccaatgtctcagggacttgcttccaaagcaggaaaaacggcatgttttgcatctggtgtgcaatgtgaagagtccttcaaaaatgccagaaatcaacgccaaggtggctgaatccacagaggagcctgctggttctaatcggggacagtatcctgaggattcctcaagtgatggtttaaggcaaagggaagttcttcggaacctttcttcccctggatgggaaaacatctcaaggcctgaagctgcccagcaggcattccaaggcctgggtcctggtttctccggttacacaccctatgggtggcttcagctttcctggttccagcagatatatgcacgacagtactacatgcaatatttagcagccactgctgcatcaggggcttttgttccaccaccaagtgcacaagagatacctgtggtctctgcacctgctccagcccctattcacaaccagtttccagctgaaaaccagcctgccaatcagaatgctgctcctcaagtggttgttaatcctggagccaatcaaaatttgcggatgaatgcacaaggtggccctattgtggaagaagatgatgaaataaatcgagattggttggattggacctattcagcagctacattttctgtttttctcagtatcctctacttctactcctccctgagcagattcctcatggtcatgggggccaccgttgttatgtacctgcatcacgttgggtggtttccatttagaccgaggccggttcagaacttcccaaatgatggtcctcctcctgacgttgtaaatcaggaccccaacaataacttacaggaaggcactgatcctgaaactgaagaccccaaccacctccctccagacagggatgtactagatggcgagcagaccagcccctcctttatgagcacagcatggcttgtcttcaagactttctttgcctctcttcttccagaaggccccccagccatcgcaaactgatggtgtttgtgctgtagctgttggaggctttgacaggaatggactggatcacctgactccagctagattgcctctcctggacatggcaatgatgagtttttaaaaaacagtgtggatgatgatatgcttttgtgagcaagcaaaagcagaaacgtgaagccgtgatacaaattggtgaacaaaaaaatgcccaaggcttctcatgtctttattctgaagagctt

SEQ ID NO: 183886 - DNA, 1788 bp, Homo Sapiens
tgtacaaagaactagacttaaggggagtgagtattaatgttctcaggcatgaagcagaattttacgggatcactccattagagaaaataaaaatggagtactgtttttctgtttgcatgtactcttgacaagtttgctttgaaatgtttttagtaagaaggcttctcttatgtgaagaattggagcgttcctcttgtggcagtgtcctttttcatggttacttgcccccaccaggtattcctagtcgtaaaataaacaacacagtcagatctgctgattctaggaatggtctaaattctacagaaggtgaagcccggggaaatggtacacagcctgttctctctggaacgggagaagaaactgttaggctaggatttcctgtggatccacgaaaggtgctaatagtagctggccatcacaactggattgtagctgcatatgcccattttgctgtgtgttacagaatcaaagaatcttcaggatggcagcaagtgtttacgagcccatatttggattggactatcgaacgagtagctttaaatgcaaaggtggttggagggccacatggagacaaagacaaaatggttgctgttgcctcagagagtagcatcatcttgtggagtgttcaggatgggggaagtggaagtgaaattggagtgttcagcctgggtgttcctgtagatgctctcttctttattggtaaccagttggtggccacgagtcatacagggaaagtgggagtgtggaatgctgtcactcagcactggcaggttcaagatgttgttcctataactagttatgacactgctggatcattccttctgcttggatgtaacaatggatcaatatattacatagatatgcagaagttccccttgcgaatgaaagataatgatcttcttgtaactgaactgtatcatgatccttcaaatgatgctattactgctctgagtgtttacctcacacccaaaacaagtgtcagtggtaactggatcgagatcgcctatggtacgagctctggagcagtacgagtgattgtacaacacccagagacagttgggtcaggtcctcagctttttcagactttcacagttcaccgaagtcccgtaacaaaaatcatgctatcagagaagcatcttgtatcagtctgtgcagataataatcatgtccggacgtggacagtaacacgattcagaggaatgatctctactcagccaggttctactcctttagcgtcattcaagatactatccctggaggagacagaaagtcatggtagctattcctctggaaatgacataggaccttttggagagcgagacgatcaacaggtgtttatccagaaagttgttcccatcaccaacaaactatttgtaagactctcatcgactggaaaaagaatatgtgagatccaggctgttgactgtactacaatatcctcatttacagtgagggaatgtgagggatccagtaggatgggctcaagaccaaggcgctacttgttcacaggccatacaaatggcagtattcaaatgtgggatctgaccactgctatggatatggttaacaaaagtgaagataaggatgtaggtggtccaaccgaagaagagctactcaaattactcgatcaatgtgatttgagcacatctcgctgtgctactcctaacatcagtccagcaacttccgtagttcagcatagccacttacgagaatcaaattctagccttcagcttcagcaccatgataccacccatgaagcagctacttacggttccatgaggccttaca

SEQ ID NO: 183887 - DNA, 1258 bp, Homo Sapiens
ttggatccagttttctcacttttgttaagtagtcacaaatcaagtatagttttaagataaatatgtcatttgccacttatactctgatctgtgtaatatagatgatagtgaaaaaagttaaaatgagtttttaaaagtaattttgtattcttttgtgttctctttctctgctagtctgtgcagataataatcatgtccggacgtggacagtaacacgattcagaggaatgatctctactcagccaggttctactcctttagcgtcattcaagatactatccctggaggagacagaaagtcatggtagctattcctctggaaatgacataggaccttttggagagcgagacgatcaacaggtgtttatccagaaagttgttcccatcaccaacaaactatttgtaagactctcatcgactggaaaaagaatatgtgagatccaggctgttgactgtactacaatatcctcatttacagtgagggaatgtgagggatccagtaggatgggctcaagaccaaggcgctacttgttcacaggccatacaaatggcagtattcaaatgtgggatctgaccactgctatggatatggttaacaaaagtgaagataaggatgtaggtggtccaaccgaagaagagctactcaaattactcgatcaatgtgatttgagcacatctcgctgtgctactcctaacatcagtccagcaacttccgtagttcagcatagccacttacgagaatcaaattctagccttcagcttcagcaccatgataccacccatgaagcagctacttacggttccatgaggccttacagagaaagtcctttattagcaagggcaagaaggactgagagctttcacagttatagggacttccagactattaatttgaacagaaatgtagaaagagctgtccctgaaaatggtaacttgggtccaatacaagctgaagtgaaaggggcaacaggggaatgtaatatatctgagagaaagtctcctggagtagaaataaaaagtttgagagaattggatagtggattggaagtgcataaaatagctgaaggtttttcagaatccaagaaaaggtcatcagaagatgaaaatgaaaataaaatagagtttaggagaaaggaggatttgaagggggaggattccttggaagaaagaaagttccctatctggcatcatcaccaagtacttccgatggaggaactgactcacctggtactgcgtccccatctcctacaaagactact

SEQ ID NO: 183888 - DNA, 1595 bp, Homo Sapiens
  misc_feature (890)..(899): n is a, c, g, or t
ttggttcaattcgagcactggcgttaagagttttgagggaaattctgagaaatcaaccagcaagatttaaaaactacgccgagctgacgattatgaagactctggaagcccacaaagactcccataaggaggtggtgagagcggctgaggaggctgcgtccacactggccagttccatccacccggagcagtgcatcaaggtgctctgccccatcatccagacggccgactaccccatcaaccttgctgccatcaagatgcagaccaaagtcgtcgagaggatcgcaaaggagtcattgctgcagctccttgtcgacatcatcccaggcttgctgcagggttatgacaacaccgaaagtagtgtgcgtaaggccagcgtgttttgcttagtggcaatttattccgtaatcggagaagacctgaaacctcaccttgcacagctcacagggagcaagatgaagctactaaacttatacataaagagggcccagaccaccaacagcaacagcagctcctcctccgatgtctccacgcacagctaatggcagtacctgtctcttgtgtagacctagaagcaatcggtggtgcctctcagagacctttccccacccccttcatcggctgcccagtcagtacaaggaggcccacaaatatttattacaatcagtattttggtcccttccagcttttctgtagaatcttactggtattgaatgtaaaggaagcaaggcctgtattgcagtcttcatacaaaacaaaaggaataagaacagaaaagagccatactgaaacatgtcttgtacagcctgctgagatggcgaaaccctgtgtgtggggtgcagtttttaaaaatcagagcgctctagccactacttggtagaaagtagcannnnnnnnnncagttaataacatatttgggggtggggtggggtgttactttgtgttcttcctccttagcctattttcttgtgcgtatggtctgtgtggggcccctttcacagctgacaccacgaaaggtgatatatctttaagttgtgttctgagacctactaaaaatgggaatcaagtcttggcaagaacagtctgaagatggccttttaacaaacgctgggaattttgcttgtcatatccagactggaggccgactgccctggctttcagcgtagaattgggagtgcaccctgacagtctccttccagctctccctaatcgactccaccgacaaggtccctaccccagagcttccatgcaaaggaattcttcaagtttaaatctggacacaaaaataagataaatgtatggcatcatttagggatgcctgagatggcagttcatgaagcacagaagataaaagaaaaagtctttcatctttactgctgagatccttgggaacactgttgtcatgggggctctgccaagactctcatctctgggctacacggtgattcagattgtgcaccaacttgtttcctcccctcaagttctgcctagcagttcagttctacatggtctcagttaatctggtaaatggcatctttacatcttattctgacttctcattttatgtgggattaaaatcaagaaaagcctaaaaa

SEQ ID NO: 183889 - DNA, 1048 bp, Homo Sapiens
  misc_feature (76)..(85): n is a, c, g, or t
ttggcgaaaccctgtgtgtggggtgcagtttttaaaaatcagagcgctctagccactacttggtagaaagtagcannnnnnnnnncagttaataacatatttgggggtggggtggggtgttactttgtgttcttcctccttagcctattttcttgtgcgtatggtctgtgtggggcccctttcacagctgacaccacgaaaggtgatatatctttaagttgtgttctgagacctactaaaaatgggaatcaagtcttggcaagaacagtctgaagatggccttttaacaaacgctgggaattttgcttgtcatatccagactggaggccgactgccctggctttcagcgtagaattgggagtgcaccctgacagtctccttccagctctccctaatcgactccaccgacaaggtccctaccccagagcttccatgcaaaggaattcttcaagtttaaatctggacacaaaaataagataaatgtatggcatcatttagggatgcctgagatggcagttcatgaagcacagaagataaagaagaagtctttcatctttactgctgagatccttgggaacactgttgtcatgggggctctgccaagaccctcatctctgggctacacggtgattcagattgagcaccaacttgtttcctcccctcaaagttctgcctaagccgttcagttctaacatggtctcagttaatctggtaaatggcatctttaccatcttagttctgacttctcagtttaatgtgggattaagagccaagaaaagcctagagagactggatatcacaattttttttaattttataaactgaagtagttccttgaatgtctgttgatgaaatagtcactgtttaaggaaaaaagtaattatgaggtgtagcagattgcagaaaaacaggattagaaacacacttaaaaagaacacacatttagagtctctcttcctcctcagcgaaccactaaccccctttttaaaaaacacctttagagcctaattactccataaaagtactagaggtttggagtctggttaaa

SEQ ID NO: 183890 - DNA, 1829 bp, Homo Sapiens
  misc_feature (1741)..(1753): n is a, c, g, or t
ttggcttctcttcccgtctgaggtggcggtcggtctcgccttgtcgccagctccattttcctctctttctcttcccctttccttcgcgcccaagagcgcctcccagcctcgtagggtggtcacggagcccctgcgccttttccttgctcgggtcctgcgtccgcgcctgccccgccatgaatgaggagtacgacgtgatcgtgctgggcaccggcctgacggaatgtatcctgtcaggtataatgtcagtgaatggcaagaaagttcttcatatggatcgaaacccttactacggaggagagagtgcatctataacaccattggaagatttatacaaaagatttaaaataccaggatcaccacccgagtcaatggggagaggaagagactggaatgttgacttgattcccaagttccttatggctaatggtcagctggttaagatgctgctttatacagaggtaactcgctatctggattttaaagtgactgaagggagctttgtctataagggtggaaaaatctacaaggttccttccactgaagcagaagccctggcatctagcctaatgggattgtttgaaaaacgtcgcttcaggaaattcctagtgtatgttgccaacttcgatgaaaaagatccaagaacttttgaaggcattgatcctaagaagaccacaatgcgagatgtgtataagaaatttgatttgggtcaagacgttatagattttactggtcatgctcttgcactttacagaactgatgattacttagatcaaccgtgttatgaaaccattaatagaattaaactttacagtgaatctttggcaagatatggcaaaagcccatacctttatccactctatggccttggagaactgccccaaggatttgcaaggctaagtgctatttatggaggtacctatatgctgaataaacccattgaagaaatcattgtacagaatggaaaagtaattggtgtaaaatctgaaggagaaattgctcgctgtaagcagctcatctgtgaccccagctacgtaaaagatcgggtagaaaaagtgggccaggtgatcagagttatttgcatcctcagccaccccatcaagaacaccaatgatgccaactcctgccagatcattattccacagaaccaagtcaatcgaaagtcagatatctacgtctgcatgatctcctttgcgcacaatgtagcagcacaagggaagtacattgctatagttagtacaactgtggaaaccaaggagcctgagaaggaaatcagaccagctttggagctcttggaaccaattgaacagaaatttgttagcatcagtgacctcctggtaccaaaagacttgggaacagaaagccagatctttatttcccgcacatatgatgccaccactcattttgagacaacgtgtgatgacattaaaaacatctataagaggatgacaggatcagagtttgactttgaggaaatgaagcgcaagaagaatgacatctatggggaagactaacagcagtacatgttattatgtaattaggacacatttaaaatttggcaaataatgcatataatgaaatcaatattgtaaggcctgcttttgtaatgaaaatggagagaatgaagagcgctgtgccagtaaatactccccttcacctttctaattattaacttgttttcatggagtggctattcagcattggcagttaccacattctgttcaatttaaccaaactggcnnnnnnnnnnnnnctagtgaagttaaacaaacattgggataccgacacagacaacttgagacagtttttttaatcttttaatcagtgta

SEQ ID NO: 183891 - DNA, 1652 bp, Homo Sapiens
  misc_feature (323)..(335): n is a, c, g, or t
  misc_feature (1091)..(1117): n is a, c, g, or t
  misc_feature (1402)..(1420): n is a, c, g, or t
ttgggtgtccatcattctgtgtagaagcttaaatatgtaatgtaaccaaactccagtattaaaaatctctcatgttgttttctttatacaaagcaagataacggcatataacactgccattacatggcaaaatgtttgctaccttagtttaaaaaacaatctcaaacaaaagacttgcttcaaggtgtttttaaatagcagtgattcagaattttttttaatgaaagtataattgcactaaccttcttcctgctgctctgattctgcatttgtggtacttgtgactacgttttttcaaatatagatagatttaagctgctaannnnnnnnnnnnnagtaatcactactatatcatgtcttttactctgtttataatatcaagtattttcttaaagatatagatattaaaccttgtgctcatgcaacttagagtaacatatacagacaaatgattgcatgaggccatgtttatatgtgtgactaataaggcttgtcatgattaacataatccaggtatgtcatttctgaagagaatagtcatcaaatttatatctcgaagattttaattaaggaattgcttattgttgagcttagcaaattaataacactatttctgtcactaattattttgaggccttttagtactaaaattttaacctgtgttctaagtagaaactgatttaacccaagtaatgcagctttgattgatttcagcattcgttgctttgctatttttacaaaacagcattgattgaagcaagtcttggttttactaaggtagggtagcatttgctattggtaaagagaataaatacacttaatttcacaatacattgttatatgtaccccagttgttgttagtggggactatgatactgtaataatatttttaaaaatttacatcaagagaggcagtcattcacgatggttttgtgccagctctttttagggttttggatcacattagagatatttagaacatattaccctgtgacttacgtaggaaacctaatatgctgagtatctggcacttgaattcctgcttttattgctggaggtccacatctgtggttgacctctgttattgtttnnnnnnnnnnnnnnnnnnnnnnnnnnntctgtgcaataattttaaaatgtgctcccaggaatagacacaaatgttttgagtatcttttaagctgcattttcctttagtgatgcatttgtcaattgcactgaatttaaatctgaaagtcagaggtgattattgatagtacttttgtattttgatatggacagtttattcatttgcatacagttattgactttttcccagctgattaaaagatagtcaagaaattctgcaatatagctgccaaaatagacagctacatttttatgatattgtcatcttttctgnnnnnnnnnnnnnnnnnnnctttagctattttacttaagcataatagccacaataggacatataaaagattataaatacagagctttattatcctgacgtcttgggtcttttaagtatatacttttctgaaaggtatccattttgtagcttgggttcttcatgagcatacgattgtttatttttgctgctgttctcaacatcatcattgcctgctgatgtgccacgatgctgctccaatagacagcaataa

SEQ ID NO: 183892 - DNA, 1123 bp, Homo Sapiens
ttggataaatacagagctttattatcttttatatgtcctattgtggctattatgcttaagtaaaatagccacaataggacatataaaagattataaatacagagctttattatcctgacgtcttgggtcttttaagtatatacttttctgaaaggtatccattttgtaggcttgggttcttcatgagcatacgattgtttatttttgctgctgttctcaacatcatcattgcctgctgatgtgccacgatgctgctccaatagacagcaataagattgtctctaatttgagcagtaacatgattgcaagagaccaagtttcacagcttgtaaagttctgtatttgggattcttgcttatttttccgcctgtgtttttctgagaacttattcctgatgatcaattgaatccagtagtttttctatgctatttgttgttgtataagctactgtaagaaacttatcataaggaaaaatagaaaggaaaacttgaatcaatactcattgattaaaatggaataaagaaagagcagctgccacttttaaacaacataaaggaatatctttttttgtctccgtgtaggaaatcccataagttcttatatttgttccagttcccatttcctgccattgaccagataacatcattgactttcaaatgacttttagaagtgataactcttaatttcctaatagatactagattgtattgaattctgttttaattattctctaggtaagtatgttttaggattaaataccttttacagatactgaaagtgcctccttttgtggtgtaaaaaacaaattatggtgcaaaaagtaatcactagattgaaatacatgaaggttttttgctttttgacatacgaaaatgtcaagagaaaggccaaagatttgtactttttcacttacaaagcactcctttttcccttaaacttctttctgtcaaattagatttaatgagagagtactatttttaagagctatctgtttatgtagaatgattttgttaagagtaatgtaaactattattgagtagaggcctaaagaggactgtgcatttttgctatttaaaggaatcacaaatgatcatacttaagtgagcaaaaatgacaagtttta

SEQ ID NO: 183893 - DNA, 1434 bp, Homo Sapiens
  misc_feature (281)..(308): n is a, c, g, or t
tatatgcccgtagttattcaccctgcttcaacactgtcaacgtaaaggcagaaataaagcaagctatcaatacctcagaactactgatataagacatcaaatttctaaatcagtgtattaaaaaagtgaacacttcctctttcttctctcttctacatttaactagaatcatgtttaaaaaaaactgatattaaatgtgacacttcagagctactactggaaggagtaattcataacttccctaccctccttccatccctgctgattcaggagaagggggnnnnnnnnnnnnnnnnnnnnnnnnnnnncaaccagggtctcttgtagatttgctgctattccacaaaatgttggcatttgctgccatgccacaatgttggtccactgaaataggatttctgcggaaactgtcaacagtagtaattcaccatatgcaagtaccatccttatcatgcgagaataatcacaggttctgtagaaatgtacaatgtacttaagataatgaaaattgtagcgctgcatttgagatttatttctctacttagctagtaaaacttgtcatttttgctcacttaagtatgatcatttgtgattcctttaaatagcaaaaatgcacagtcctctttaggcctctactcaataatagtttacattactcttaacaaaatcattctacataaacagatagctccttaaaaatagtactctctcattaaatctaatttgacagaaagaagtttaagggaaaaaggagtgctttgtaagtgaaaaagtacaaatctttggcctttctcttgacattttcgtatgtcaaaaagcaaaaaaccttcatgtatttcaatctagtgattactttttgcaccataatttgttttttacaccacaaaaggaggcactttcagtatctgtaaaaggtatttaatcctaaaacatacttacctagagaataattaaaacagaattcaatacaatctagtatctattaggaaattaagagttatcacttctaaaagtcatttgaaagtcaatgatgttatctggtcaatggcaggaaatgggaactggaacaaatataagaacttatgggatttcctacacggagacaaaaaaagatattcctttatgttgtttaaaagtggcagctgctctttctttattccattttaatcaatgagtattgattcaagttttcctttctatttttccttatgataagtttcttacagtagcttatacaacaacaaatagcatagaaaaactactggattcaattgatcatcaggaataagttctcagaaaaacacaggcggaaaaataagcaagaatcccaaatacagaactttacaagctgtgaaacttggtctcttgcaatccaacttttttgtacaaagttggccattaaagaaaagcattgctcgatcgaatttgttgcaa

SEQ ID NO: 183894 - DNA, 2069 bp, Homo Sapiens
  misc_feature (818)..(845): n is a, c, g, or t
  misc_feature (1125)..(1137): n is a, c, g, or t
gagcaatgcttttctttaaaggcaactttgtacaaaaaagttgggttcttatattccgttccagttcccatttcctgccattgaccagataacatcattgactttcaaatgacttttagaagtgataactcttaatttcctaatagatactagattgtattgaattctgttttaattattctctaggtaagtatgttttaggattaaataccttttacagatactgaaagtgcctccttttgtggtgtaaaagacaaattatggtgcaaaaagtaatcactagattgaaatacatgaaggttttttgctttttgacatacgaaaatgtcaagagaaaggccaaagatttgtactttttcacttacaaagcactcctttttcccttaaacttctttctgtcaaattagatttaatgagagagtactatttttaaggagctatctgtttatgtagaatgattttgttaagagtaatgtaaactattattgagtagagggctaaagaggactgtgcatttttgctatttaaaggaatcacaaatgatcatacttaagtgagcaaaaatgacaagttttactagctaagtagagaaataaatctcaaatgcagcgctacaattttcattatcttaagcacattgtacatttctacagaacctgtgattattctcgcatgataaggatggtacttgcatatggtgaattactactgttgacagtttccgcagaaatcctatttcagtggaccaacattgtggcatggcagcaaatgccaacattttgtggaatagcagcaaatctacaagagaccctggttgnnnnnnnnnnnnnnnnnnnnnnnnnnnncccccttctcctgaatcagcagggatggaaggagggtagggaagttatgaattactccttccagtagtagctctgaagtgtcacatttaatatcagttttttttaaacatgattctagttaaatgtagaagagagaagaaagaggaagtgttcacttttttaatacactgatttagaaatttgatgtcttatatcagtagttctgaggtattgatagcttgctttatttctgcctttacgttgacagtgttgaagcagggtgaataactagggcatatannnnnnnnnnnnngtaagctgtttcatgatgttttctttggaatttccggataagttcaggaaaacattctgcatgttgtatctagtctgatgtacttatccatctcattacaaacaaaaacacacagactgcatttgtagctctgtaatccttgaatacggaagtaaattttcttctttcctgactttgacattgtagctatactgtttccatttttgtttttacaaatcctttgggtctaattctgtgagcctacctatagcactggattaaaatgtctgcatcatttctttagttatccagttaactttaaaactgttgtaaaagtgtaaaccagcccatgacaggtttttgtacatgttaaagaacttcattgttcagttttcatgattattgtgtaaggaagactgatgtagatgttctgtgctgtcctggaccatgttaattacacttacgacgtattttagttccacatcacaatgatttgtccccagtgacccttttatcctttctaggcacatttcttgttgttgttgttgttgcagttcccctttgcattgtattgctttgacaactgtaatttgaatcagatctgaaagaggtccagaataaaatatattttgatattatgttggctgtgtacatatataaaacctttgatgtctatgtagtttatatagactatttactagtcaggtaaagagagagggatggtatttcttgtttacagtttgtttacattttaattgcttttacttctccagtgttctattgtagaataaacctttttttccaagttagccttcataacctataacacattcattctctcccatactggtgttactgattaataactgccatcagaacccaaaccactgtttttcttaaacgtattgtttcccagatatatactttaggcccatataaaattacaaatttta

SEQ ID NO: 183895 - DNA, 1891 bp, Homo Sapiens
tttgtacaaaaaagttggggaggatcggcggccggtgagggggaagcaagtctggtctctgtgattgaagaagtcggctctgggctccagtgcgggaatcacacacatacctcagaatgccgggtctaagttgtagattttatcaacacaaatttcctgaggtggaagatgtagtgatggtgaatgtcagatccattgctgaaatgggggcttatgtcagcttgctggaatacaacaacattgaaggcatgattcttcttagtgaattatccagaaggcgtatccgttctatcaacaaactcatccgaattggcaggaatgagtgtgtggttgtcattagggtggacaaagaaaaaggatatattgatttgtcaaaaagaagagtttctccagaggaagcaatcaaatgtgaagacaaattcacaaaatccaaaactgtttatagcattcttcgtcatgttgctgaggtgttagaatacaccaaggatgagcagctggaaagcctattccagaggactgcctgggtctttgatgacaagtacaagagacctggatatggtgcctatgatgcatttaagcatgcagtctcagacccatctattttggatagtttagatttgaatgaagatgaacgggaagtactcattaataatattaataggcgcttgaccccacaggctgtcaaaattcgagcagatattgaagtggcttgttatggttatgaaggcattgatgctgtaaaagaagccctaagagcaggtttgaattgttctacagaaaacatgcccattaagattaatctaatagctcctcctcggtatgtaatgactacgacaaccctggagagaacagaaggcctttctgtcctcagtcaagctatggctgttatcaaagagaagattgaggaaaagaggggtgtgttcaatgttcaaatggagcccaaagtggtcacagatacagatgagactgaacttgcgaggcagatggagaggcttgaaagagaaaatgccgaagtggatggagatgatgatgcagaagaaatggaagccaaagctgaagattaactttgtgggaaacagagtccaatttaaggaacacagagcagcgcttcctggctgtaaatcctagacttgaaagttttccagtattgaaaacttcaaagctgaatattttttatttctaagtatttaaatgttctaacagatcagaacatgaaatgccctcctaaatgtcagctgttgtcacacagtagctccaacactttgagcatttttaagggagtggcctcatttcactagagacaaatctttaagaatagttctaaaattgggcttgtgatttccatttctgatgtctccagattggcacccctttctagttcaatgcctcacgagatttgccaggggcatccaaggcaaacaatcccaatctttctatataaaatgtattcaagcaaacatcaaataaatttctgggatatttaactataggcttcttccttcttgtcaccagttaaaagcattttaatactaagaccctaattcttttatctttattttagtcttgatgtggaactgtaggagcaggtgaataaaggatctctataacagatcctttcaaaagaagagttttagagaaaataaatttaactttaaccacagtgaaagttgacccttagcgggacaaagccttaaaatgcattgaaagaaattagatcggttctgtgccttttatctatttgagattgatgacaacctgtgtgagagaatttatcacaccacgtccttattggaataataagctacttgccttgagtttataattcaggtggtaaagtatgtttttaaattttaaaaagcagctgcattttttatttagttggaatatcacc

SEQ ID NO: 183896 - DNA, 1544 bp, Homo Sapiens
  misc_feature (61)..(74): n is a, c, g, or t
  misc_feature (1231)..(1245): n is a, c, g, or t
tttactaggtttcttgacactcttttcttaatcattaggaaactggtctttacagccaaannnnnnnnnnnnnnggtagaaccagatatatatgctattttcagtgatttgataacagaaattttccatttggaatttttaaggtctgttaataattcaggagatcttgtaaataaaacttctgttcccagctccacccaactttccccctcctcaaaggatgtgtttcaaccatgtcacaaaaatcatataagtgatttccatctccttctccattattccccctcccccctccgctttttaccgtatgggttccttttggtgggtgattgagggtgatgttatcagccatgacatcagcatgctggctgtgaccccggaaagactggcccccagcgacgttctcagccagcgctcgcagctgtccggggcttctctggcagaagccatgtctctcacatcatgtgccagcctccaccctcacgccatttccagggaacagactgcgggtatgtagcagtgtagtctttaacctgctctgatacatattcagagtatggattgttgtttaaaaagagttgcatgtttaaagagttttgtactagcttttcattattttgtatctagattatcaacaatggggctaccactttccttggttttatatccatttcctcttggaagttcttgttgcttatgtgacctgttggttgttccccggactgggcacctgcaggagtcagggcagacggcagatgtggctggaggtcagggctcttctgcttagttgtgttagagtcttccagcatgggactgatgggagcagtgggcattctttatcccaagggctagccaggttgcgtcatgacggaccttccccagccctgaccaccaccagaagtggaagagtggagtttgcggtcaactcagcagtgcccatggagacctgcgtggtgtcagagcagcagtatctcttggagctggtgcagacaccaaggctgcccagtggtacaacgtggtccacctcccctagggaagctgctgcactcagaggctgtcctgcccagtggcccctgagccgtgtgagcctgcaggaggcgtctgagcagagcctcaagcccggtatggcgccatctccatgttgccatcactgcgttctcacctgaagccttaatctttgcgacacctgccagtgagcgctcggtttcaataccaaagtgtgtcttcttcnnnnnnnnnnnnnnnaaaatgcctgtttcataggaccttctgaaatgatttccagaatattttatctggctccaaaataaagcacatagcaactcacctcaacccctcatcatctccaggaaagtttctgccaaagctgtggcatagccaacttttgatttggttcttgccaattgttttatgtccctaaacctcatttgggatccttgggggtatagttttatctttctgcttcagtgatatactgtaacttttcaaatattgggttctttctgtaccatttagtatagttgatatatgtgaggcaaaaaaag

SEQ ID NO: 183897 - DNA, 1005 bp, Homo Sapiens
ttggcagattcgctgctggagtgctggatggagcctttctctgccctctgtgacatttccaattttagataatgcctcacatctctgtccccccgggaccccctggagcccccatgatccctaagaagacagcttgaacctagatctcacccccaggatgttgcggaggctgctggagcggccttgcacgctggccctgcttgtgggctcccagctggctgtcatgatgtacctgtcactggggggcttccgaagtctcagtgccctatttggccgagatcagggaccgacatttgactattctcaccctcgtgatgtctacagtaacctcagtcacctgcctggggccccagggggtcctccagctcctcaaggtctgccctactgtccagaacgatctcctctcttagtgggtcctgtgtcggtgtcctttagcccagtgccatcactggcagagattgtggagcggaatccccgggtagaaccagggggccggtaccgccctgcaggttgtgagccccgctcccgaacagccatcattgtgcctcatcgtgcccgggagcaccacctgcgcctgctgctctaccacctgcaccccttcttgcagcgccagcagcttgcttatggcatctatgtcatccaccaggctggaaatggaacatttaacagggcaaaactgttgaacgttggggtgcgagaggccctgcgtgatgaagagtgggactgcctgttcttgcacgatgtggacctcttgccagaaaatgaccacaatctgtatgtgtgtgacccccggggaccccgccatgttgccgttgctatgaacaagtttggatacagcctcccgtacccccagtacttcggaggagtctcagcacttactcctgaccagtacctgaagatgaatggcttccccaatgaatactggggctggggtggtgaggatgacgacattgctaccagggtgcgcctggctgggatgaagatctctcggccccccacatctgt

SEQ ID NO: 183898 - DNA, 959 bp, Homo Sapiens
ttggcaaagagatcggccatcatcttggtcatcaacacaacttgcttctctccagacttgggcttaaggctctgataaccatgaggcttctcattctcacctgtcttgtggctgttgctcttgccaggcctaaacttcctcttagatacccagaacgccttcagaatccatcagagagcagtgagcctataccattagaatcaagagaggaatacatgaatggtatgaacaggcagagaaacattctgagagaaaaacagactgatgaaatcaaggatactaggaatgagtctactcagaactgtgttgtggcagagcctgagaagatggaatccagcatcagttcatcgagtgaggaaatgtctctcagtaagtgtgcggaacagttttgtagactgaacgaatacaaccaacttcagctgcaagctgcccatgcccaggagcaaattcgcagaatgaatgaaaacagccatgtccaagtgcctttccagcagctcaaccaacttgctgcctacccctatgctgtttggtactatccacaaatcatgcagtatgttcctttcccaccgttttccgacatctccaatcccactgctcatgaaaattatgaaaaaaataacgtcatgctacagtggtgatatgattgaaaatttcattctctgaatttctcctctcaaggaaaaccatcttatctgaagactggactgttgttttagaatagtaaaatcccatattgaaggaaattgttctttttgagttatctacttaatagcatatcattctttttcttaagctaaattttcctagagagtttattgtctaaatttcagttgtgtcttgccatatggagggcacctaatcagagggtattaaagtgtttactaagttttctagtgacattttgtttaaaagtctttgaattgccagttctgtaagtgccatcaattaaaatagttttg

SEQ ID NO: 183899 - DNA, 1419 bp, Homo Sapiens
ttggctcgctgcctcacaccttgggcgtgtgtgggagcaggagagggattctctggggtccccatttggaacctggagacccacttctgccaacaagtccttcagcccctctgggccttagtttccccccagtgaagtggggatagtgacagctcccccgggagccagtgaaaactttgtgaagggagtgattactgcgggcgaaggcgcttggcacagccacaactgaagctcagccgtcggatgtgattattgttgctattgttaccgctccgcctggactgggtgcccggtcggaaagtcccgctccccgctcctcctcccaggcgcggaagcttcgcgccgcccgcctcgggggacacctcccgcgccatctcgggggcactggagataaggaaaggaacctcctccctggctgggatggctgcccgggcgcgggaggagggccggggacccggtgagggaggaccgtagggcccgtgggggcttcacgcctggcaggcggccggccaggcctccctccctgacatggagagtaacctgtctggcctggtgcctgctgccgggctggtgcctgcgctgccacctgctgtgaccctggggctgacagctgcctacaccaccctgtatgccctgctcttcttctccgtctatgcccagctctggctggtgcttctgtatgggcacaagcgtctcagctatcagacggtgttcctggccctctgtctgctctgggccgccttgcgtaccaccctcttctccttctacttccgagatactccccgcgccaaccgcctggggcccttgcccttctggcttctctactgctgccccgtctgcctgcagttcttcaccttgacgcttatgaacctctactttgcccaggtggtgttcaaggccaaggtgaagcgtcggccggagatgagccgaggcttgctcgctgtccgaggggcctttgtgggggcctcgctgctctttctgctggtgaacgtgctgtgtgctgtgctctcccatcggcgccgggcacagccctgggccctgctgcttgtccgcgtcctggtgagcgactccctgttcgtcatctgcgcgctgtctcttgctgcctgcctctgcctcgtcgccaggcgggcgccctccactagcatctacctggaggccaaggggaccagtgtgtgccaggcggccgcgatgggtggcgccatggtcctgctctatgccagccgggcctgctacaacctgacagcactggccttggccccccagagccggctggacaccttcgattacgactggtacatgtgtctgaccaggcgggacctggtgaatgacctggggaacaaagctacctggtatttggcctcatcctcttcctgtgggagctactgcccaccacctgcttggtgggcttcttccgggtgc

SEQ ID NO: 183900 - DNA, 3933 bp, Homo Sapiens
  misc_feature (2961)..(3064): n is a, c, g, or t
  misc_feature (3090)..(3203): n is a, c, g, or t
ttggatcaaacttcccaaactgtgcaaacagtgacaccgacttcatgggtcttttcaaatcaagccggtatgacccaagcatttctttttctggaatgtcattatcagacacaatgacacttagaggaagtgtccaaaataaactcaatccccgacctggaaaggtagtgatatatagtgaacccgacgtctctgagaagtgcattgaagttttcagtgacattcaggattgcagttcttggagcctctctccagtgatactcataaaagttgttagaggatgttggattttgtatgagcaaccaaattttgaagggcactccatccccttagaagaaggagaattggaactctctggtctctggggtatagaagacattttggaaaggcacgaagaagcagagtctgataagccagtggtgattggttccatcagacatgtggttcaggattacagagttagtcacattgacttatttactgaaccagaagggttaggaatcctaagttcctactttgatgatactgaagaaatgcagggatttggtgtaatgcagaagacttgttccatgaaagtacattggggcacgtggctgatttatgaagaacctggatttcagggtgttcctttcatcctggaacctggtgaataccctgacttgtccttctgggatacagaagcagcgtacattggatccatgcggcctctgaaaatgggtggccgtaaagttgaattccctacagatccaaaggtagttgtttatgaaaagcctttctttgaaggaaaatgtgtggaactagaaacaggaatgtgtagttttgtcatggagggaggtgaaacagaagaggcgactggagacgatcatttgccgtttacgtcagtggggtctatgaaagttctaagaggcatttgggttgcatatgagaagcctggatttaccggtcatcagtatttgctagaagaaggagaatacagggactggaaagcctggggaggttacaatggagagcttcagtctttacgacctatattaggtgatttttcaaatgctcacatgataatgtacagtgaaaaaaactttggatccaaaggttccagtattgatgtattgggaattgttgctaatttaaaggagactggatatggagtgaagacacagtctattaatgtactgagtggagtatgggtagcctatgaaaatcctgacttcacaggagaacagtatatactggataaaggattttataccagttttgaggactggggaggcaaaaattgtaagatctcttctgttcaacctatatgtttggattctttcactggcccaaggagacgaaatcagattcacttgttttcagaaccacagtttcaaggtcacagtcaaagttttgaagaaacaacaagtcaaattgatgattcattttctaccaagtcttgcagagtttcaggaggcagctgggttgtatatgatggagaaaatttcactggtaatcaatacgtgttggaagaaggccattatccttgtctgtctgcaatgggatgcccgcctggagcaactttcaagtctcttcgttttatagatgttgaattttctgaaccaacaattattctctttgaaagagaagacttcaaaggaaaaaagattgaacttaatgcagaaactgtcaatctccgatccctgggattcaacacacaaatacgctctgttcaggttattggtggcatatgggttacttatgaatatggcagttacagagggcgacagttcctattgtcacctgcagaagtacctaattggtatgaattcagtggctgtcgccaaataggttctctacgaccttttgttcagaagcgaatttatttcagacttcgaaacaaagcaacagggttattcatgtcaaccaatggaaacttaggggatctgaagcttctgaggatacaggtcatggaggatgtcggggccgatgatcagatttggatctatcaagaaggatgtatcaaatgcaggatagcagaagactgctgcctgacgattgtgggcagcctggtaacatctggctccaagctaggcctggccctggaccagaatgctgacagccagttctggagcttgaagtccgatggcaggatttacagcaagttgaagccaaatttagttttagacattaaagggggcacacagtatgatcaaaatcacattatcctcaacactgtcagcaaagagaagtttacacaagtgtgggaagccatggtcctatatacctgaacaaagaaggaagaagaatcttctggaggtccttccagccaccttatttcttaaaaaggacaatgctgatggaagaccagactggaaagtggatcgactcctccttcattgattctaaattcaaccttaaatcatgctgccatgactcagagaacttactcatcgtttcaaaagactatcatagctttaaaccaataatttgtcctcctttcatttcttgcctttcatttttggtagctgcttaaacaggttgcctaattagcagcttttgggtgattttgtaaaatgttatatcaagatttcaagactgtgtacattttaaattatttccaaagatagtgacaggagagaactggaacaaatttaccaactttgtggacctacaaagcccttacactttaaagggtaagacaaaggcttaagtttgaaaggtagagaactgtttagcatctgagaagaaatactttattaggcctgtaattttggttcttggccttaaacactttctggaacctttaaatatgctgcatagcacaatgggaaagccttaggtattcacacatttaaggaactctaaacaaaatactattttcctttagttcatattaaaaattaatacattttaaaaatttaatgtcaaagtctggtaacatttgttagtaggatttgagttattattttttgagacaggatnnnnnnnnnnnnnnnnnnnnnnnnnnnnnnnnnnnnnnnnnnnnnnnnnnnnnnnnnnnnnnnnnnnnnnnnnnnnnnnnnnnnnnnnnnnnnnnnnnnnnnnngcacacatcaccaagcccagccaaannnnnnnnnnnnnnnnnnnnnnnnnnnnnnnnnnnnnnnnnnnnnnnnnnnnnnnnnnnnnnnnnnnnnnnnnnnnnnnnnnnnnnnnnnnnnnnnnnnnnnnnnnnnnnnnnnctgagccactgcgcccagccaggatttgaattattttaactcatccatgggctgccctagaatgtcacaaatgagggttgtttaatgcctttcttatagctgctactggaacactattatgacctaatttatgagccatccttactcatctacaagtgctgaagcaatgttacatacttttttgctaaactcagattttttagcctaatttcttgtcctcctatccacctgcatccacacatggcctgcatggggctgccttccctgcagtgttctgcagccatgcttcagggtatagctgttggtggacagcctcaggtcttgggggcactatagccactaaacgaggtgtgaaaggctcaagaggatgaccagcaattaattatccccagaaagtgaaggaaaagagacctttagggatgttgctggtcaagtcttgatttgaccggagtcaaatcaatcttcaagcaatcttggaatcctcaactgcagtaagcatttcaaaatgcaaacaaactgcttaacaactgacaagacaccagcccatacgctgctcttccaacagtgggttctagctttgaacaaaagtgctaaacatttccttgaatatattcttcctctttttgtcctcatcactcaatactggtgctcttgtcacaggtagaacagcttgtttcttttccatctattcaagtgtgtttctcattcaaaatgctgatcttctctggag

SEQ ID NO: 183901 - DNA, 1399 bp, Homo Sapiens
gggagggatgcggcggcgcggcgcccaggatgccccgcagccccgggacgcgcctcaaacccgccaagtacatcccggtggccacggccgccgcgctgctggtcggctccagcaccctcttcttcgtgttcacgtgcccgtggttgacacgagctgtgtccccagctgttcccgtctacaatggcatcatcttcctctttgtcctggccaacttcagcatggccactttcatggacttctggtgttttcccccgagcggatgaggatgaggacaaggaggacgacttccgggctccgctgtacaagaacgtggatgtgcgaggtatccaggtccgcatgaagtggtgtgccacgtgccacttctaccgcccgccgcgctgctcccactgcagcgtctgtgacaactgtgtagaggactttgaccaccactgcccctgggtcaacaactgcatcgggcgtcgaaactatcgctacttcttcctgttcctgctgtcactcagtgcacacatggtgggcgtcgtggccttcggcctggtctacgtgctgaaccacgctgaggggctgggagccgcgcacacccaccatcaccatggctgtcatgtgtgtggccgggctcttcttcatccctgtcattggcctcactggcttccatgtggtgctggtcactcgggggcgcaccaccaacgagcaggtgactgggaagttccgcgggggtgtgaaccctttcacccgaggctgctgtgggaatgtggagcacgtgctgtgtagccccctggcgccccggtacgtggtggagccaccccggctgccgctcgcggtgagtttgaagccgcctttccttaggcctgaactcctggaccgagctgcaccgctcaaggtcaagcttagtgacaacgggctgaaggctggcctgggccgtagcaagtccaagggcagcctggaccggctggatgagaagccactggacttggggccaccactgccccccaagatagaggctggcacgttcagcagtgacctgcagaccccgcgcccaggcagtgctgagagtgccctgtcggtgcagaggaccagccccccgacacctgccatgtacaagtttaggccggctttccccacgggtcccaaggtgcccttctgtggaccaggcgagcaggttccaggccctgattccctgaccctgggggacgacagcatccgtagcctggactttgtgtccgagccgagcctggacctccctgactatgggccagggggcctgcatgcagcctacccgccatccccaccgctcagcgcctctgatgccttctcgggcgctttgcgctccctgagcctcaaggcctcgagccggcggggcggggatcatgtggccctgcagcccctgcgctctgaggggggg

SEQ ID NO: 183902 - DNA, 1000 bp, Homo Sapiens
aaaaagttggctccaagaaggggaaaaaaatgaagattttgatacttggtatttttctgtttttatgtagtaccccagcctgggcgaaagaaaagcattattacattggaattattgaaacgacttgggattatgcctctgaccatggggaaaagaaacttatttctgttgacacggaacattccaatatctatcttcaaaatggcccagatagaattgggagactatataagaaggccctttatcttcagtacacagatgaaacctttaggacaactatagaaaaaccggtctggcttgggtttttaggccctattatcaaagctgaaactggagataaagtttatgtacacttaaaaaaccttgcctctaggccctacacctttcattcacatggaataacttactataaggaacatgagggggccatctaccctgataacaccacagattttcaaagagcagatgacaaagtatatccaggagagcagtatacatacatgttgcttgccactgaagaacaaagtcctggggaaggagatggcaattgtgtgactaggatttaccattcccacattgatgctccaaaagatattgcctcaggactcatcggacctttaataatctgtaaaaaagattctctagataaagaaaaagaaaaacatattgaccgagaatttgtggtgatgttttctgtggtggatgaaaatttcagctggtacctagaagacaacattaaaacctactgctcagaaccagagaaagttgacaaagacaacgaagacttccaggagagtaacagaatgtattctgtgaatggatacacttttggaagtctcccaggactctccatgtgtgctgaagacagagtaaaatggtacctttttggtatgggtaatgaagttgatgtgcacgcagctttctttcacgggcaagcactgactaacaagaactaccgtattgacacaatcaacctctttcctgctaccctgtttgatgc

SEQ ID NO: 183903 - DNA, 1346 bp, Homo Sapiens
  misc_feature (151)..(176): n is a, c, g, or t
  misc_feature (1059)..(1096): n is a, c, g, or t
ttggccagatattctcctgggtgctcctcaaaggaacactattaaggttcattgaaatgttttcaatcattgccttcccattgatccttctaacatgctgttgacatcacacctaatattcagagggaatgggcaaggtatgagggaaggnnnnnnnnnnnnnnnnnnnnnnnnnngaatgacacaaatttgagttttgtgaacccctgaacagatggtcttaaggacgttatctggaactggagaaaagcagagttgagagacaattctatagattaaatcctggtaaggacaaacattgccattagaagaaaagcttcaaaatagacctgtggcagatgtcacatgagtagaatttctgcccagccttaactgcattcagaggataatatcaatgaactaaacttgaactaaaaattttttaaacaaaaagttataaatgaagacacatggttgtgaatacaatgatgtatttctttattttcacatacactctagctaaaagagcaagagtacacatcaacaaaaatggaaacaaggctttggctgaaaaaaacatgcatttgacaaatcatgttaatagctagacaagaagaaagttagctttgtaaacttctacttcatttgattcagagaaacagagcatgagttttcttaaaagtaacaagaaaaggaacaaaaaaaatgaggtttgaaatcttttaccatggcaaaacattaacatctttctcaaaaacatagagaaatctggaaaaatcaagaagataaaattctggaccagttagtgacattctttcaagcatacttgtaaaatgtttccttaaagtgttcttgggatgaaaatgattgtcatgtctccaacaacagtgaactgatgttgttccttggaataaaagtcaatcccccccttaaaaaatgtatggcttctttgaggaattcttatgtcttaaagactttttacattctagacaattaaattgattgaggtcataaattaagaagtgaatagttaccactacacggtaaggtaagcagcctgaaagcatttgtatcatatannnnnnnnnnnnnnnnnnnnnnnnnnnnnnnnnnnnnnatatataaaataaaaaactcctctacttgtactttggcattcaatttttagaaattcagtctcaaatgccattatggtatttttcaaatgatacctttaagtcaatggtttctttcgactgcaatagagaagatatggcaagaaaaatgttgcagtaccatcttctgggagaacattcatgaaatccttcagttctagttccacagcaacaattgacaatgtttcttttaatgatgacaggtagagccaa

SEQ ID NO: 183904 - DNA, 928 bp, Homo Sapiens
  misc_feature (404)..(429): n is a, c, g, or t
ctttgtacaaaaaagttgggtgtaaaataccaatgttactttggaatgactataaacattaaaagaagactggaagcatacaactttgtacatttgtgggggaaaactattaattttttgcaaatggaaagatcaacagactatataatgatacatgactgacacttgtacactaggtaataaaactgattcatacagtctaatgatatcaccgctgttagggttttataaaactgcatttaaaaaaagatctatgaccagatattctcctgggtgctcctcaaaggaacactattaaggttcattgaaatgttttcaatcattgccttcccattgatccttctaacatgctgttgacatcacacctaatattcagagggaatgggcaaggtatgagggaaggnnnnnnnnnnnnnnnnnnnnnnnnnngaatgacacaaatttgagttttgtgaacccctgaacagatggtcttaaggacgttatctggaactggagaaaagcagagttgagagacaattctatagattaaatcctggtaaggacaaacattgccattagaagaaaagcttcaaaatagacctgtggcagatgtcacatgagtagaatttctgcccagccttaactgcattcagaggataatatcaatgaactaaacttgaactaaaaattttttaaacaaaaagttataaatgaagacacatggttgtgaatacaatgatgtatttctttattttcacatacactctagctaaaagagcaagagtacacatcaacaaaaatggaaacaaggctttggctgaaaaaacatgcatttgacaaatcatgttaatagctagacaagaagaaagttagctttgtaaacttctacttcatttgattcagagaaacagagcatgagttttcttaaaagtaacagaaaaggaac

SEQ ID NO: 183905 - DNA, 3761 bp, Homo Sapiens
actttgtacaaaaaatgaagattttgatacttggtatttttctgtttttatgtagtaccccagcctgggcgaaagaaaagcattattacattggaattattgaaacgacttgggattatgcctctgaccatggggaaaagaaacttatttctgttgacacggaacattccaatatctatcttcaaaatggcccagatagaattgggagactatataagaaggccctttatcttcagtacacagatgaaacctttaggacaactatagaaaaaccggtctggcttgggtttttaggccctattatcaaagctgaaactggagataaagtttatgtacacttaaaaaaccttgcctctaggccctacacctttcattcacatggaataacttactataaggaacatgagggggccatctaccctgataacaccacagattttcaaagagcagatgacaaagtatatccaggagagcagtatacatacatgttgcttgccactgaagaacaaagtcctggggaaggagatggcaattgtgtgactaggatttaccattcccacattgatgctccaaaagatattgcctcaggactcatcggacctttaataatctgtaaaaaagattctctagataaagaaaaagaaaaacatattgaccgagaatttgtggtgatgttttctgtggtggatgaaaatttcagctggtacctagaagacaacattaaaacctactgctcagaaccagagaaagttgacaaagacaacgaagacttccaggagagtaacagaatgtattctgtgaatggatacacttttggaagtctcccaggactctccatgtgtgctgaagacagagtaaaatggtacctttttggtatgggtaatgaagttgatgtgcacgcagctttctttcacgggcaagcactgactaacaagaactaccgtattgacacaatcaacctctttcctgctaccctgtttgatgcttatatggtggcccagaaccctggagaatggatgctcagctgtcagaatctaaaccatctgaaagccggtttgcaagcctttttccaggtccaggagtgtaacaagtcttcatcaaaggataatatccgtgggaagcatgttagacactactacattgccgctgaggaaatcatctggaactatgctccctctggtatagacatcttcactaaagaaaacttaacagcacctggaagtgactcagcggtgttttttgaacaaggtaccacaagaattggaggctcttataaaaagctggtttatcgtgagtacacagatgcctccttcacaaatcgaaaggagagaggccctgaagaagagcatcttggcatcctgggtcctgtcatttgggcagaggtgggagacaccatcagagtaaccttccataacaaaggagcatatcccctcagtattgagccgattggggtgagattcaataagaacaacgagggcacatactattccccaaattacaacccccagagcagaagtgtgcctccttcagcctcccatgtggcacccacagaaacattcacctatgaatggactgtccccaaagaagtaggacccactaatgcagatcctgtgtgtctagctaagatgtattattctgctgtggatcccactaaagatatattcactgggcttattgggccaatgaaaatatgcaagaaaggaagtttacatgcaaatgggagacagaaagatgtagacaaggaattctatttgtttcctacagtatttgatgagaatgagagtttactcctggaagataatattagaatgtttacaactgcacctgatcaggtggataaggaagatgaagactttcaggaatctaataaaatgcactccatgaatggattcatgtatgggaatcagccgggtctcactatgtgcaaaggagattcggtcgtgtggtacttattcagcgccggaaatgaggccgatgtacatggaatatacttttcaggaaacacatatctgtggagaggagaacggagagacacagcaaacctcttccctcaaacaagtcttacgctccacatgtggcctgacacagaggggacttttaatgttgaatgccttacaactgatcattacacaggcggcatgaagcaaaaatatactgtgaaccaatgcaggcggcagtctgaggattccaccttctacctgggagagaggacatactatatcgcagcagtggaggtggaatgggattattccccacaaagggagtgggaaaaggagctgcatcatttacaagagcagaatgtttcaaatgcatttttagataagggagagttttacataggctcaaagtacaagaaagttgtgtatcggcagtatactgatagcacattccgtgttccagtggagagaaaagctgaagaagaacatctgggaattctaggtccacaacttcatgcagatgttggagacaaagtcaaaattatctttaaaaacatggccacaaggccctactcaatacatgcccatggggtacaaacagagagttctacagttactccaacattaccaggtgaaactctcacttacgtatggaaaatcccagaaagatctggagctggaacagaggattctgcttgtattccatgggcttattattcaactgtggatcaagttaaggacctctacagtggattaattggccccctgattgtttgtcgaagaccttacttgaaagtattcaatcccagaaggaaactggaatttgcccttctgtttctagtttttgatgagaatgaatcttggtacttagatgacaacatcaaaacatactctgatcaccccgagaaagtaaacaaagatgatgaggaattcatagaaagcaataaaatgcatgctattaatggaagaatgtttggaaacctacaaggcctcacaatgcacgtgggagatgaagtcaactggtatctgatgggaatggggaatgaaatagacttacacactgtacattttcacggccatagcttccaatacaagcacaggggagtttatagttctgatgtctttgacattttccctggaacataccaaaccctagaaatgtttccaagaacacctggaatttggttactccactgccatgtgaccgaccacattcatgctggaatggaaaccacttacaccgttctacaaaatgaagcatcttctgagactcacaggagaatatggaatgtgatctacccaatcacagtcagtgtgattattttattccaaatatctaccaaggaatgaccaggagaataagatcctccgatgttcgcaatggtgtggtgtcaggaggctgcctcttagacaatctccagatgtactgtgatgtgagtttgaaaaagagttcctgaagtaccacatctgggagacatgccactagctgagcttcccaaaagtctaccaagagctgaggaattgtatcttcatccttagcacaaagcaccttaaaaacagtaaaaggagcctctatattccagataaatatagcactgataaagcgacagctgggctgaatatcacagcatcacatgggccacgcaatcaataatttaccattagcattagcgccatggcaaaagcaaatttagacatttttaaaaggaaacagattctaggatgtacaaataaagtttctacagatatagtcttttaattagtacttttatcttataaactgattatgtatgtgttttttcaataaacaaccaatgaaaaact

SEQ ID NO: 183906 - DNA, 1556 bp, Homo Sapiens
ctttgtacaaaaaagttggcggcagtctgaggattccaccttctacctgggagagaggacatactatatcgcagcagtggaggtggaatgggattattccccacaaagggagtgggaaaaggagctgcatcatttacaagagcagaatgtttcaaatgcatttttagataagggagagttttacataggctcaaagtacaagaaagttgtgtatcggcagtatactgatagcacattccgtgttccagtggagagaaaagctgaagaagaacatctgggaattctaggtccacaacttcatgcagatgttggagacaaagtcaaaattatctttaaaaacatggccacaaggccctactcaatacatgcccatggggtacaaacagagagttctacagttactccaacattaccaggtgaaactctcacttacgtatggaaaatcccagaaagatctggagctggaacagaggattctgcttgtattccatgggcttattattcaactgtggatcaagttaaggacctctacagtggattaattggccccctgattgtttgtcgaagaccttacttgaaagtattcaatcccagaaggaaactggaatttgcccttctgtttctagtttttgatgagaatgaatcttggtacttagatgacaacatcaaaacatactctgatcaccccgagaaagtaaacaaagatgatgaggaattcatagaaagcaataaaatgcatgctattaatggaagaatgtttggaaacctacaaggcctcacaatgcacgtgggagatgaagtcaactggtatctgatgggaatgggcaatgaaatagacttacacactgtacattttcacggccatagcttccaatacaagcacaggggagtttatagttctgatgtctttgacattttccctggaacataccaaaccctagaaatgtttccaagaacacctggaatttggttactccactgccatgtgaccgaccacattcatgctggaatggaaaccacttacaccgttctacaaaatgaagacaccaaatctggctgaatgaaataaattggtgataagtggaaaaaagagaaaaaccaatgattcataacaatgtatgtgaaagtgtaaaatagaatgttactttggaatgactataaacattaaaagaagactggaagcatacaactttgtacatttgtgggggaaaactattaattttttgcaaatggaaagatcaacagactatataatgatacatgactgacacttgtacactaggtaataaaactgattcatacagtctaatgatatcaccgctgttagggttttataaaactgcatttaaaaaaagatctatgaccagatattctcctgggtgctcctcaaaggaacactattaaggttcattgaaatgttttcaatcattgccttcccattgatccttctaacatgctgttgacatcacacctaatattcaaagggaatgggcaaggtatgaagggaaggaataaaaataaaataaataatagaatgaacacaaatttgagttttg

SEQ ID NO: 183907 - DNA, 1591 bp, Homo Sapiens
actttgtacaaaaaagttggatctattactacctcttggttttagagacaactgggtcttctgtggtgggaagggcattaagacaaaaagcccttttgaacagcacataaagaacaataaggatacaaacaaatatgaaggatggcctgaagttgtagaaatggaaggatgcatcccccagaagcaagactaatggaaatgtggagagaattgaagaaagcgcactttcactcttaatgggagagctataaatggcagagctatgtgtaaatattttaagagcatgcagccatcttggtgtggcatgagtattgtctcttttgatatcaggattatttattgctaacgtaaatagatagcattgtaaataatcatcacaatgatcaaatcactgaaccatgtctccgcacatttccctaaaagtacaatgtttagactgctatggtaatacatattttaaattctaaaagcatacacaatgtgtaactgaatggtttgtgaaaaatatattgatatatatactagttgctatgaaaatatcatggaataatagggattttagggtggatactttattttcttttatgtttctatatgttgcgttgtgatgacattatcttttaaattaaaaagagatttggctagttgtgtgtgtaatgttactttacagtccgactctcctgatgtacctcttttcatgatctttttctttccttcccaagaaactgaggaatgtttaatatgaaaacatacatcggatatgtgaaaagcacaacaaaattcttaatgtacacagtaaaaaagtaaatatataaatgtagatggcatttaggaccacagcttgctggatttgtgttagctatgggaataacttgattttgtataagctatttagagtgaggctggaggtggcagcttcacagaactggagaaccaggccaagtcccctccccaacctaattaggtcattcaggacagctaagtcagtatatttagagcaatactagcatacgtttttcttaattgttatcagcattgaccaagtggtttggaaggaggcatgctttaatatcacaataattttgatttgtaaaccaagaaattaatcctgtgtttatctaacttcataatagcaattattgcccgaagctatagtggcatatttacaaaagttcttattactgggcggactgataacatttaaaaaataattgtgtttgaccccaaatgactttatacccaattctacataaaaatatagaagatctatctttttttgttaccttcagatgttcactaaataactcagtttttaagcagaagttttcagggcattaatatatgttgtgtatgaagtatctcaaactggaacataaatttagtgatcaaactgccattcacagtgtaaggcagcacttaaatttcgaacctaaagtttagatgcattgtataaaaaaacctaaaagcagtatctgttatttagctgtaaaccaagttggaagctattcggataatttcttaaatattgatgaactttggagtactgtttcttccttcaaactgaatgtaattaattcatgaataatgcacc

SEQ ID NO: 183908 - DNA, 1432 bp, Homo Sapiens
aaactttgtacaaaaaagttggcggaggactctgaagcactgggcttcgaacacatgggcctcgatccccggctccttcaggctgtcaccgatctgggctggtcgcgacctacgctgatccaggagaaggccatcccactggccctagaagggaaggacctcctggctcgggcccgcacgggctccgggaagacggccgcttatgctattccgatgctgcagctgttgctccataggaaggcgacaggtccggtggtagaacaggcagtgagaggccttgttcttgttcctaccaaggagctggcacggcaagcacagtccatgattcagcagctggctacctactgtgctcgggatgtccgagtggccaatgtctcagctgctgaagactcagtctctcagagagctgtgctgatggagaagccagatgtggtagtagggaccccatctcgcatattaagccacttgcagcaagacagcctgaaacttcgtgactccctggagcttttggtggtggacgaagctgaccttcttttttcctttggctttgaagaagagctcaagagtctcctctgtcacttgccccggatttaccaggcttttctcatgtcagctacttttaacgaggacgtacaagcactcaaggagctgatattacataacccggttacccttaagttacaggagtcccagctgcctgggccagaccagttacagcagtttcaggtggtctgtgagactgaggaagacaaattcctcctgctgtatgccctgctcaagctgtcattgattcggggcaagtctctgctctttgtcaacactctagaacggagttaccggctacgcctgttcttggaacagttcagcatccccacctgtgtgctcaatggagagcttccactgcgctccaggtgccacatcatctcacagttcaaccaaggcttctacgactgtgtcatagcaactgatgctgaagtcctgggggccccagtcaagggcaagcgtcggggccgagggcccaaaggggacaaggcctctgatccggaagcaggtgtggcccggggcatagacttccaccatgtgtctgctgtgctcaactttgatcttcccccaacccctgaggcctacatccatcgagctggcaggacagcacgcgctaacaacccaggcatagtcttaacctttgtgcttcccacggagcagttccacttaggcaagattgaggagcttctcagtggagagaacagaggccccattctgctcccctaccagttccggatgggaggagatcgagggcttccgctatcgctgcagggatgccatgcgctcagtgactaagcaagccattcggggaagcaagaattgaaggagatcaaggaagaagcttctgcattctgagaagctttaggacttacttttgaagaacaaccct

SEQ ID NO: 183909 - DNA, 1176 bp, Homo Sapiens
ttggctcagcaaagagcagtgcccagcccagctcagagggcaaatgggacagatcccagaggccctgaggaggtctctgctgctgatgaagctgtgaccaaacgcacccaacccttggcagccatctgtccctgcagccatagcccacattcccatgacctccctctgcttgttttgggaccatgtctgtacagcctctaggccccagccccggaggtgaatgccatgccatgattctggtgtgctccatggcatccccagcctagctcccaatcccactttggcacgatgttagccaacagctcctcaaccaacagttctgttctcccgtgtcctgactaccgacctacccaccgcctgcacttggtggtctacagcttggtgctggctgccgggctccccctcaacgcgctagccctctgggtcttcctgcgcgcgctgcgcgtgcactcggtggtgagcgtgtacatgtgtaacctggcggccagcgacctgctcttcaccctctcgctgcccgttcgtctctcctactacgcactgcaccactggcccttccccgacctcctgtgccagacgacgggcgccatcttccagatgaacatgtacggcagctgcatcttcctgatgctcatcaacgtggaccgctacgccgccatcgtgcacccgctgcgactgcgccacctgcggcggccccgcgtggcgcggctgctctgcctgggcgtgtgggcgctcatcctggtgtttgccgtgcccgccgcccgcgtgcacaggccctcgcgttgccgctaccgggacctcgaggtgcgcctatgcttcgagagcttcagcgacgagctgtggaaaggcaggctgctgcccctcgtgctgctggccgaggcgctgggcttcctgctgcccctggcggcggtggtctactcgtcgggccgagtcttctggacgctggcgcgccccgacgccacgcagagccagcggcggcggaagaccgtgcgcctcctgctggctaacctcgtcatcttcctgctgtgcttcgtgccctacaacagcacgctggcggtctacgggctgctgcggagcaagctggtggcggccagcgtgcctgcccgcgatcgcgtgcgcggggtgctgatggtgatggtgctgctggccggcgccaactgcgtgctggacccgctggtg

SEQ ID NO: 183910 - DNA, 1387 bp, Homo Sapiens
actttgtacaaaaaagttggctctaggaaacaccatgttacgatagccatgagggcagaagtgcagttgaccaagcaggtggtgcacagattgtaattgaccatttaaggtcactgtgcagtataacagatcccgccaatgagaagctcttgactgtcttttgtggcatgctgatgaactatagcaatgagaatgattcgcttcaagctcagcttatcaatatgggtgttattcctaccttagtgaaattactgggcatccactgccaaaatgcagctcttacagaaatgtgtcttgttgcatttggtaatttagcagaacttgagtcaagtaaagaacagtttgccagtacaaacattgctgaagagctagtaaaactcttcaagaaacaaatagaacatgataagagagaaatgatttttgaagttcttgctccattggcagaaaatgatgctattaaactacagctggttgaagcaggcctagtagagtgtctactagagattgttcagcaaaaagtggatagtgacaaagaagatgatattactgagctcaaaactggttcagatctcatggttttattacttcttggagatgaatccatgcagaagttatttgaaggaggaaaaggtagtgtatttcaaagggtactctcttggatcccatcaaataaccaccagctacagcttgctggagcattggcaattgcaaattttgccagaaatgatgcaaattgtattcatatggtagacaatgggattgtagaaaaacttatggatttactggacagacatgtagaagatggaaatgtaacagtacagcatgcagcactaagtgccctcagaaacctggccattccagttataaataaagcaaagatgttatcagctggggtcacagaggcagttttgaaatttcttaaatctgaaatgcctcctgttcagttcaaacttctgggaacattaagaatgttaatagatgcacaagcagaagctgctgaacaattgggaaagaatgttaagttagtggagcgtttggtggaatggtgtgaagccaaagatcatgctggtgtgatgggggagtcaaacagactgctgtctgcccttatacgacacagtaaatcaaaagatgtaattaaaaccattgtgcagagtggtggcatcaagcatctagttaccatggcaactagtgaacatgtaataatgcagaatgaagctcttgttgctttggcattaatagcagctttagaattgggcactgctgagaaagatctagaaagtgctaaacttgtacagattttacatagactgctagcagatgagagaagtgctcctgaaatcaaatataattccatggtcctgatatgtgctcttatgggatctgaatg

SEQ ID NO: 183911 - DNA, 1400 bp, Homo Sapiens
  misc_feature (1216)..(1231): n is a, c, g, or t
gtctaggtttgggacctgaacctacaacttacagcctcctaggcaaataagcaaattacttaaccttggtacaccttagttaatctgcaaaatagtgataatactaataacaatttgtttggattaaataaaatagtgcatgcaaagcgcgtatcatatagtgaccagtagctgtcactgtgactaatcactggcttgccctcttcatgtctaaccttctcaaaggtgcagtgctacccctggcgctgggtttggctatcactgctctgctgcttctcatggttgcatgccgactacgactggtgaaacagaaactgaaaaaagctcgtcccattacatctgaggaatcggactacctcataaatgggatgtatctatagtaatgtaatttcaataccttggggcagggacatgttttgtttataatttatacatctattaagttctggatatttacagcttcttttgtttttaattgggaagattctgcaaatcccaaatctttctttattatttattgtaaaaaaagtttccttagaagtcataaaatattttgaaatttagagaggaattcatgattaaagattcctaaaaatataattctgatttatgtaagctgtccctgaaaatagaaatgtgtacttagctgagagaaaattcagcatctcaggaggtggtattaggatgactgtgttaacccattaccttttagaagccaactgttggccccttaccatgctggactgctataggcccagcttccccttgttctgtggcccttttcttcctccttgaagctcccagtattctttttcttttcccctctaaacctgtttctgagagtggatctcaagcaagttcatgccttcaatcagatgttacttagggtgggtatacctaaattataaaccttatgtacaagtcagtaagccttagggaaggtgagtgtgggtccttcctaatccctctgacgtcatgtcatataggtggctgcctccttagactgacctttgggagaaaaaaaccccagactttgaattagtaacagctctaagatggtcatgcagtgagataggaaatcaagatggaagcagagaatctggcatgccaaaaactaacagaaacttagttgaaggcaaagagagcaaggagaacgtttaatacttcattacatcaaatcaacactgctccatggtgagagcacagcaactcattnnnnnnnnnnnnnnnnggctttgttgatgaaaaacgacaattgaagagaggacgttgagtggattcctgggtacagcttttgtaaaaatgtcaccatggctttcatccaatggaatgagtcgatgttttttaatgctataaaatgttagaatgtgccatcagctaatgccaggcttacgtatttc

SEQ ID NO: 183912 - DNA, 1771 bp, Homo Sapiens
  misc_feature (1590)..(1605): n is a, c, g, or t
cagaaacaaaaacttcaggtgcctcaatcaggaaccctgaagctgtcccacctacaggagggaacctacaccttccagctgaccgtgacggacactgccgggcagagaagctctgacaacgtgtcagtgacagtgcttcgcgcagcctactccacaggaggatgtttgcacacttgctcacgctaccacttcttctgtgacgatggctgctgcattgacatcacgctcgcctgcgatggagtgcagcagtgtcctgatgggtctgatgaagacttctgccagaatctgggcctggaccgcaagatggtaacccacacggcagctagtcctgccctgccaagaaccacagggccgagtgaagatgcagggggtgactccttggtggaaaagtctcagaaagccactgccccaaacaagccacctgcattatcaaacacagagaagaggaatcattccgccttttggggaccagagagtcaaatcattcctgtgatgccagatagtagttcctcagggaagaacagaaaagaggaaagttatatatttgagtcaaagggtgatggaggaggaggggaacacccagccccagaaacaggtgcagtgctacccctggcgctgggtttggctatcactgctctgctgcttctcatggttgcatgccgactacgactggtgaaacagaaactgaaaaaagctcgtcccattacatctgaggaatcggactacctcataaatgggatgtatctatagtaatgtaatttcaataccttggggcagggacatgttttgtttataatttatacatctattaagttctggatatttacagcttcttttgtttttaattgggccagaagattctgcaaatcccaaatctttctttattatttattgtaaaaaaagtttccttagaagtcataaaatattttgaaatttagagaggaattcatgattaaagattcctaaaaatataattctgatttatgtaagctgtccctgaaaatagaaatgtgtacttagctgagagaaaattcagcatctcaggaggtggtattaggatgactgtgttaacccattaccttttagaagccaactgttggccccttaccatgctggactgctataggcccagcttccccttgttctgtggcccttttcttcctccttgaagctcccagtattctttttcttttcccctctaaacctgtttctgagagtggatctcaagcaagttcatgccttcaatcagatgttacttagggtgggtatacctaaattataaaccttatgtacaagtcagtaagccttagggaaggtgagtgtgggtccttcctaatccctctgacgtcatgtcatataggtggctgcctccttagactgacctttgggagaaaaaaaccccagactttgaattagtaacagctctaagatggtcatgcagtgagataggaaatcaagatggaagcagagaatctggcatgccaaaaactaacagaaacttagttgaaggcaaagagagcaaggagaacgtttaatacttcattacatcaaatcaacactgctccatggtgagagcacagcaactcattnnnnnnnnnnnnnnnnggctttgttgatgaaaaacgacaattgaagagaggacgttgagtggattcctgggtacagcttttgtaaaatgtcaccatggctttcatccaatggaatgagtcgatgttttttaatgctataaaatgttagatgtgccatcagctaatgccaggcttacgtattt

SEQ ID NO: 183913 - DNA, 1186 bp, Homo Sapiens
  misc_feature (275)..(290): n is a, c, g, or t
ttgggtgtgggtccttcctaatccctctgacgtcatgtcatataggtggctgcctccttagactgacctttgggagaaaaaaaccccagactttgaattagtaacagctctaagatggtcatgcagtgagataggaaatcaagatggaagcagagaatctggcatgccaaaaactaacagaaacttagttgaaggcaaagagagcaaggagaacgtttaatacttcattacatcaaatcaacactgctccatggtgagagcacagcaactcattnnnnnnnnnnnnnnnnggctttgttgatgaaaaacgacaattgaagagaggacgttgagtggattcctgggtacagcttttgtaaaaatgtcaccatggctttcatccaatggaatgagtcgatgttttttaatgctataaaatgttagaatgtgccatcagctaatgccaggcttacgtatttctagaccataaagcagtttttcacaaattcatctttacagaaaaccagcatctagcttagcatctttccccttttaatttgtaggcttttaaaggcaaatcattcccaccatcacttaacgccgggattatacacattctagaaatgattctgagaggagtgtatagtatggtgcctatctacactcacatgatattcttattcacgttttttttaaccataagtggcaaatattttaaaatatttgaaaaacactccagaatctagtacgctttatttttagactgaacctaaagtaggttgttcttttaacaaagggtttaattcgggtggggaatataacatatcaaaatacatgaacaaatggaaagttacttctagaaaagcaaagaaattgggtatcatttttgtttcttgggaagctaattttgttgaatgtttagaattgagcaaagatgtaaatttttgaagggcagtttagaaaaattaactttgtgaatgaacttaagatgtctgtactctatatgtgatgctgtgcagtttgtttttatatggaaagatgtcaactatagccataaccaataaaataaaaactgatgaggcatgcagctttcagcacatcttttatacatgaagaaattaattttgtgttgctatggtgttgaaatatccaagatgttctgtatcaatgtaaactgattcctttaataaattgtatttttattatt

SEQ ID NO: 183914 - DNA, 959 bp, Homo Sapiens
  misc_feature (756)..(771): n is a, c, g, or t
ctttgtacaaaaaagttgggaagattctgcaaatcccaaatctttctttattatttattgtaaaaaaagtttccttagaagtcataaaatattttgaaatttagagaggaattcatgattaaagattcctaaaaatataattctgatttatgtaagctgtccctgaaaatagaaatgtgtacttagctgagagaaaattcagcatctcaggaggtggtattaggatgactgtgttaacccattaccttttagaagccaactgttggccccttaccatgctggactgctataggcccagcttccccttgttctgtggcccttttcttcctccttgaagctcccagtattctttttcttttcccctctaaacctgtttctgagagtggatctcaagcaagttcatgccttcaatcagatgttacttagggtgggtatacctaaattataaaccttatgtacaagtcagtaagccttagggaaggtgagtgtgggtccttcctaatccctctgacgtcatgtcatataggtggctgcctccttagactgacctttgggagaaaaaaaccccagactttgaattagtaacagctctaagatggtcatgcagtgagataggaaatcaagatggaagcagagaatctggcatgccaaaaactaacagaaacttagttgaaggcaaagagagcaaggagaacgtttaatacttcattacatcaaatcaacactgctccatggtgagagcacagcaactcattnnnnnnnnnnnnnnnnggctttgttgatgaaaaacgacaattgaagagaggacgttgagtggattcctgggtacagcttttgtaaaaatgtcaccatggctttcatccaatggaatgagtcgatgtttttaatgctataaaatgttagaatgtgccatcagctaatgccaggcttacgtatttctagaccataaagcagttttt

SEQ ID NO: 183915 - DNA, 1024 bp, Homo Sapiens
  misc_feature (757)..(772): n is a, c, g, or t
actttgtacaaaaaagttgggaagattctgcaaatcccaaatctttctttattatttattgtaaaaaaagtttccttagaagtcataaaatattttgaaatttagagaggaattcatgattaaagattcctaaaaatataattctgatttatgtaagctgtccctgaaaatagaaatgtgtacttagctgagagaaaattcagcatctcaggaggtggtattaggatgactgtgttaacccattaccttttagaagccaactgttggccccttaccatgctggactgctataggcccagcttccccttgttctgtggcccttttcttcctccttgaagctcccagtattctttttcttttcccctctaaacctgtttctgagagtggatctcaagcaagttcatgccttcaatcagatgttacttagggtgggtatacctaaattataaaccttatgtacaagtcagtaagccttagggaaggtgagtgtgggtccttcctaatccctctgacgtcatgtcatataggtggctgcctccttagactgacctttgggagaaaaaaaccccagactttgaattagtaacagctctaagatggtcatgcagtgagataggaaatcaagatggaagcagagaatctggcatgccaaaaactaacagaaacttagttgaaggcaaagagagcaaggagaacgtttaatacttcattacatcaaatcaacactgctccatggtgagagcacagcaactcattnnnnnnnnnnnnnnnnggctttgttgatgaaaaacgacaattgaagagaggacgttgagtggattcctgggtacagcttttgtaaaaatgtcaccatggctttcatccaatggaatgagtcgatgttttttaatgctataaaatgttaaaatgtgcatcagctaatgccaggcttacgtatttctagaccataaagcagttttcacaaattcatctttacagaaaaccagcatctagccttaacctctttcccctttaaatttgaagg

SEQ ID NO: 183916 - DNA, 949 bp, Homo Sapiens
acggcgggatgcgggacaacaccagccccatcagcgtgattctggttttcacatgttattctggcaacaattttggcaaccaagtctgaaatgtgtggccaaaaatttgaactgaagattgataatgtgcgatttgttgggcacccaacactgctacagcatgctctggggcagatctccaaaacagatccttccccgaagagggaagcacctactatgattctttttaatgtggtgtttgcactgagggccaacgcagacccgtcagtgataaactgtctgcataacctgtcccgtcgtatcgccaccgtgctgcagcacgaggagcgccgctgccagtacctcacccgggaggccaagctgatcctggcgctccaggatgaggtgtccgccatggctgatggaaatgaaggtcctcagtccccattccatcacatcctgcccaagtgcaagctggccagggacctcaaggaagcttatgacagcctgtgcacgtcgggcgtagttcggcttcacatcaacagctggctggaggtgagcttctgcctgccccacaagatccactatgcggcctccagtctgatccccccagaggccatcgaacggagcctgaaagccatccgcccctaccatgccctgctgctgctcagtgatgagaagtccttgctgggtgagcttcctattgactgctcccctgccctagtgcgggtgatcaagaccacatctgctgtgaagaacctgcagcagctagcccaagatgcggacctggccttgctgcaggttttccagcttgcagctcatctggtgtactggggcaaggccatcatcatctacccgctgtgtgagaacaacgtctacatgctgtctcccaatgccagcgtatgtctgtactccccgctggccgagcagttctcccaccagttcccatctcatgacctgccgtccgttc

SEQ ID NO: 183917 - DNA, 1184 bp, Homo Sapiens
  misc_feature (644)..(679): n is a, c, g, or t
  misc_feature (871)..(879): n is a, c, g, or t
gatgtttcaaaaattatttttattgttacattccaaagaggacagaggaagaaaaaagccagttatccaataatggttagacctttcagaagaggcacccacaaccccagccctagttcaaagctgcacacattggagctcaaacagctgcctctcaccacgaccggaaatgctgacaaatgtgtatatattatcaatccagggaggcttgggtttaaaataaaatttctttattgcaagtgtccaagtccttaggatttgtccttaaaggtactagaagatgagtaagaccacacacaccaagactatgtttagtctttagagtaaactagcaaatggccagtttgttctaggatgcattgcatcagacatcacagtacatgaagaaaatctgctttttgtgaaaagccaccaggcattttagatcccgtttaccatgaagtgcagacacagcagatacccagataacacagtcagtgcaaaagtcaaatgagtaagtcagctctttgatgaggctggctacactgcaaaatataaatgaaactcgaaaatagaaggtaaggtctatttacaaaagtttgtttagtaaagtgacttgaaaaaagttgttaaccacttcccaggcatccctcccctctcccacnnnnnnnnnnnnnnnnnnnnnnnnnnnnnnnnnnnncctgaaaattatcttgaaagtcaagttaaaactatgtggtgaaaaagagagtgcttgttccaggtaaaggacttcaagataatttacaggcagatttatttttattagtaaaagtcacaaataggaaaagacttattggctgactttgagctgtgtgcttttaaaaatgtctctattattacgttaacaagnnnnnnnnntcaagcaagtttttgcttccagttttgaatcttccagcaacagttggtgaaatcaacaaggtattaaaatgaaacccagcaaaacccagtcagttctttccagttgtctgcctgtttctttctagtcaccttgaattcaattcccaattagctgaggacaacatgccggtcaaagacagactttcgctgctcttggacttgaagcttccagcgctgctgtgcatattctaccttgttcagcacgttggctcgactgcgccaacttttttgtacaaagttggctattataagaaagcattgctcat

SEQ ID NO: 183918 - DNA, 2388 bp, Homo Sapiens
ttgggtccttactggaaggaagcccttaacatattaaagctggtggtgtcacgctctgcgagtcttgtcgtacccagtgatatccccaagacctatggaggagatacaggttctcctgaaatatccttcactaaaatttttaataatgtttctaaggagttgcctgggaagaccttagattttcattttgatatatctgagacaccaattattggaaacaaatatggtgatcagcacagtgcggctggaagaaatgggaaaccaaaagttattgctgtcactagaagtacttcctcaacttcttctggttctaattctaatgccttggttcctgttagttggaaaaggccacagttatcacagcgaagaacaagagaaaagctaatgaatgtgctttctctctgtggtccagaatctggcctcccaaagaacccatcagttgtattttcttctaatgaggatttggaagtcggtgaccaacagactagcctaatttctacaacagaagacataaatcaagaggaagaagtagctgtggaagataatagcagtgaacaacagtttggtgtttttaaggattttgactttttagatgttgaattggaagatgcagagggtgaaagtatggacaatttcaactggggagttcgcaggcgctcactggacagtattgacaaaggggacactccatccctccaggagtaccagtgctctagtagcacccccagcctgaacctcaccaatcaggaggatacagatgagtcctcggaagaagaagcggcacttacagcaagccagatactctcacgcacacagatgttaaacagtgattctgccactgatgaaacaataccagaccatcctgacttacttctccagtctgaagattccactggcagcatcacaacagaggaagtgcttcaaatcagggatgagaccccaactttggaggcttctctagataatgctaacagccggctgcctgaggtggggagaaatggaggctggtgcatggccaatctgggctctttttagcactcttttatagctcccgcttttctttcaaaaaagttttgaagttgatttgtttccagtatttctaacctgttgagttattttaaatgaaatagtcaaatctgattttttcttaagttggtagattaaggaaatgacctacaggttaaaaataatcttgagtgtttttaatgagcagtttgcattgcagaacatgatgaggttaatgtacagacgcttctctggggttggcgagcatcatctattgcactgtattttcttagaaggaccgctttggttttttcttctctttttgctttgtgttgggtttatgtgattggtgctgtgattgggattaaaacctcaggccagctgtggtttttagcagttgttaaatgaaatcttttaaaaagactttggaaccactagtattatgttttttggaaaggcctgtgagaagtaagccagatttgaagctaatgactgaccaaaaataagatacaacttcagtattaaaggaggaacatgttacaacctttgaagatgaaggatcctatataattcaagaacagcaggaatctcttgtgtgtcaaggaattcttgatttagaagaaactgaaatgccagagcctctagctcctgaaagttaccccgagtcagtctgtgaagaggatgttaccttagctctgaaagagctagatgaaagatgtgaagaagaagaagcggatttctccggactgtctagtcaagatgaagaagagcaagatggttttccagaagtacagacgtcgcctctgccgtcaccatttctttctgccatcatagccgcctttcagcccgtggcatatgatgatgaagaggaagcctggcgctgccacgtcaatcagatgctgtctgacaccgacgggtcctctgcagtgtttacttttcatgtgttttctaggctgtttcagacaattcaaagaaagtttggagaaataactaatgaggcagtcagctttcttggtgatagtctgcaacgcattggtaccaaatttaaaagttccttggaagtgatgatgctgtgttcagaatgcccaacagtctttgtggatgctgaaacactgatgtcatgtggtttgctggaaacactcaagtttggtgttttggagttgcaagaacacctggatacatacaatgtgaaaagagaagccgctgagcagtggctagatgattgtaagaggacatttggtgccaaagaagacatgtataggataaacacagatgcacaagaattggagctctgccgaagattatacaaattgcattttcaattgctgcttctgttccaggcctactgtaaacttatcaaccaagtaaatacgataaaaaatg

SEQ ID NO: 183919 - DNA, 916 bp, Homo Sapiens
tacaaaaaagttgggtggctcggacgaccgcggcgggtcaagcacctttctcccccatatctgaaagcatgccctttgtccacgtcgtttacgctcattaaaacttccagaatgcaacaggacggacttggagtagggacaaggaacggaagtgggaaggggaggagcgtgcacccctcctggccttggtgcgcgccgcgccccctaaggtactttggaagggacgcgcgggccagacgcgcccagacggccgcgatggcgctgttggccggcgggctctccagagggctgggctcccacccggccgccgcaggccgggacgcggtcgtcttcgtgtggcttctgcttagcacctggtgcacagctcctgccagggccatccaggtgaccgtgtccaacccctaccacgtggtgatcctcttccagcctgtgaccctgccctgtacctaccagatgacctcgacccccacgcaacccatcgtcatctggaagtacaagtctttctgccgggaccgcatcgccgatgccttctccccggccagcgtcgacaaccagctcaatgcccagctggcagccgggaacccaggctacaacccctacgtcgagtgccaggacagcgtgcgcaccgtcagggtcgtggccaccaagcagggcaacgctgtgaccctgggagattactaccagggccggaggattaccatcaccggaaatgctgacctgacctttgaccagacggcgtggggggacagtggtgtgtattactgctccgtggtctcagcccaggacctccaggggaacaatgaggcctacgcagagctcatcgtccttgtgtatgccgccggcaaagcagccacctcagtgttcccagcatttatgcccccagcacctatgcccacctgtctcccgccaagacccc

SEQ ID NO: 183920 - DNA, 960 bp, Homo Sapiens
ccaactttgtacaaaaaagttggcgggctctccagagggctgggctcccacccggccgccgcaggccgggacgcggtcgtcttcgtgtggcttctgcttagcacctggtgcacagctcctgccagggccatccaggtgaccgtgtccaacccctaccacgtggtgatcctcttccagcctgtgaccctgccctgtacctaccagatgacctcgacccccacgcaacccatcgtcatctggaagtacaagtctttctgccgggaccgcatcgccgatgccttctccccggccagcgtcgacaaccagctcaatgcccagctggcagccgggaacccaggctacaacccctacgtcgagtgccaggacagcgtgcgcaccgtcagggtcgtggccaccaagcagggcaacgctgtgaccctgggagattactaccagggccggaggattaccatcaccggaaatgctgacctgacctttgaccagacggcgtggggggacagtggtgtgtattactgctccgtggtctcagcccaggacctccaggggaacaatgaggcctacgcagagctcatcgtccttgtgtatgccgccggcaaagcagccacctcaggtgttcccagcatttatgcccccagcacctatgcccacctgtctcccgccaagaccccacccccaccagctatgattcccatgggccctgcctacaacggggtaccctggaggataccctggagacgttgacaggagtagctcagctggtggccaaggctcctatgtacccctgcttcgggacacggacagcagtgtggcctctgaagtccgcagtggctacaggattcaaccagccagcagacgactccatgcgggtcctgtactacatggagaaggagctggccaacttcgacccttctcgacctggctcccccagtggccgtgtggagcgggccatgagtgaagtca

SEQ ID NO: 183921 - DNA, 1270 bp, Homo Sapiens
actttgtacaaaaaagttggcccagcgcccattgtagctgcgaggaaacttttgcagcggctgggtagcagcacgtctcttgctcctcagggccactgccaggcttgccgagtcctgggactgctctcgctccggctgccactctcccgcgctctcctagctccctgcgaagcaggatggccgggaccgtgcgcaccgcgtgcttggtggtggcgatgctgctcagcttggacttcccgggacaggcgcagcccccgccgccgccgccggacgccacctgtcaccaagtccgctccttcttccagagactgcagcccggactcaagtgggtgccagaaactcccgtgccaggatcagatttgcaagtatgtctccctaagggcccaacatgctgctcaagaaagatggaagaaaaataccaactaacagcacgattgaacatggaacagctgcttcagtctgcaagtatggagctcaagttcttaattattcagaatgctgcggttttccaagaggcctttgaaattgttgttcgccatgccaagaactacaccaatgccatgttcaagaacaactacccaagcctgactccacaagcttttgagtttgtgggtgaatttttcacagatgtgtctctctacatcttgggttctgacatcaatgtagatgacatggtcaatgaattgtttgacagcctgtttccagtcatctatacccagctaatgaacccaggcctgcctgattcagccttggacatcaatgagtgcctccgaggagcaagacgtgacctgaaagtatttgggaatttccccaagcttattatgacccaggtttccaagtcactgcaagtcactaggatcttccttcaggctctgaatcttggaattgaagtgatcaacacaactgatcacctgaagttcagtaaggactgtggccgaatgctcaccagaatgtggtactgctcttactgccagggactgatgatggttaaaccctgtggcggttactgcaatgtggtcatgcaaggctgtatggcaggtgtggtggagattgacaagtactggagagaatacattctgtcccttgaagaacttgtgaatggcatgtacagaatctatgacatggagaacgtactgcttggtctcttttcaacaatccatgattctatccagtatgtccagaagaatgcaggaaagctgaccaccactattggcaagttatgtgcccattctcaacaacgccaatatagatctgcttattatcctgaaga

SEQ ID NO: 183922 - DNA, 1133 bp, Homo Sapiens
  misc_feature (218)..(234): n is a, c, g, or t
  misc_feature (926)..(962): n is a, c, g, or t
ttggcaatttaacttcaagaaaacaaaatttgacaacatagtttcttaataaatgatatggcatgtactttcaattatgtagctttgtaactatgaatatttacatattttgccttttagtgatatttaatgttaaagtgccatgaaaaatatttctaagaaagccttaaattcccagtggattctttacccttaagttttacagcctacaacaagannnnnnnnnnnnnnnnncttctggtcagccttgttttgtttgtaaagaattgtgctctcattactgctgggggtgcatgctacaatacttctatataaacacttgtagaagtacactgttcacgtttagcctgccccacttttgtattcaaaattaatgaaactgaaggtttattctgatcataatttgtttagtgctacatttgataatttattatttacagcttagaatattgatttcttgaatacgtataagcacatttgactgtcttttatatatggattactgcattccattgattcttattttgtggttggctttatttctttcacaactgtgtaagtttaaagagctaaagctctaaaactgttctgagaaacaatgaatagtacatgtatatgtatatttttaaactgccttattgctcaatgagttgctgttcctggagtatctaactttcggtttactcaaaaacttttgggtaaataaaaaagggaagtacagatagtttaggttgtgcatggttgcatgaattttgaagtcatttctatgtggagcattatttttcttcttgttaaatatagaaaaaaaagagattctagtacaaagttactgtttaacaaaagcaacataaactctgggaaagatttcattttgccatgttatatttactgtttattctgtgtactagtacatatctttaaattannnnnnnnnnnnnnnnnnnnnnnnnnnnnnnnnnnnntatcacttggaattagcaatatcacccaactggctttaaaattgaaaatttaaataacatggtggcatgaagtacaattcgagtattaggcaatttgcatagtgttcctcatgctactttctgttacacctctattatattagttttgaatataaacatctttttcagacc

SEQ ID NO: 183923 - DNA, 3190 bp, Homo Sapiens
  misc_feature (1430)..(1446): n is a, c, g, or t
  misc_feature (2014)..(2022): n is a, c, g, or t
  misc_feature (2139)..(2175): n is a, c, g, or t
  misc_feature (2903)..(2912): n is a, c, g, or t
ttgggttgaaaatgcaagtgtgttggtgcattgttccgatggttgggataggacttcccaggtttgttccctgggttctcttttattggattcctactacaggacaatcaaaggattcatggttttaatagaaaaggattggatctcttttggacataaattttcagagaggtgtggccagttggatggtgacccaaaggaagtctcaccagtgtttactcagttcttggaatgtgtgtggcatttgaccgaacagtttccacaagcctttgaattcagtgaagcatttcttcttcagatccatgagcatattcattcatgccagtttggaaacttccttggaaattgtcagaaggaaagagaagagctcaagttgaaggagaagacttattccctgtggccatttcctttggaagaccaaaagaagtacttaaatcctctctacagttccgaatctcacagatttacagttttggagccaaatacagtatctttcaattttaagttttggaggaacatgtaccatcaatttgatcgaacactgcatcctaggcagtctgtatttaatataattatgaatatgaatgagcaaaataaacaattagagaaagatattaaagacctagaatctaaaattaaacaacgcaaaaataagcaaacagatggcatcctcaccaaggaattgttacattcagttcatcctgaatcacctaacctcaaaacttccctgtgttttaaagagcagactctgctacccgtaaatgatgctcttcgaactatagagggcagcagcccggcagataatcgttatagtgaatatgcagaagagttttctaaatcagaacctgctgtggtcagcttagagtatggtgtggcaagaatgacttgttagactcatagagttttttctgcaatgattgcagtacaagaaaaggattattgtgaggatggtctgtaagcataaccaaaaggaatttgtctaataacaattttagggtttaacagtaggctaatagttgaaggaaggataataactacccttgtgagagaaatatgtcattttaattgcatttccagcaaggaatgacattcagttctgtaagaaatgagtggtatttgatgtatttactcaaaacacaatttgcactgtacactagtgaattgacgtttatgatttatgttaattcagccaaacataaataaccttccttaagtacaatttaacttcaagaaaacaaaatttgacaacatagtttcttaataaatgatatggcatgtactttcaattatgtagctttgtaactatgaatatttacatattttgccttttagtgatatttaatgttaaagtgccatgaaaaatatttctaagaaagccttaaattcccagtggattctttacccttaagttttacagcctacaacaagannnnnnnnnnnnnnnnncttctggtcagccttgttttgtttgtaaagaattgtgctctcattactgctgggggtgcatgctacaatacttctatataaacacttgtagaagtacactgttcacgtttagcctgccccacttttgtattcaaaattaatgaaactgaaggtttattctgatcataatttgtttagtgctacatttgataatttattatttacagcttagaatattgatttcttgaatacgtataagcacatttgactgtcttttatatatggattactgcattccattgattcttattttgtggttggctttatttctttcacaactgtgtaagtttaaagagctaaagctctaaaactgttctgagaaacaatgaatagtacatgtatatgtatatttttaaactgccttattgctcaatgagttgctgttcctggagtatctaactttcagtttactcaaaaacttttgggtaaataaaaaagggaagtacagatagtttaggttgtgcatggttgcatgaattttgaagtcatttctatgtggagcattatttttcttcttgttaaatatagnnnnnnnnngagattctagtacaaagttactgtttaacaaaagcaacataaactctgggaaagatttcattttgccatgttatatttactgtttattctgtgtactagtacatatctttaaattannnnnnnnnnnnnnnnnnnnnnnnnnnnnnnnnnnnntatcacttggaattagcaatatcacccaactggctttaaaattgaaaatttaaataacatggtggcatgaagtacaattcgagtattaggcaatttgcatagtgttcctcatgctactttctgttacacctctattatattagttttgaatataaacatctttttcagaccaaaaaaaactttattgtatgagagcttatcttatcctgtttatttttccaatgcttttctgtaatacattatgtaatttaaaaaatattcctttttaaacagcaacagaaatgcactataaaatatagtatgtgattaaccaatcctgcttccatatttaagcactgggaatggaaacttaatctctgtgactacaaagggaagtttttgtgccttggtgttccagtcactgattgtggttttagaatcttctgtggctgacttcttgtattcaactctggtttattatcttaatcttcaacttcagacatacatttgtgtgtttatatgctcacaggtggactgagaaatcagttacatcttaagtgacctacagggtatatgttggcaaaagcagactgtgtatatgtcttataaagttgaatttatgttcagtgtgtttggaagtgtatagcatgtaaattatttcatatatgatttaaaggtaattaaatgttcacattttactttgaatgtttttcttctggataaaacaaatggaatcaagttgtagttgnnnnnnnnnncttctcacctaggcaagtagacttgcccattacattaacataacagcataaggtttgaggagtttattttccaaaagtttgttgataaataatacctgtttcatacaaaaataatttccagaatatttaaatagggtatagtgggctaaaaggccatcagatgtaggtaataatgtcattaagttttcattttgttcctgtcacttgcttatattacaatcactatttttttgtgcccttgccaacttgatggaaaggcaggtccattgagtacaaac

SEQ ID NO: 183924 - DNA, 1401 bp, Homo Sapiens
  misc_feature (297)..(313): n is a, c, g, or t
  misc_feature (881)..(889): n is a, c, g, or t
  misc_feature (1006)..(1042): n is a, c, g, or t
ttggcaatttgcactgtacactagtgaattgacgtttatgatttatgttaattcagccaaacataaataaccttccttaagtacaatttaacttcaagaaaacaaaatttgacaacatagtttcttaataaatgatatggcatgtactttcaattatgtagctttgtaactatgaatatttacatattttgccttttagtgatatttaatgttaaagtgccatgaaaaatatttctaagaaagccttaaattcccagtggattctttacccttaagttttacagcctacaacaagannnnnnnnnnnnnnnnncttctggtcagccttgttttgtttgtaaagaattgtgctctcattactgctgggggtgcatgctacaatacttctatataaacacttgtagaagtacactgttcacgtttagcctgccccacttttgtattcaaaattaatgaaactgaaggtttattctgatcataatttgtttagtgctacatttgataatttattatttacagcttagaatattgatttcttgaatacgtataagcacatttgactgtcttttatatatggattactgcattccattgattcttattttgtggttggctttatttctttcacaactgtgtaagtttaaagagctaaagctctaaaactgttctgagaaacaatgaatagtacatgtatatgtatatttttaaactgccttattgctcaatgagttgctgttcctggagtatctaactttcagtttactcaaaaacttttgggtaaataaaaaagggaagtacagatagtttaggttgtgcatggttgcatgaattttgaagtcatttctatgtggagcattatttttcttcttgttaaatatagnnnnnnnnngagattctagtacaaagttactgtttaacaaaagcaacataaactctgggaaagatttcattttgccatgttatatttactgtttattctgtgtactagtacatatctttaaattannnnnnnnnnnnnnnnnnnnnnnnnnnnnnnnnnnnntatcacttggaattagcaatatcacccaactggctttaaaattgaaaatttaaataacatggtggcatgaagtacaattcgagtattaggcaatttgcatagtgttcctcatgctactttctgttacacctctattatattagttttgaatataaacatctttttcagaccaaaaaaaactttattgtatgagagcttatcttatcctgtttatttttccaatgcttttctgtaatacattatgtaatttaaaaaatattcctttttaaacagcaacagaaatgcactataaaatatagtatgtgattaaccattcctgcttccatatttaagcactgggaatggaaacttatctctgt

SEQ ID NO: 183925 - DNA, 908 bp, Homo Sapiens
ttggctaattggcaccatcaaacaaggccacggcactgagagtagtggctctggcctctttgccctgtgcaccctggatgggacactgaagctcatggaagaaatggaagaagcagacaagctgctgtggtcagtgcaggtggatcaccagctctttgccctggagaaactggatgtcaccggcaacgggcatgaggaggtagttgcatgcgcctgggatggacagacatatatcattgatcacaaccgcaccgtcgtccgcttccaagtggatgaaaatatccgtgccttctgtgcaggcctgtacgcctgcaaagagggccgcaacagcccctgcctcgtatatgtcactttcaaccagaagatctatgtgtactgggaggtgcagctggagcggatggagtctaccaatctggtgaaactgctggagaccaagccggagtaccacagcctgctgcaggagctgggcgtggatcctgacgacctccctgtgactcgtgccctgcttcaccaaacgctctaccatccagaccagccaccacagtgtgctccctcaagcctccaggatcccacctagctgtacttgcctcatagctggtgaaggattcttctgaacccccaccctaccccctaaaggtatctgtggtattggcaggatagggaatatgcattacagaaatgcaggatttgactctgggcatgaaagatggcagcagccctagggtgaccgtgaactatagacctcgcagtcttttcggtgaaagaagagacaagttgaccctctgcccatttccttatggacctcacccatcatgccagcagggtcataggaccctggccttgttccaaatcatctgggacatgacccactccccactgtcactgtgttgaaaacagagacttgtttg

SEQ ID NO: 183926 - DNA, 895 bp, Homo Sapiens
gagaaggctggagaggtgttctcatagctggagcccacagacatggcgccggggctggttgggggagacagcaggtagcgcccaccattagccatcggtgacagtggagaggttgcggcaggcttcttgccagcagctccaggctcctctagcaccagtgagtccatgatctcttgcaggtccttctcaatagagctcaccagggaactgtggctggcacaggcagagggtccccgtgttgcagtctgtggggtgtggttcccatttaccagactttctgattctgcaggaacagggctgtaggggggcccaggggctcggccccctgctggaatcatgcttttcatccacttggcttcagccgggtggttaaagcgaaggaaggtggactgacccaggcacaacatgcagccctgagtgagccgggtaggctgccggacagggagcccatcaatagtgcaggcattgccacaggggtagagggtgagggtgccccgcaggttctcgatgtagcagtgctctggagccaggcctgggccctgtagtgagatgtctctggctgcagagccaatcaccgtcctcccttcctccagcggcaggagggtgatggctgtgctgagtcgcccactgcccaggctcaccaggtggggtttgtccgtttgcactttcagccctttgcctgtctcgatcaggtccaagggtcctttctgcaccatggtctgggtctggcatccagggcctatttggttcctattgagagcgtccatggtcctaaggctccagagctcctagaggtggtgggggggcagggagacactggtcccttagcctggctcggctcggtcgcggtggcctcaggcttaggaggacaccgttgcttttccccgggagccaa

SEQ ID NO: 183927 - DNA, 2062 bp, Homo Sapiens
ttggcaaacaggagccaccaaaacctttaagatttcttcctggcgtgttgattggctgggagaatcaacctactactctggaattagcaaataaacctcttcctgtggatgatatacttcaaagccttttgggcaccactggtcaagtatatgaccaggcccagtcagtgatggaacaaaacactgttaaagaaattccatttttaaatgagcagaccaactcaaaaatagagaaaacagataatgtggaagtaactgatggtgaaaacaaggagataaaagttaaagtagataatatttcagaatctacagataagtcagcagaaatagaaacatcagtagtagggtcctcttccatttctgcagggtctttgacgagtcttagtctcagaggtaagccaccagatgtttctacagaagcatttttaacaaatttatcaattcagtcaaaacaagaggaaactgtggagagtaaagagaaaacattaaaaagacagcttcaggaagatcaagagaataatttgcaagataaccagacttcaaatagttctccatgcagatctaatgtaggaaaaggaaacatagatggtaatgtgagctgtagtgaaaaccttgttgctaatacagcgaggtctccacagtttatcaacctgaaaagggatcctaggcaagcagcaggacgaagtcagcctgtaactacttcagaaagcaaagatggagatagttgccggaatggagaaaaacacatgctgcctggcctgtcacacaacaaggagcacttaacagaacaaatcaatgtagaggaaaagttgtgttctgcagagaaaaactcgtgtgttcagcagagtgacaatttaaaagttgcacaaaactcaccatcagtagaaaacatacagacttctcaagcagaacaagcaaaacccttacaggaggatattttaatgcaaaatattgaaactgtgcacccatttcgaagaggatcagcagtagcgacatctcattttgaagttggaaacacatgtccatcagaatttccttctaaaagcatcacctttacttccagaagcaccagccccagaacaagtacaaacttttcacccatgaggccacagcagcccaaccttcagcatctcaagtctagcccacctggatttccatttccagggcctcctaattttcccccacaaagcatgtttggatttccaccacatttgccacctccattacttccccctccaggctttggctttgctcaaaatcccatggttccctggccacctgttgttcatctcccaggtcagccacagcgtatgatgggtcctctctcacaagcatcaaggtatataggcccgcagaatttttaccaggttaaagacattcggaggccagaaaggcgccatagtgacccttggggtaggcaagaccaacagcaactggataggccatttaataggggtaaaggggaccgccagagattttatagtgattcacaccatttgaaaagagagcgacatgaaaaggaatgggagcaagaatctgaaaggcatagacgcagagacagaagccaagacaaggacagagacagaaaaagcagggaggaagggcacaaagataaagagagggcacggttatcacatggtgatcgaggaacagatggaaaagcaagcagagatagtaggaatgtagacaagaagccagataaacctaaaagtgaagactatgagaaggacaaagaacgagagaaaagtaaacacagagaaggagaaaaggacagggataggtaccacaaagatagggaccacactgacagaactaaaagcaaaaggtaaaatttgcaggctgcttcaggattacatttaaataactgttaaaatgttgtatcttgtaaacaaaagaaagattgcctgctaggattgtgccatctttaaaatttttactattggtcatttgcagaacagtaaattctgtgtgttggtacagagtgctctgtaccagtgctcatcatcccttcttcataccaacggtccctagttataggaatttaatatttttaaaagtttta

SEQ ID NO: 183928 - DNA, 1493 bp, Homo Sapiens
agtggtgcctaatcagggacgtgaaggaagaagatctgctggagcagagaaactgaaactgaccagatgagtgagaaaccccaggacaaatctgctggcagaggatataagggcaaacaaagaagataaccattctccaaagtcaaggatgctctgagaacaccagtaaaaggaactcaggataatctcagctctaactcggccagagtggctccatcgctcaaatcgttccctccttcagtgattggctgagcctgccagagtcgaacagcggaaagcagccccggggcctcttgctgcccccaggtcggtgcaagtcgcttcacaactccttgtagtcgcctgatcctagcagtccagcttcctgcccttatgcagctcttggcttcgttcaaacggaccgcctttgctagcacccaatcagaacgctcgatcttcggctctcgtccaatgaacgcgcgtattggggaggggaaaaaagacggcgtgaagcccaatcgcagcgccattacacttgagggcaaagaggttaggaagccggcatggcgctccggtcaataaaatcgatagctggaagctgcctgtgttccaggcaaaggcggtgcggtagcagcgccgccattttccccgaaggcatcttccggtgcctttcacccaagttcgggcaggagtttcctgaataacagcaaaaggtttccgttagccccgcgggcgaccaattccgattccctccgggcctccccggccacgctcagccctggtccggcaggggctcctcgatcccaggggccgccagcgcccgagggccgaggcctggacacggaaggccgtggcgccggcttctcgggtcccatggcgccaccttcggctccgctccctgcgcagggaccaggaaaggccagacccagtcggaaaaggggcaggaggccgagggctctgaagttcgtggacgtggccgtgtacttctccccggaggagtggggctgcctgcggcccgcgcagagggccctgtaccgggacgtgatgcgggagacctacggtcacctgggcgcgctcgggtgcgcaggtcccaaaccagccctcatctcctggttggaacgaaacaccgatgactgggaaccggctgctctagatccgcaggagtacccgagagggctaacagtccagagaaaaagcagaaccagaaagaagaatggggagaaggaagtattcccgcctaaggaggcaccccgaaaggggaagcgaggccggaggcccagcaaaccccgactgattcctaggcagacgtccgggggccccatctgccctgactgcggctgtaccttccctgatcatcaagccctggagagccacaagtgcgcccagaatctaaaaaagccttacccttgcccagactgtgggcgccgcttttcctatccatccctgctggtcagtcaccggcgggcacactccggcgagtgcccctatgtttgtgaccagtgtgcaaacgtttc

SEQ ID NO: 183929 - DNA, 917 bp, Homo Sapiens
actttgtacaaaaaagttggcacagaggtctgctgccaaagtgcgcttctgcaggtggagccaagctctccctgaggccagaggcggggcctgggccgggagcccaggggaaggccaggctggaccccggctccacacccacatccagcctgcaggcctctctgcagtcctctcaccctccctcagctccccttcctctgcagtcaccctcagctccccttccttgcccgcctctccccccgccgccccaccagttaaacggatgaccaaagacctttcttatgccggaagcaaaaaccaaaactttttgttggctttttcctttgtcgcctccccagcacctgccctcccagtctcccaccccggccccaggctggaagccctccctccacttaagttattgttttaaaccaaagtttacagtgtctgttggtggccaagaccttctctctccacccctcctccatccaccctgaggaccctggggctcagtggaggcagggccctgcccccctcccttccgctcctgcccagcctgggggaaggagaaaggaggggagaaagcgggctctcaccccctcaggagtgggcacgggagcccttctccctgaccctgggctgcttcctgggggctctccagacccctctctaggaccaagtcacccgtcgtgctgggagtgtggattctagcaaaagagctggaaaaaagtcagactctccacagaccccctatgggggacccccaactcaaggccaaggactgggcgtatcggatgctcataacacccctggcctggcccctttactgagaagactccttggatatttcccaagaaccccccacatacacccctcacaagccacccctcctgagaggcagggggccctccgccccctccccatgtattccccacctg

SEQ ID NO: 183930 - DNA, 2904 bp, Homo Sapiens
  misc_feature (1279)..(1337): n is a, c, g, or t
ttggcactatccctagtttcttcaactggttttcagaccacagccttctagaattcgacagaattgcagagattatcaaaggagaactgtggcccaatcccctacaatactacctgatgggtgaagggccccgtagaggaattcgaggcccaccaaggcagccagtggagagcgccagatccttcaggttccagtctggctaatctctgtcctgtgagaagtttctgcacaagtttccttaccacctcctcttggacctatgcttggccaacagcatgcagtcttccatctgctttctcttcatactgtggattatcttttcctttggttctaaatcttcagtaatcggttgcaagattgttggcttacctgcctgtgccattcttcctctgggccttcatgcttttctgcattgtgttaacatgtttcaagtgcatggccttctacggcttctatgccaagtgtatgatactatagatatagtgtaccatactgcctttctttgcatggcttggaccctatctgtgaccatgctcttctcccaatttaagtggttctgtaccacaaagaatcttgatacattttcacaaataactgattgggcttcatactttatgctggctgtgtcctgatacccatgtacttatggtaagctatttgggtattaccactgcaagacaaaactgatatcttaacccggccatcaacccaaattggacattccagactaccaccaactggatcccagctgccttcctgggcttgtgccatccaccctactggttatctgatagaacaagctggtggctgatgggtgactgctaggcgtgactgaggtaatagatgaaaagtgttctatgttatcacattggttttcctgtacctttggttactctacgtcatgaccagctgctggtgagtatgaagcctgtgctatagcccacccctactcactctcaccttctggttgaactttgcttaggccaccattgtctgcctcatcaggaactatctgtagacgtagctcccagggagctcacagcaacaccccctaccaccaggatgggcagtaatatgtgacagagcccaaagcaaggctggaacgcagtcccttccagcttagtctttctgactcctagccaacaaaccatccttaatctgagcaacttctttaggcatttcctcttttccccgcctgcacccactctgaacatgacaaaagttgccagagttggggcattgaggaagagatatttctggaatgtgagacttgttatgnnnnnnnnnnnnnnnnnnnnnnnnnnnnnnnnnnnnnnnnnnnnnnnnnnnnnnnnnnntttcttccctttcactctgaagcagttttagcttattaacagaaaacaaaactggcaaagcaggctttttgtttaatttgctctttccctgattgtgttcagagagaaaggttatgattaaatgggctccagatctcttattgcccttattcctccaccccacttcttttagcaaggtctgaaagtttcaaagggagacctataggttaattgtttagttataggcagtgttaaattaggcagattttgacatatttatctttttaccccatccattctaccaaaacctgtgtatttcttgagtttttagtttgagaagctggaaagagagagaagggcctcacagtgatgggttcaggacgggtcaaaggcaaaggcctttgtgatgtgagcaaaggcaaccaaaacttagcctcactccacttttctaaagatggaaattcttttttgggccttggactgcttctagggtagcattttgtaggtcactcttctcctttgtactattttgtttctgccctgatgtcccttgggtctccatcctactgcctggctttcttggccctcatttctcagcttctgcatttccttccctgctcctaacaaatgaagaagcaggctgcagcctgcattgtggaagatctccagcctccttgtaggggataaggggatgtgcagcatctgtgtggattttcacggacaagttccagtaggtgggacagtgatgccgtcaaggcttagttatgatcatgtgtggtgataaagaccatccaccatcacccttttcccctttggttttgaaggccttgccctaagctacctgagggtttaggaggtctgaacacacacagtggagaggttaatctaggttgggaaactgagtaaaagtccagagcaggaatgagcctgctgtggcgtgggtttggaaaggctcacaggaaagaacctgcaggatcaggggtgggaggggaggcccctgaggtgctctccagggaagaggggctggggtttaaatagcatgcttggaggaagattttccttcaatttttcctaagtccttgaattcaccagtagatttttgtaaacaaaatgtaagttgatgttttctctcaattatcctaggagtgacctttatatgtgtggaagattaatggtatatgctccttatgtcactgtttttgagtaaaatccatttcctttctctgtttcagcctatgacaaaattgatgtttacaggcctgctttttgcttataattgacaacatgtgcaaaaataccaaatttgtgtcctgtgcagtatgaagaattcagtgaatattcattaatgtattagcttgttttgctctctgttcatatatggctctattcttagaaatataatttgaatgtgatctttcaatagtctgaatattttacaaattatagctatgtcttgtgaaaataacctcacaaagaaaaatacgactctgttgtcttacttgatatttcttgccctagtaatgtacttgacatttatgttcctaagcaatgtatgtactagtagaatttctctgtccaactcaatgat

SEQ ID NO: 183931 - DNA, 1202 bp, Homo Sapiens
gtacaaaaaagttgggccttgtggagtcgtgaggagagagagaggcgtgctgcggacgccgggggccggcgcggcgttggccgcccccggcctcgccgagtgcagcgcgcccgaaggccagtgcctgcgctccgtccgcggcccggcgcccagggtgggcggggaggccgccgcgcagtcgccgcacgctacaccgccggcgccgtcgtttcgcgtcccgcttccggccaccgcggccgccattttgttcgcgcggaagcgccgcggtagggtgggaacccaagcgggagagccgcgggatttgcggccgccgccatgccgtcgtccccgctgcgggtggcggtggtgtgctcgagcaaccagaaccggagcatggaggcgcacaacatcctcagcaaacggggattcagcgtccgatcctttggaacagggactcacgtgaagcttccaggaccagctcccgacaagcccaatgtttatgatttcaaaaccacatatgaccagatgtacaatgatcttcttaggaaagacaaagaactctatacacagaatgggattttacatatgctggacagaaataagagaatcaagccccggccagaaagattccagaactgcaaagacctgtttgatctgatcctcacttgcgaagagagagtgtatgaccaggtggtggaagatctgaattccagagaacaggagacctgccagcccgtgcacgtggtcaatgtggacatccaggacaaccacgaggaggccaccctgggggcgtttctcatctgtgagctctgccagtgtatccagcacacggaagacatggagaacgagatcgacgagctgctgcaggagttcgaggagaagagtggccgcacctttctgcacaccgtctgcttctactgagcccagcgcccgcatggagccgcctctggagcttcctgttgttcatactttttccttcctgacatttgtttttacttacaggtgttctgctggtgacggtagcattacccaaataaactgtgcatatgaaatgggagaggagatgccaaaacgccagatgaaagcaatcaagtttcttcttttccacttttacttatgagcgggatattgattaccaagttttttcttctttaaccaaaaggaaagacaaccgtttgtgtgcacttccccgacatacctgtgtcttcgtgtgcctgccttcc

SEQ ID NO: 183932 - DNA, 1808 bp, Homo Sapiens
  misc_feature (178)..(192): n is a, c, g, or t
  misc_feature (863)..(873): n is a, c, g, or t
  misc_feature (1623)..(1633): n is a, c, g, or t
cctccatcaaccagctacttgcagcatctcctgaggacttgcttctcctgcctctggggaagagagggaagagaaagcacagagcagagaagcagagatgttccttgaactgcccacaagttttcaataacttttatttctgttttgtaatgaccaaaggaatgaggctgacataggnnnnnnnnnnnnnnnttttcctttatttgataaagagccaattctttaaacccatgagtttatgccctgggctccttagcccacaatagtgtaataaaagtgccccgggctggtttgtgcttatttctgccattgtccctctcacgttcccagagaggtcattctttttggtccaactcttgctgtcctttcttaccacctgtgcaccccacttggagcagtgggaggaaatctgggtttgtggccccacaaaggctgtatatgtaaagatacacctatgtatgtggtggaactcacctttacacacaactgcagcttttccttggagtctgtaccaggtggtggttatggggtctgaaccaaaggatagcagctcttcattcctcttctgacatgtgcatgctgctccccccagccctgggctttcctgaattgccaagcctggtgcctttccaaaggactagcagggcctgtggtggagccagcagaaccacagagagtgccctgcctgtctcagtggaagtgtattattgttttaaggatagaaccagaggccttgaagggagccaagacagaactcccagcctgtgtaatctattggaaggcacattttcatttctgatgcagccaccttctggaggcagcttttatcctttctctctattgctatgttgaagtaatagggnnnnnnnnnnnaacctctgggtctcgtctgtggttgagtttatggtaatgggtacatgggtcaggccatgtattaacagatgccagtgcgctctgacaagtattccaaagtgttccgtagctagactggtgcaggctcgttgtaccactgcaaccgactgacgttactgtagttcctagaatgctgtgagggcggggggttcagatcaacataaagcctaacttgctggagttgtagtctcaaggctttctctcttgcttaactaaaacctaaggaccactgtttttggtagcaattatatggttactatccactgcagtcctcagttgttggggtaaatcccacatggcagagtaaggcaccccacagaaattaacttggagagcctgagaaattcccagtggccttggcatagctgtctagaacaccatctctaggaaaatttaattctgtccctggccagctattgttcttccacttcgttttctgctgtcccaaggccagatgagtggaatcaccatctgactgttgtcaataaaatgtatctggcgtgaacagcaggataacccatgttctccacataaggataaccttacgtgaaaccttcctgctgacaaccatgcagaggaatttttccacttaagtcagagccttcctccccatctggaattcacagctgttccctggcagcacacaggagggtattaaggacctttgtgaggctaggtacactgtccacacctctttggggaagttacgannnnnnnnnnnccatcataattcagtctcttcttattctacagtgtgcactttatgcctctcgccttttgataatagttgttcagtgaaggaagtcagctgccagaatattaagaaggtctccctttatgtcagtacaactgttagggcggccttcccatttactttagtttcaagaggattcacc

SEQ ID NO: 183933 - DNA, 1443 bp, Homo Sapiens
  misc_feature (224)..(234): n is a, c, g, or t
ttgggaaaagtttcagattgaagccaattttcccaggcgagtgctgccctgcatcccttcagaggagtggcccaatccccctacgctacaggaggccggactcagccacacagaagttctttttgttcaggacctaactgacgaatgacatttttttcttcctgtcccctcctaccccagtccctaaaagaaatggggaaaaaagaaaacaacagcaagtcagnnnnnnnnnnncaagagagagaaattcatattattattattattataatacaatattttttttaaaagactgctgcatccttaggaaggatcagaaaccatgctgcccgtaagagtcacaacctgtgtgtgcgcgcaaggttagcaacaaacgtacccgcttggcaagcccacccttcctgtggcctctgtgcacgcaccttccagtgaacagagactcttcaccttcgacccatccattgtcccagctgggaaggggacattcccactagttctcattcattcttgcttttatgaaaaataaaagtgaaaaacctccatcaaccagctacttgcagcatctcctgaggacttgcttctcctgcctctggggaagagagggaagagaaagcacagagcagagaagcagagatgttccttgaactgcccacaagttttcaataacttttatttctgttttgtaatgaccaaaggaatgaggctgacataggtatatatatatatttttttcctttatttgataaagagccaattctttaaacccatgagtttatgccctgggctccttagcccacaatagtgtaataaaagtgccccgggctggtttgtgcttatttctgccattgtccctctcacgttcccagagaggtcattctttttggtccaactcttgctgtcctttcttaccacctgtgcaccccacttggagcagtgggaggaaatctgggtttgtggccccacaaaggctgtatatgtaaagatacacctatgtatgtggtggaactcacctttacacacaactgcagcttttccttggagtctgtaccaggtggtggttatggggtctgaaccaaaggatagcagctcttcattcctcttctgacatgtgcatgctgctccccccagccctgggctttcctgaattgccaagcctggtgcctttccaaaggactagcaggcctgtggtggagccagcagaaccacaggagagtgccctgcctgtctcagtggaagtgtattattgttttaaggatagaaccagaggcctttgaagggagccaagacagaactcccagcctgtgtaatctattggaaggcacattttcattttctgatgcagccaccttctggaggcagctttatcctttctctctattgctatgttgaagtaatagggttttttttaacctctggatgtctcgtctgtggttgagtttatgg

SEQ ID NO: 183934 - DNA, 1369 bp, Homo Sapiens
actttgtacaaaaaagttggctcctgaggacttgcttctcctgcctctggggaagagagggaagagaaagcacagagcagagaagcagagatgttccttgaactgcccacaagttttcaataacttttatttctgttttgtaatgaccaaaggaatgaggctgacataggtatatatatatatttttttcctttatttgataaagagccaattctttaaacccatgagtttatgccctgggctccttagcccacaatagtgtaataaaagtgccccgggctggtttgtgcttatttctgccattgtccctctcacgttcccagagaggtcattctttttggtccaactcttgctgtcctttcttaccacctgtgcaccccacttggagcagtgggaggaaatctgggtttgtggccccacaaaggctgtatatgtaaagatacacctatgtatgtggtggactcacctttacacacaactgcagcttttccttggagtctgtaccaggtggtggttatggggtctgaaccaaaggatagcagctcttcattcctcttctgacatgtgcatgctgctccccccagccctgggctttcctgaattgccaagcctggtgcctttccaaaggactagcagggcctgtggtggagccagcagaaccacaggagagtgccctgcctgtctcagtggaagtgtattattgttttaaggatagaaccagaggccttgaagggagccaagacagaactcccagcctgtgtaatctattggaaggcacattttcatttctgatgcagccaccttctggaggcagcttttatcctttctctctattgctatgttgaagtaatagggttttttttaacctctggatgtctcgtctgtggttgagtttatggtaatgggtacatgggtcaggccatgtattaacagatgccagtgcgctctgacaagtattccaaagtgttccgtagctagactggtgcaggctcgttgtaccactgcaaccgactgacgttactgtagttcctagaatgctgtgagggcggggggttcagatcaacataaagcctaacttgctggagttgtagtctcaaggctttctctcttgcttaactaaaacctaaggaccactgtttttggtagcaattatatggttactatccactgcagtcctcagttgttggggtaaatcccacatggcagagtaaggcaccccacagaaataacttggagagcctgagaaattcccagtggccttggcatagctgtctagaacaccatctctaggaaaatttaattctgtccctggccagctattgttcttccacttcgttttctgctgtcccaaggccagatgagtggaatc

SEQ ID NO: 183935 - DNA, 1663 bp, Homo Sapiens
  misc_feature (1231)..(1244): n is a, c, g, or t
ccaactttgtacaaaaaagttggctacattaaagagaaaaaagagtgccggcgggaccaccgcccaccgtgtgctcaggaggcgccccgcaacatggtgcaccccaatgtgatctgcgatggctgcaatgggcctgtggtaggaacccgctacaagtgcagcgtctgcccagactacgacttgtgtagcgtctgcgagggaaagggcttgcaccgggggcacaccaagctcgcattccccagccccttcgggcacctgtctgagggcttctcgcacagccgctggctccggaaggtgaaacacggacacttcgggtggccaggatgggaaatgggtccaccaggaaactggagcccacgtcctcctcgtgcaggggaggcccgccctggccccacggcagaatcagcttctggtccatcggaggatccgagtgtgaatttcctgaagaacgttggggagagtgtggcagctgcccttagccctctgggcattgaagttgatatcgatgtggagcacggagggaaaagaagccgcctgacccccgtctctccagagagttccagcacagaggagaagagcagctcacagccaagcagctgctgctctgaccccagcaagccgggtgggaatgttgagggcgccacgcagtctctggcggagcagatgaggaagatcgccttggagtccgaggggcgccctgaggaacagatggagtcggataactgttcaggaggagatgatgactggacccatctgtcttcaaaagaagtggacccgtctacaggtgaactccagtccctacagatgccagaatccgaagggccaagctctctggacccctcccaggagggacccacagggctgaaggaagctgccttgtacccacatctcccgccagaggctgacccgcggctgattgagtccctctcccagatgctgtccatgggcttctctgatgaaggcggctggctcaccaggctcctgcagaccaagaactatgacatcggagcggctctggacaccatccagtattcaaagcatcccccgccgttgtgaccacttttgcccacctcttctgcgtgcccctcttctgtctcatagttgtgttaagcttgcgtagaattgcaggtctctgtacgggccagtttctctgccttcttccaggatcaggggttagggtgcaagaagccatttagggcagcaaaacaagtgacatgaagggagggtcccnnnnnnnnnnnnnnctgatgtttcctgggtgccctggctccttgcagcagggctgggcctgcgagacccaaggctcactgcagcgcgctcctgacccctccctgcaggggctacgttagcagcccagcacatagcttgcctaatggctttcactttctcttttgttttaaatgactcataggtccctgacatttagttgattattttctgctacagacctggtacactctgattttagataaagtaagcctaggtgttgtcagcagcaggctggggaggccagtgttgtgggcttcctgctgggactgagaaggctcacgaaggcatccgcaatgttggtttcactgagagctgcctctggtctcttcaccactgtagttctctcatttccaaaccatcagctgcttttaaaataagatcctctttgtagcca

SEQ ID NO: 183936 - DNA, 1138 bp, Homo Sapiens
  misc_feature (72)..(80): n is a, c, g, or t
  misc_feature (899)..(940): n is a, c, g, or t
ttggcttaaaaatcgagtacaggtgatgaaatcttggcagtgttaacaaaaaagtagtgtgtattgtgctannnnnnnnnactctagaaacttaaccatttgtagagaaaaaggaaacaaattttcacacattgaagttcattctgacataaaattaatgataaataatcatagaaatcaagctttgtattttagcgaacataagtactttcaacaaactcaggtggtgtatcagggagacattttctgggtgtttttgtgtgttttctgtcttagaaaagaatgtgttctaatgcaaggatgtttctctgcaggagttattcctgatgaagctaaagctttgtctctgttggcaccagctaatgcagtggcaggtcttctgcctggtggtggactcctgcctactcctaacccacttacccagattggcgctgttccactggctgctttgggggctcctactcttgatcctgcccttgctgcacttgggcttcctggagcaaacttgaactctcagtctcttgctgcagatcagttgctgaagcttatgagtactgttgatcccaagttgaatcatgtagctgctggtctcgtttcaccaagtctgaaatcggatacctctagtaaagaaatagaggaagctatgaaaagagtacgagaagcacagtccctaatttctgctgctatagaaccagataagaaagaagaaaaaagaaggcattcaagatcaagatcacgttctaggaggaggaggactccctcatcttctagacacaggcggtcaagaagcagatcgagacggcggtcacattctaagtctaggagtcggcgacgatccaaaagcccaaggcggagaagatctcattccagagaaagaggtagaaggtcaaggagcacannnnnnnnnnnnnnnnnnnnnnnnnnnnnnnnnnnnnnnnnncgttctaaaacgccaccaaaaaagttacagcacagccagacgttctagaagtgcaagcaagagtatatttgaagtaaacatggaaattcaagagagtttgcacatttgtgattctagagagagacgacgacgaagaagcaggagtggcacaagatctcctaaaaagcctcggtctcctaaaaagaaaattgtcacgct

SEQ ID NO: 183937 - DNA, 1663 bp, Homo Sapiens
  misc_feature (154)..(217): n is a, c, g, or t
  misc_feature (319)..(346): n is a, c, g, or t
  misc_feature (1277)..(1291): n is a, c, g, or t
ttggctagaagtgcaagcagtttgcacatttgtgattctagagagagacgacgacgaagaagcaggagtggcacaagatctcctaaaaagcctcggtctcctaaaagaaaattgtcccgctcaccatcccctaggagacataaaaaggagaagnnnnnnnnnnnnnnnnnnnnnnnnnnnnnnnnnnnnnnnnnnnnnnnnnnnnnnnnnnnnnnnnagagtaaagataaggaaaaggaccgggaaagaaaatcagagagtgataaagatgtaaaagttacacgggattatgatgaagaggaacaggggtatgacagtnnnnnnnnnnnnnnnnnnnnnnnnnnnnccaatagaaacaggttcccctaaaacaaaggaatgttctgtggaaaagggaactggtgattcactaagagaatccaaagtgaatggggatgatcatcatgaagaagacatggatatgagtgactgaatattgcctctgagggagtccaactgtatacctgcatcagtgtcattcctttgtgtgatttcttaatgctgtatttgttcatctcaaacctagatgtatacagctctgagttataaatggttataaagctcctgttactcatattagttatttacatcaaaaagcttttagaaaatggtacgaggtaaccaattcttgtcatggtgaaatctgattgagtaaccaagcagttttactattctggtgctgcttcataacaaaaatgaaaagctgcatgcatctacagcagcatggattgtttatgtcgtatgatatcctttattaagtaagttcacttatagtatttctataatttgattcattgccgtaatagagccatgtaggaaatgcactgattgcatgttattgtggcaagaatatcctaaatgtcattaaaatcctccaacatgatggatctacttatggtcttgtttgttgacatgacaaattaacattcttatagttacatctggaaatgagcatttgaaatagataatcctttaagccttgtggcaaaatttttgtggcttttgtttaactttgaaaggttattatgcactaaccttttttggtggctaattagggtttaaatacagaaacaagatttcaaataaaactgtctttggcagtgagtaaatagcatattttgaagtagagttgtatactttttcataagatgtttgggaatttttttcctgaagtaataatttattccacatctacatcagtgaaagctatctacctatcctgagtctatcttaaaggnnnnnnnnnnnnnnnccttatctcttgcccttattttgaattttccactctttcattaatttgttttaagctccgtgttggaaaaaaggggtagtgcattttaaattgaccttcatacgcttttaaaataagacaaatctacttgataatgtacctttatttgatctcaagttgtataaaaccaataaatttgtgttactgcagtagtaatcttatgcacacggtgatttcatgttatatatgcaaagtaggcaactgttttcttagttacagaagtttcaagcttcacttttgtgcagtagaaacaaaagtcgctacagtctgtgccatgttgatgtacagttttctgaaattgttttacagactttgatataaactcttaaactt

SEQ ID NO: 183938 - DNA, 1321 bp, Homo Sapiens
  misc_feature (217)..(225): n is a, c, g, or t
  misc_feature (1047)..(1108): n is a, c, g, or t
ttggaactttttttgtcttgtgtatcttgatttttctgtgtgctttatagtgaagcagccgacacgagtcgttgttcataaaacagcttttgaaagttgagagcacacccctggagaaccgactgtgcttgcttacgtttggttcatgacttaaaaatcgagtacaggtgatgaaatcttggcagtgttaacaaaaaagtagtgtgtattgtgctannnnnnnnnactctagaaacttaaccatttgtagagaaaaaggaaacaaattttcacacattgaagttcattctgacataaaattaatgataaataatcatagaaatcaagctttgtattttagcgaacataagtactttcaacaaactcaggtggtgtatcagggagacattttctgggtgtttttgtgtgttttctgtcttagaaaagaatgtgttctaatgcaaggatgtttctctgcaggagttattcctgatgaagctaaagctttgtctctgttggcaccagctaatgcagtggcaggtcttctgcctggtggtggactcctgcctactcctaacccacttacccagattggcgctgttccactggctgctttgggggctcctactcttgatcctgcccttgctgcacttgggcttcctggagcaaacttgaactctcagtctcttgctgcagatcagttgctgaagcttatgagtactgttgatcccaagttgaatcatgtagctgctggtctcgtttcaccaagtctgaaatcggatacctctagtaaagaaatagaggaagctatgaaaagagtacgagaagcacagtccctaatttctgctgctatagaaccagataagaaagaagaaaaaagaaggcattcaagatcaagatcacgttctaggaggaggaggactccctcatcttctagacacaggcggtcaagaagcagatcgagacggcggtcacattctaagtctaggagtcggcgacgatccaaaagcccaaggcggagaagatctcattccagagaaagaggtagaaggtcaaggagcacatcannnnnnnnnnnnnnnnnnnnnnnnnnnnnnnnnnnnnnnnnnnnnnnnnnnnnnnnnnnnnnttacagcacagccagacgttctagaagtgcaagcagtttgcacatttgtgattctagagagagacgacgacgaagaagcaggagtggcacaagatctcctaaaaagcctcggtctcctaaaagaaattgtcccgctcaccatcccctatgagacataaaaaggagaagaagaaagataaagacaaagaaagaagtaggggatgaaagagaacg

SEQ ID NO: 183939 - DNA, 1878 bp, Homo Sapiens
  misc_feature (998)..(1039): n is a, c, g, or t
  misc_feature (1206)..(1269): n is a, c, g, or t
ttggcttttccgttgccggtgccggcctagcgtcctggaattacttcaatcaaggagcgagaacccgagcagcgccatgagcaacactaccgtcgtccccagcactgcaggtccgggccccagcggcgggcccggtggcggaggtggtggtggcggcggaggcggcggcaccgaggtaatccaggtgactaatgtctccccgagcgctagctctgagcagatgcggactctcttcggtttcctaggcaagatcgacgaactgcgcctcttcccgccggatgattcgcctttgccagtctcatctcgtgtctgctttgttaagttccatgatccagactcagcagttgtggcacagcatctgacaaacactgtattcgttgacagagctttgatagtcgtaccatatgcagaaggagttattcctgatgaagctaaagctttgtctctgttggcaccagctaatgcagtggcaggtcttctgcctggtggtggactcctgcctactcctaacccacttacccagattggcgctgttccactggctgctttgggggctcctactcttgatcctgcccttgctgcacttgggcttcctggagcaaacttgaactctcagtctcttgctgcagatcagttgctgaagcttatgagtactgttgatcccaagttgaatcatgtagctgctggtctcgtttcaccaagtctgaaatcggatacctctagtaaagaaatagaggaagctatgaaaagagtacgagaagcacagtccctaatttctgctgctatagaaccagataagaaagaagaaaaaagaaggcattcaagatcaagatcacgttctaggaggaggaggactccctcatcttctagacacaggcggtcaagaagcagatcgagacggcggtcacattctaagtctaggagtcggcgacgatccaaaagcccaaggcggagaagatctcattccagagaaagaggtagaaggtcaaggagcacannnnnnnnnnnnnnnnnnnnnnnnnnnnnnnnnnnnnnnnnncgttctaaaacaccaccaaaaagttacagcacagccagacgttctagaagtgcaagcagagagagacgacgacgaagaagcaggagtggcacaagatctcctaaaaagcctcggtctcctaaaagaaaattgtcccgctcaccatcccctaggagacataaaaaggnnnnnnnnnnnnnnnnnnnnnnnnnnnnnnnnnnnnnnnnnnnnnnnnnnnnnnnnnnnnnnnngaagaagagtaaagataaggaaaaggaccgggaaagaaaatcagagagtgataaagatgtaaaacaggttacacgggattatgatgaagaggaacaggggtatgacagtgagaaagagaaaaaagaagagaagaaaccaatagaaacaggttcccctaaaacaaaggaatgttctgtggaaaagggaactggtgattcactaagagaatccaaagtgaatggggatgatcatcatgaagaagacatggatatgagtgactgaatattgcctctgagggagtccaactgtatacctgcatcagtgtcattcctttgtgtgatttcttaatgctgtatttgttcatctcaaacctagatgtatacagctctgagttataaatggttataaagctcctgttactcatattagttatttacatcaaaaagcttttagaaaatggtacgaggtaaccaattcttgtcatggtgaaatctgattgagtaaccaagcagttttactattctggtgctgcttcataacaaaaatgaaaagctgcatgcatctacagcacgcatggattgtttatgtcgtatgatatcctttattaagtaagttcacttatagtattt

SEQ ID NO: 183940 - DNA, 2280 bp, Homo Sapiens
  misc_feature (741)..(782): n is a, c, g, or t
  misc_feature (2078)..(2092): n is a, c, g, or t
actttgtacaaaaaagttggcaagctttgtattttagcgaacataagtactttcaacaaactcaggtggtgtatcagggagacattttctgggtgtttttgtgtgttttctgtcttagaaaagaatgtgttctaatgcaaggatgtttctctgcaggagttattcctgatgaagctaaagctttgtctctgttggcaccagctaatgcagtggcaggtcttctgcctggtggtggactcctgcctactcctaacccacttacccagattggcgctgttccactggctgctttgggggctcctactcttgatcctgcccttgctgcacttgggcttcctggagcaaacttgaactctcagtctcttgctgcagatcagttgctgaagcttatgagtactgttgatcccaagttgaatcatgtagctgctggtctcgtttcaccaagtctgaaatcggatacctctagtaaagaaatagaggaagctatgaaaagagtacgagaagcacagtccctaatttctgctgctatagaaccagataagaaagaagaaaaaagaaggcattcaagatcaagatcacgttctaggaggaggaggactccctcatcttctagacacaggcggtcaagaagcagatcgagacggcggtcacattctaagtctaggagtcggcgacgatccaaaagcccaaggcggagaagatctcattccagagaaagaggtagaaggtcaaggagcacannnnnnnnnnnnnnnnnnnnnnnnnnnnnnnnnnnnnnnnnncgttctaaaacaccaccaaaaagttacagcacagccagacgttctagaagtgcaagcagagagagacgacgacgaagaagcaggagtggcacaagatctcctaaaaagcctcggtctcctaaaagaaaattgtcccgctcaccatcccctaggagacataaaaaggagaagaagaaagataaagacaaagaaagaagtagggatgaaagagaacgatcaacaagcaagaagaagaagagtaaagataaggaaaaggaccgggaaagaaaatcagagagtgataaagatgtaaaaggttacacgggattatgatgaagaggaacaggggtatgacagtgagaaagagaaaaaagaagagaagaaaccaatagaaacaggttcccctaaaacaaaggaatgttctgtggaaaagggaactggtgattcactaagagaatccaaagtgaatggggatgatcatcatgaagaagacatggatatgagtgactgaatattgcctctgagggagtccaactgtatacctgcatcagtgtcattcctttgtgtgatttcttaatgctgtatttgttcatctcaaacctagatgtatacagctctgagttataaatggttataaagctcctgttactcatattagttatttacatcaaaaagcttttagaaaatggtacgaggtaaccaattcttgtcatggtgaaatctgattgagtaaccaagcagttttactattctggtgctgcttcataacaaaaatgaaaagctgcatgcatctacagcaggcatggattgtttatgtcgtatgatatcctttattaagtaagttcacttatagtatttctataatttgattcattgccgtaatagagccatgtaggaaatgcactgattgcatgttattgtggcaagaatatcctaaatgtcattaaaatcctccaacatgatggatctacttatggtcttgtttgttgacatgacaaattaacattcttatagttacatctggaaatgagcatttgaaatagataatcctttaagccttgtggcaaaatttttgtggcttttgtttaactttgaaaggttattatgcactaaccttttttggtggctaattagggtttaaatacagaaacaagatttcaaataaaactgtctttggcagtgagtaaatagcatattttgaagtagagttgtatactttttcataagatgtttgggaatttttttcctgaagtaataatttattccacatctacatcagtgaaagctatctacctatcctgagtctatcttaaaggnnnnnnnnnnnnnnnccttatctcttgcccttattttgaattttccactctttcattaatttgttttaagctccgtgttggaaaaaaggggtagtgcattttaaattgaccttcatacgcttttaaaataagacaaatctacttgataatgtacctttatttgatctcaagttgtataaaaccaataaatttgtgttactgca

SEQ ID NO: 183941 - DNA, 1518 bp, Homo Sapiens
tttgaaagcctcgttgatgtcacggacccgcagacgctctcgggcattgttggccatcctccgctccttctcacgctctgcttctgctctggtgtcaggtcctcatcgtcattattgctagtaattgatttgatatccttcttgtcgtcatctaatttcttgtcctccgaagatttcgtgtcttgcaggttctcatcaccctcgtcatcggatttgatctcagagctgccagaggagacactctgcccctgtagtcctggtggcatgcctctgtaagggtcctggggtgggttcaggtcaggggaagtcgcagactggacaggaagctgtggaaccggaacctggtttggcagaagagaatggctgcctctcagggccacgccatcttcacgatgggtccccaccatgagtgaatgtctgttggctgaaagaaggccggttccataccctgagcccagaccacccatggctccattatgagaaggtccaatgattccatgcatgtccccatgaccaccaggcatagctgtggatgggcccactgcatggttccggagaacatgaatagcatcatccagtctttctaaacgatcttcaattcggctttgcaaagagtgtaagggtccttcataattaggagacgatgaggcctgtcctccatttctagaccaaacagctgtgcctgctgagagagatggaggagagccaacaggagttgaagggtttgatgaaaagctgttgttagtgtgatctggagaatagatcgaagcaagtgctttccccagagcatctccagtctgggagctgccggctgccccgcttcctctatttgccattatactgtctgtcccgttggcaggaggcgtacaggaagaggtgctgtaatggtttgtaccactacgatggaaagtggacatcggaggaagactggaattgatgtctgctgaggagtgtgatggatagctcaaacgttcatgtggatgcaggctacagtagctgctggactgtggaatatgagaagagttgcccaacattcctgcatagccaggctgattcatcccactggaggagctccaagggtcactgctgtgatggccatcttgcatgaagaaggagctagggaaagtgctggttgctggtttggaggaaggatagcctggcgagtccctattgtagtcggcagtgcttgctgatggagcatagactgaagatggcaaacctggaggaacttttcgaactttctttgtctgtacctccatggcactactgtgaagaggcctccttcggggattattgctagaatactgatagtactgggaaccaggtttggtgggcgaaagggttcctgggttgcccatatccatgtcacctccaaggagactctgctggtggcaaccctgtaagtttgattctctcccataagatgagtatgagcccctttctgttttaccttatgggtagcacgccgagggaggcaccagaagatctaagcccaaatacgtgatgaagagtcgccaa

SEQ ID NO: 183942 - DNA, 1716 bp, Homo Sapiens
  misc_feature (67)..(89): n is a, c, g, or t
ttggctcctggagagcaaggacgcgggggagcagagatgatccgagccgcgccgccgccgctgttcnnnnnnnnnnnnnnnnnnnnnnnagtgtcctgggcgtcccgaggcgaggcagcccccgaccaggacgagatccagcgcctccccgggctggccaagcagccgtctttccgccagtactccggctacctcaaaggctccggctccaagcacctccactactggtttgtggagtcccagaaggatcccgagaacagccctgtggtgctttggctcaatgggggtcccggctgcagctcactagatgggctcctcacagagcatggccccttcctggtccagccagatggtgtcaccctggagtacaacccctattcttggaatctgattgccaatgtgttatacctggagtccccagctggggtgggcttctcctactccgatgacaagttttatgcaactaatgacactgaggtcgcccagagcaattttgaggcccttcaagatttcttccgcctctttccggagtacaagaacaacaaacttttcctgaccggggagagctatgctggcatctacatccccaccctggccgtgctggtcatgcaggatcccagcatgaaccttcaggggctggctgtgggcaatggactctcctcctatgagcagaatgacaactccctggtctactttgcctactaccatggccttctggggaacaggctttggtcttctctccagacccactgctgctctcaaaacaagtgtaacttctatgacaacaaagacctggaatgcgtgaccaatcttcaggaagtggcccgcatcgtgggcaactctggcctcaacatctacaatctctatgccccgtgtgctggaggggtgcccagccattttaggtatgagaaggacactgttgtggtccaggatttgggcaacatcttcactcgcctgccactcaagcggatgtggcatcaggcactgctgcgctcaggggataaagtgcgcatggaccccccctgcaccaacacaacagctgcttccacctacctcaacaacccgtacgtgcggaaggccctcaacatcccggagcagctgccacaatgggacatgtgcaactttctggtaaacttacagtaccgccgtctctaccgaagcatgaactcccagtatctgaagctgcttagctcacagaaataccagatcctattatataatggagatgtagacatggcctgcaatttcatgggggatgagtggtttgtggattccctcaaccagaagatggaggtgcagcgccggccctggttagtgaagtacggggacagcggggagcagattgccggcttcgtgaaggagttctcccacatcgcctttctcacgatcaagggcgccggccacatggttcccaccgacaagcccctcgctgccttcaccatgttctcccgcttcctgaacaagcagccatactgatgaccacagcaaccagctccacggcctgatgcagcccctcccagcctctcccgctaggagagtcctcttctaagcaaagtgcccctgcaggccgggttctgccgccaggactgcccccttcccagagccctgtacatcccagactgggcccagggtctcccatagacagcctgggggcaagttagcactttattcccgcagcagttcctgaatggggtggcctggccccttctctgctta

SEQ ID NO: 183943 - DNA, 951 bp, Homo Sapiens
  misc_feature (75)..(83): n is a, c, g, or t
ttggattaatagaaccttttgagatgaattaatgtaagaatattttttaaataggcttactgtcaaattgcaacnnnnnnnnnagatacagagtggaaaacagtgctaagtcatttggcacctccttacaaatatttttcatggtcacatttattaaatgttactacatttctgaatttttgaaaaatgtattttatcattaaatggcattattttaaagggtgaaaaactgacacagtcaattcagaaaatggactgaagtctgaataaggtcattgcatttaaaaagcatataactgtacttgactgatgagggaggtgttactttcattgtatataggtcttatttcataaacagatatcctgtatcaaataaaagtatttgttatatatttgaagttatgcatggaaaggagtgtgtttaaattgttacaaacaataatgcgtcattaaaggccatgctgatcttgcataactataagtactatgaatgaatttggttggttttggtgttgtacagctcacatgtttacacactcagtgccctaatttcccctgagggaatcgctttttaagtgatccttacagtggtgttttatgttactttattacagagctccttggttttttacttctgcacttaaatttttttaaataacatgatgatggtacattttcctctattgtctagctaagggctttcggtccaccagtaaataagatcaaatgctcttaaatgttcctgttaccatcctaatgtaaatactggatttttctgtcatttagcaccatgctgcttctgtctgtcttaatgctggcattaagatcatgagccctttttctccagtagtacaggctttgaaaactacttctattaagttattgatgcaatttgatattttttcataatctataatttaaacaaaattacatcattggcatcaatctttt

SEQ ID NO: 183944 - DNA, 1408 bp, Homo Sapiens
ttggggcaggagggggaagatggagcccagcaccgcggcccgggcttgggccctcttttggttgctgctgcccttgcttggcgcggtttgcgccagcggaccccgcaccttagtgctgctggacaacctcaacgtgcgggagactcattcgcttttcttccggagcctgaaggaccggggctttgagctcacattcaagaccgctgatgaccccagcctgtctctcataaagtatggggaattcctctatgacaatctcatcattttctccccttcggtagaagattttggaggcaacatcaacgtggagaccatcagtgcctttattgacggtggaggcagtgtgctggtagctgccagctccgacattggtgaccctcttcgagagctgggcagtgagtgcgggattgagtttgacgaggagaaaacggctgtcattgaccatcacaactatgacatctcagaccttggccagcatacgctcatcgtggctgacactgagaacctgctgaaggccccaaccatcgttgggaaatcatctctaaatcccatcctctttcgaggtgttgggatggtggccgatcctgataaccctttggtgctggacatcctgacgggctcttccacctcttactccttcttcccggacaagcctatcacccagtatccacatgcggtggggaagaacaccctcctcattgctgggctccaggccaggaacaatgcccgcgtcatcttcagcggctccctcgacttcttcagcgactccttcttcaactcagcagtgcagaaggcggcgcccggctcccagaggtattcccagacaggcaactatgaactagctgtggccctctcccgctgggtgttcaaggaggagggtgtcctccgtgtggggcctgtgtcccatcatcgggtgggcgagacagccccacccaatgcctacactgtcactgacctagtggagtatagcatcgtgatccagcagctctcaaatggcaaatgggtcccctttgatggcgatgacattcagctggagtttgtccgcattgatccttttgtgaggaccttcctgaagaagaaaggtggcaaatacagtgttcagttcaagttgcccgacgtgtatggtgtattccagtttaaagtggattacaaccggctaggctacacacacctgtactcttccactcaggtatccgtgcggccactccagcacacgcagtatgagcgcttcatcccctcggcctacccctactacgccagcgccttctccatgatgctggggctcttcatcttcagcatcgtcttcttgcacatgaaggagaaggagaagtccgactgaggggctagagccctctccgcacagcgtggagatggcagggagggggttattaggattggtggtttgttt

SEQ ID NO: 183945 - DNA, 2841 bp, Homo Sapiens
ttgggtgtggaggagactgagtattctaccttgtaaatactgttatttgtatatactgtaaatgatgacatcggtgggcactaaccgagcccggggaaactgggaacaacctcaaaaccaaaaccagacacagcacaagcagcggccacaggccactgcagaacaaattagacttgcacagatgatttcggaccataatgatgctgactttgaggagaaggtgaaacaattgattgatattacaggcaagaaccaggatgaatgtgtgattgctttgcatgactgcaatggagatgtcaacagagctatcaatgttcttctggaaggaaacccagacacgcattcctgggagatggtcgggaagaagaagggagtctcaggccagaaggatggtggccagacggaatccaatgaggaaggcaaagaaaatcgagaccgggacagagactatagtcggcgacgtggtgggccaccaagacgggggagaggtgccagccgtggacgagagtttcgaggtcaggaaaatggattggatggcaccaagagtggagggccttctggaagaggaacagaaagaggcagaaggggccgtggccgaggcagaggtggctctggtaggcgaggaggaaggttttctgctcaaggaatgggaacctttaacccagctgattatgcagagccagccaatactgatgataactatggcaatagcagcggcaatacgtggaacaacactggccactttgaaccagatgatgggacgagtgcatggaggactgcaacagaggagtgggggactgaagattggaatgaagatctttctgagaccaagatcttcactgcctctaatgtgtcttcagtgcctctgcctgcggagaatgtgacaatcactgctggtcagagaattgaccttgctgttctgctggggaagacaccatctacaatggagaatgattcatctaatctggatccgtctcaggctccttctctggcccagcctctggtgttcagtaattcgaagcagactgccatatcacagcctgcttcagggaacacattttctcatcacagtatggtgagcatgttagggaaaggatttggtgatgtcggtgaagctaaaggcggcagtactacaggctcccagttcttggagcaattcaagactgcccaagccctggctcagttggcagctcagcattctcagtctggaagcaccaccacctcctcttgggacatgggctcgacgacacaatccccatcactggtgcagtatgatttgaagaacccaagtgattcagcagtgcacagcccctttacaaagcgccaggcttttaccccatcttcaaccatgatggaggtgttccttcaggagaagtcacctgcagtggctacctccacagctgcacctccacctccgtcttctcctctgccaagcaaatccacatcggctccacagatgtcgcctggatcttcagacaaccagtcctctagccctcagccggctcagcagaaactgaaacagcagaagaaaaaagcctccttgacttctaagattcctgctctggctgtggagatgcctggctcagcagatatctcagggctaaacctgcagtttggggcattgcagtttgggtcagagcctgtcctttctgattatgagtccacccccaccacgagcgcctcttcaagccaggctccaagtagcctgtataccagcacggccagtgaatcatcctctacaatttcatctaaccagagtcaggagtctggttatcagagcggcccaattcagtcgacaacctatacctcccaaaataatgctcagggccctctttatgaacagagatccacacagactcggcggtaccccagctccatctcttcatcaccccaaaaggacctgactcaggcaaagaatggcttcagttctgtgcaggccacgcagttacagaccacacaatctgttgaaggtgctacaggctctgcagtgaaatctgattcaccttccacttctagcatcccccctctcaatgaaacggtatctgcagcttccttactgacgacaaccaatcagcattcatcctccttgggtggcttgagccacagtgaggagattccaaatactaccaccacacaacacagcagcacgttatctacgcagcagaataccctttcatcatcaacatcttctgggcgcacttcgacatccactcttttgcacacaagtgtggagagtgaggcgaatctccattcttcctccagcactttttccaccacatccagcacagtctctgcacctcccccagtggtcagtgtctcctccagtctcaatagtggcagtagcctgggcctcagcctaggcagcaactccactgtcacagcctcgactcgaagctcagttgctacgacttcaggaaaagctcctcccaacctccctcctggggtcccgccgttgttgcctaatccgtatattatggctccagggctgttacatgcctacccgccacaagtatatggttatgatgacttgcagatgcttcagacaagatttccattggattactacagcatcccatttcccacacccactactccgctgactgggagggatggtagcctggccagcaacccttattctggtgacctcacaaagttcggccgtggggatgcctcctccccagccccggccacaaccttggcccaaccccaacagaaccagacgcagactcaccataccacgcagcagacattcctgaaccgggcgctgcctcctggctacagttacaccagcctgccatactatacagggttcccgggcctccccagcaccttccagtatgg

SEQ ID NO: 183946 - DNA, 1822 bp, Homo Sapiens
ctataaaagccaactttgtacaaaaaagttggcgatgacataccatttgggatcacttccaacagtgacgtgttctccaaataccagctcgacaaagatggggttgtcctctttaagaagtttgatgaaggccggaacaactttgaaggggaggtcaccaaggagaacctgctggactttatcaaacacaaccagctgccccttgtcatcgagttcaccgagcagacagccccgaagatttttggaggtgaaatcaagactcacatcctgctgttcttgcccaagagtgtgtctgactatgacggcaaactgagcaacttcaaaacagcagccgagagcttcaagggcaagatcctgttcatcttcatcgacagcgaccacaccgacaaccagcgcatcctcgagttctttggcctgaagaaggaagagtgcccggccgtgcgcctcatcaccctggaggaggagatgaccaagtacaagcccgaatcggaggagctgacggcagagaggatcacagagttctgccaccgcttcctggagggcaaaatcaagccccacctgatgagccaggagctgccggaggactgggacaagcagcctgtcaaggtgcttgttgggaagaactttgaagacgtggcttttgatgagaaaaaaaacgtctttgtggagttctatgccccatggtgtggtcactgcaaacagttggctcccatttgggataaactgggagagacgtacaaggaccatgagaacatcgtcatcgccaagatggactcgactgccaacgaggtggaggccgtcaaagtgcacagcttccccacactcaagttctttcctgccagtgccgacaggacggtcattgattacaacggggaacgcacgctggatggttttaagaaattcctggagagcggtggccaggatggggcaggggatgatgacgatctcgaggacctggaagaagcagaggagccagacatggaggaagacgatgatcagaaagctgtgaaagatgaactgtaatacgcaaagccagacccgggcgctgccgagacccctcgggggctgcacacccagcagcagcgcacgcctccgaagcctgcggcctcgcttgaaggagggcgtcgccggaaacccagggaacctctctgaagtgacacctcacccctacacaccgtccgttcacccccgtctcttccttctgcttttcggtttttggaaagggatccatctccaggcagcccaccctggtggggcttgtttcctgaaaccatgatgtactttttcatacatgagtctgtccagagtgcttgctaccgtgttcggagtctcgctgcctccctcccgcgggaggtttctcctctttttgaaaattccgtctgtgggatttttagacatttttcgacatcagggtatttgttccaccttggccaggcctcctcggagaagcttgtcccccgtgtgggagggacggagccggactggacatggtcactcagtaccgcctgcagtgtcgccatgactgatcatggctcttgcatttttgggtaaatggagacttccggatcctgtcagggtgtcccccatgcctggaagaggagctggtggctgccagccctggggcccggcacaggcctgggccttccccttccctcaagccagggctcctcctcctgtcgtgggctcattgtgaccactggcctctctacagcacggcctgtggcctgttctaggcagaaccacgacccttgactcccgggtggggaggtggccaaagatgctggagctgaatcagacgctgacagttcttcaggcatttcta

SEQ ID NO: 183947 - DNA, 1054 bp, Homo Sapiens
  misc_feature (984)..(995): n is a, c, g, or t
ttggcccaaggcgctgggcctggagcaggagaaagggagtggaggcgcgtcggagactatgaagcgcggcattcggcgggatcctttccggaagcggaagctcggcgggcgggccaagaaggtccgggagcccacggcggttaattctttttaccgtgaggcttcacttccctcggtctgggcttctctgaggcggcgagagatggtcaggtctggagctcgaccgggccaggtgttatcttcaggaaggcacactggacctgctaaattaacaaatggaaagaaagcgtaagtacttgaagacgtttacaacttcagatttcaaggaatttttcaggtctttgggctggatgacatgtcgtctaccccagaaaattaggtaggcctctaccatcacaagctctgaggaacaatttttcatgtctacccatgttaatcattttagtatttaacagtctttctgatcttcagaatgtgtttataaattcatcttgtacatggttggacaagctttcttgtctttgctggaaagaaaatgactacttactaatatattttgggaaaaatatttgtaagaatattaataagcttgttttccaggacctatttaagaaaaataccacgttttaatgcagattctggctattccatccattctgattcagaaagtcaggtaagattgaatagatacaatacacactattttaattagttttcaaatagtagctaaaaagtaggaataaaatgcaaagtattaattgctctaaggaagtatgaagtctgttgctttaaaacatcttttctaccaataatagtttgtaaataaacaaattttaaaactacataatttatattttttcctacactaacagtcatatacaaatgtattctaaatgactttatttcttacaggctgaaactgtacacgggcttgatggttgtgcttctttgctgagggacattttgagaaatgaagattcacgnnnnnnnnnnnnaattctttgctgatcaccttatctcaagtcattattttgatgtaacaaatttttgtttt

SEQ ID NO: 183948 - DNA, 2965 bp, Homo Sapiens
  misc_feature (2821)..(2852): n is a, c, g, or t
ttggcttacggtaaaagtttttgaagaatcatatttcaagaacttttttcttcttccacattagcatcttcagataataagaaacagatacctaatgaagcttctgctagaagtgaaagagacacatcagacctagagcaaaactggtcattgcaagatcattatagaatgtattcacccataatataccaagccctctgtgagcacgtgcagactcagatgtcactgatgaatgacttgacttcaaagaacatccctaatggaattcctgctgtaccatgccatgctccctctcattctgaatctcaggcaactcctcattctagttatggcttatgtacctccaccccagtctggtcacttcagcggccaccctgccctccaaaggttcattctgaagttcaaactgatggcaacagtcagtttgcatcacaaggtaaaacagtttctgcaacctgtactgatgttctacggaattcatttaataccagtcctggagttccatgtagcctgcccaaaactgacatatcagctattccaacattgcagcaactgggccttgttaatggaattctgccacaacaaggaattcataaggaaacagacctactaaaatgtattcaaacatatttgtctctttttcgatctcatggaaaagaaacgcatctggacagtcagacacaccgaagccctactcagtcacaaccagctttcttggccactaatgaagaaaaatgtgccagagagcaaattagagaggccacaagtgaaagaaaggatttaaacatacatgtgcgagatacaaaaacagtgaaggatgtacagaaggcaaaaaatgtgaacaagacagctgaaaaagttagaattataaaatatttgttgggagagctcaaggccctggtagcagaacaagaggattcagaaattcagaggttgattacagaaatggaggcatgtatatctgtacttccaacagtaagtggaaacacagatattcaagttgagatagcactggccatgcaaccattaagaagtgagaatgctcagttacgaaggcagttgagaattttgaaccagcaactcagagaacaacagaaaactcaaaaaccatctggtgctgtggattgcaaccttgaattgttttctcttcagtcattgaatatgtcactgcaaaatcaattggaggagtcactaaagagccaggaattactgcagagtaaaaatgaagagctgttaaaagtgattgaaaatcagaaagatgaaaacaaaaaatttagtagtatatttaaagacaaagatcaaactatacttgaaaataaacagcaatatgatattgagataacaagaataaaaattgaattggaggaagccctagtcaatgtgaaaagctcccagtttaagttagaaactgctgaaaaggaaaaccagatattggggataacattacgtcagcgtgatgctgaggtgactcgactaagagaattaaccagaactttacagactagcatggcaaagcttctctccgatcttagtgtggacagtgctcgctgcaagcctgggaataaccttaccaaatcactcttgaacattcatgataaacaacttcaacatgacccagctcctgctcacacttccataatgagctatctaaataagttagaaacaaattacagttttacacattcagagccactttctacaattaaaaatgaggaaaccatagagccagacaaaacctatgaaaatgttctgtcctccagaggccctcaaaatagtaacactaggggcatggaggaagcatctgcacctggaattatttctgccctttcaaaacaggattctgatgaagggagtgaaactatggctttaatagaagatgagcataatttggataatacaatttacattccttttgctagaagcactcctgaaaagaaatcaccactttctaagagactatcccctcagccacaaataagagcagctacaacacagctagtcagcaacagtggacttgctgtctctggaaaagaaaataaactgtgtacacctgtaatctgttcctcttcaacaaaggaagcagaagatgcacctgaaaaactttccagagcatctgatatgaaggacacacagctcctcaagaaaataaaggaagcaattggtaagatccctgctgccaccaaggagccagaggaacaaactgcatgtcatggcccatcaggttgtcttagcaacagccttcaagtgaaaggcaatactgtctgtgatggtagtgttttcacttctgacttgatgtctgactggagcatctcttcgttttcaacgttcacttctcgtgatgaacaagacttcagaaatggccttgcggcattagatgccaacatagctagactccagaagtctttaaggactggtcttctggagaaatgaattcagaagaaaattcatcaggtgcttctttttaaaactagaacttggctatattgaatgtgtatttttctttagtgaaatgatgttttatgttattatgtgtgaagtaatatattgtacaagtaataaatgtattgttgagatatattgacactgaggagcttataaaaacaagtcatcttaagttcacaattgctacaagaagaaagttgtggataactaggaaattattgtaagtaatgttttatttcagtacttagcaattagagttcttttattaagatgtatctgctggattaaggggtacaggttgaaatagttctgtggctgtcctaagaaataatgggaaaagaatctctggatgtaagtttttctgttgaaactagagggnnnnnnnnnnnnnnnnnnnnnnnnnnnnnnnnaatagcaatgtgtttttattaaacatgctgtgtgccacaggccagtgttgttggtgaaatatataaacatttatttaaagagaaaagttacagtatctacaccttcttaaaaa

SEQ ID NO: 183949 - DNA, 876 bp, Homo Sapiens
agcacttttacacctagtgcccacaggggccctgcctcccttgaaagaggaagtctgcagtgagtgccagaccctggggggcctgccaaggggacatgagggctcagttcctattgaatttttccaagactgttgagttggtgtgttcaaacagccactgctgggtgagagaggatgggttgcaggtgttcatgaagatcctatggtcactttcactgcagtccatgcagctgccactgacagggtggtacagggtcttgtctttgcggtatttccacagctggttgcccttcatgctgtggcagtcgtacagcgtgacagggctggtgtgggaaatggcatcaaagcagaacttcttggtgtgctgggggtctccaggccggatgtcctctctccaggtgaaggtgaatacctgcatgttgttccaggcagcctccccacggcctcggacgcagccctctagccttagtggggagcccaaggccccgtgctttgtgtctgcacacagccctgtgcccacatttcggatctgaaagggaaagagggaagaagtggaccactgaggtgccttaaggtgcccaccgggtccctgccaggtgaaaggggaaaccaagtgggagacattagctggattaaccttcaaatcgtcttgataaagcttgccctgggctgttggaagtaccttgagcctctcaatgaaggaagactcagtccacagaatgtaatccttaaagcactgctgtaagtagtattgtagagtatgcagagtcctgggttggtggtgggggagtggaggtgaggagttggtaaaggactccctggccctactcctggagaaattgaaccgacaggtccaggaaccagattttaccccca

SEQ ID NO: 183950 - DNA, 1735 bp, Homo Sapiens
ccataaaagccaactttgtacaaaaaagttggcccacctcctgtaagtggcttgtcagaacctacatctttcatgctttcattgtctcaccaagagaagccagaagagcctccgacatctaatgaatgcttagaagatataaccgtaaaagatggactttctctccagtttaaaagatttagagaaactgtaccaacttgggatacaataagagatgaagaagatgttcttgatgagctcttgcagtatttgggtgttactagtcctgaatgcttacagagaactggaatctcacttaatattcctgctccacaacctgtgtgcatttctgaaaaacaagaaaatgatgttattaatgctatccttaagcaacatacagaagaaaaagaatttgttgagaagcactttaatgacttaaacatgaaagctgtggaacaagatgaaccaatacctcaaaaacctcagtcagcattttattattgcagattgcttcttagtatattgggaatgaattcctgggacaaacggaggagctttcatctcctgaagaaaaatgaaaagctacttagagaacttaggaacttggattcaaggcagtgccgagagacacacaagattgcagtattttatgttgctgaaggacaagaagacaaacactccattctcaccaatacaggaggaagtcaagcatatgaagattttgtagctggtcttggttgggaggtaaatcttacaaaccattgtggttttatgggaggactacaaaaaaacaaaagcactggattgaccactccatattttgctacctctacagtagaggtaatatttcacgtgtcaacaagaatgccttctgattctgatgattctttgaccaaaaaattgagacatttgggaaatgatgaagtgcacattgtttggtcagagcatactagagactacaggagaggaattattcccacagaatttggtgatgtccttattgtaatatatccaatgaaaaatcacatgttcagtattcagataatgaaaaaaccagaggttcccttctttggtcccctttttgatggtgctattgtgaatggaaaggttctacccattatggttagagcaacagctataaatgcaagccgtgctctgaaatctctgattccattgtatcaaaacttctatgaggagagagcacgatacctgcaaacaattgtccagcaccacttagaaccaacaacatttgaagattttgcagcacaggttttttctccagctccctaccaccatttaccatctgatgccgatcattaaatatcagttctgtttatctgaaggctcctacccagagattctacccagtgaaactcccacagcaacgcaggtagatggggctgacctggcctctccaatgtctcctcgaactagcaaaagccgcatgtccatgaagctgcgtcgttcctctggctcagccaataaatcctaaggagacaagcagcccagcagtgatcagcagtagccaccttagcacgaacatagggttaaccctttcaggccttcatgtctgccataacatgcatgtttcttcctgtacatttatttgagaaaacactggatttaaataattttaaataatttgtagcttaatattaaagatttaagttatttattgtttcactttttttcccacaatccaagctgccatattttggagggcagggggagttttattctacaccctttaccttcc

SEQ ID NO: 183951 - DNA, 1322 bp, Homo Sapiens
ttggaaaatcacatgttcaatattcagataatgaaaaaaccagaggttcccttctttggtcccctttttgatggtgctattgtgaatggaaaggttctacccattatggttagagcaacagctataaatgcaagccgtgctctgaaatctctgattccattgtatcaaaacttctatgaggagagagcacgatacctgcaaacaattgtccagcaccacttagaaccaacaacatttgaagattttgcagcacaggttttttctccagctccctaccaccatttaccatctgatgccggctcctacccagagattctacccagtgaaactcccacagcaacgcaggtagatggggctgacctggcctctccaatgtctcctcgaactagcaaaagccgcatgtccatgaagctgcgtcgttcctctggctcagccaataaatcctaaggagacaagcagcccagcagtgatcagcagtagccaccttagcacgaacatagggttaaccctttcaggccttcatgtctgccataacatgcatgtttcttcctgtacatttatttgagaaaacactggatttaaataattttaaataatttgtagcttaatattaaagatttaagttatttattgtttcattttttttcccacaatccaagctgccatattttgagggcagggggagttttattctacaccctttaccttcctagataattatgtctaagtagttttatctttaatttcatggttaactgtgagccaaaatacaattggacaattagtctcattatttattgtgccccattgcaactttatggttcaataaatatataattttttacaaatgtaaaattttacatttaagcatttgtaaagttacagcaaaagatgtacctgttaatacacagaatgtgtacagattatttgttatgacaataaaacactcaaaataaatggtctttagcatctcaaattccaactgaaatcattttagtattaactcttcttcccaaagcaatgtctcatttcttggctgtgcaggtgatgccatgttatatccaataactagaaaaatcactgtgctgaacttttatgtttagcttccaagtatttttctaatgttttgcatttcaagtggtatcactgttaaatgccatttgttttcagattgtggccttttattattggctgctagatcctggtgtttctatgttcttttttaagcaccaaaaagaagatggggaagaaaagaaggaaaattttctgatataaatatgttgttcaaattatgagtattatttaaaaaagacacaagaacc

SEQ ID NO: 183952 - DNA, 913 bp, Homo Sapiens
ttggcggggaactactctccttgcctcgctctgtctccttcgaagtgctctgcgcgaggttcagagcggccgccgcctccaaagggacggttttctagagctccgacgcctctcggtgcccctctgctccggcccttgccctttgacctcgctctcgcggcagggtgagaggtcgggtggccatcttgtggcggcggcgcgggcggctgttactgcggagacccatcccctcccccttctcgcacccctggcagtctgtcagtcggtaaaaagtcccgcagcctgtcaggtgaggccccggcctcgtgccgtcgctcttcccgccgcactgggcggcccaggccgctccctgccgggcctcactgccgccaccatgtcctccttctctgagtcggcgctggagaagaagctctcggagctgagcaactctcagcagagcgtgcagaccctgtccctttggctcatccaccaccgcaagcacgcgggacccatcgtctccgtgtggcaccgcgagctccgcaaagccaaatcaaatagaaagcttacttttctgtatttagcgaatgatgtcatccaaaacagtaaaaggaaaggacctgaattcactagagaatttgaatctgtccttgtggatgctttttctcatgttgccagagaggcagatgaaggctgtaaaaaacctttagaaagattgctgaacatctggcaagaacgaagtgtgtatggcggcgagttcatacagcagctgaagctgtctatggaggactccaagagccctccccccaaagcaacagaagagaagaaatctctgaaacgaacttttcagcaaattcacgaggaggaggatgacgactaccctggcagctactctccttcaggatccttctgcaggacccctcttggactgaaggaa

SEQ ID NO: 183953 - DNA, 2180 bp, Homo Sapiens
  misc_feature (60)..(68): n is a, c, g, or t
  misc_feature (1809)..(1822): n is a, c, g, or t
ttggcttaattccttaaagtgaaataattttttgcaaaggggtttcctcgatttggagcnnnnnnnnncttccaccgtcatttctaactcttaaaaccaactcagttccatcatggtgatgttcaagaagatcaagtcttttgaggtggtctttaacgaccctgaaaaggtgtacggcagtggcgagaaggtggctggccgggtgatagtggaggtgtgtgaagttactcgtgtcaaagccgttaggatcctggcttgcggagtggctaaagtgctttggatgcagggatcccagcagtgcaaacagacttcggagtacctgcgctatgaagacacgcttcttctggaagaccagccaacaggtgagaatgagatggtgatcatgagacctggaaacaaatatgagtacaagttcggctttgagcttcctcaggggcctctgggaacatccttcaaaggaaaatatgggtgtgtagactactgggtgaaggcttttcttgaccgcccgagccagccaactcaagagacaaagaaaaactttgaagtagtggatctggtggatgtcaatacccctgatttaatggcacctgtgtctgctaaaaaagaaaagaaagtttcctgcatgttcattcctgatgggcgggtgtctgtctctgctcgaattgacagaaaaggattctgtgaaggtgatgagatttccatccatgctgactttgagaatacatgttcccgaattgtggtccccaaagctgccattgtggcccgccacacttaccttgccaatggccagaccaaggtgctgactcagaagttgtcatcagtcagaggcaatcatattatctcagggacatgcgcatcatggcgtggcaagagccttcgggttcagaagatcaggccttctatcctgggctgcaacatccttcgagttgaatattccttactgatctatgttagcgttcctggatccaagaaggtcatccttgacctgcccctggtaattggcagcagatcaggtctaagcagcagaacatccagcatggccagccgaaccagctctgagatgagttgggtagatctgaacatccctgataccccagaagctcctccctgctatatggatgtcattcctgaagatcaccgattggagagcccaaccactcctctgctagatgacatggatggctctcaagacagccctatctttatgtatgcccctgagttcaagttcatgccaccaccgacttatactgaggtggatccctgcatcctcaacaacaatgtgcagtgagcatgtggaagaaaagaagcagctttacctacttgtttctttttgtctctcttcctggacactcactttttcagagactcaacagtctctgcaatggagtgtgggtccaccttagcctctgacttcctaatgtaggaggtggtcagcaggcaatctcctgggccttaaaggatgcggactcatcctcagccagcgcccatgttgtgatacaggggtgtttgttggatgggtttaaaaataactagaaaaactcaggcccatccattttctcagatctccttgaaaattgaggccttttcgatagtttcgggtcaggtaaaaatggcctcctggcgtaagcttttcaaggtttttttggaggctttttgtaaattgtgataggaactttggaccttgaacttacgtatcatgtggagaagagccaatttaacaaactaggaagatgaaaagggaaattgtggccaaaactttgggaaaaggaggttcttaaaatcagtgtttcccctttgtgcacttgtagnnnnnnnnnnnnnnccttctagagctgatttgatggacaatggagagagctttccctgtgattataaaaaaggaagctagctgctctacggtcatctttgcttagagtatactttaacctggcttttaaagcagtagtaactgccccaccaaaggtcttaaaagccatttttggagcctattgcactgtgttctcctactgcaaatattttcatatgggaggatggttttctcttcatgtaagtccttggaattgattctaaggtgatgttcttagcactttaattcctgtcaattttttgttctccccttctgccatcttaaatgtaagctgaaactggtctactgtgtctctagggttaagccaaaagac

SEQ ID NO: 183954 - DNA, 1598 bp, Homo Sapiens
  misc_feature (101)..(164): n is a, c, g, or t
  misc_feature (1398)..(1415): n is a, c, g, or t
ttggcgccgccccgctgccccgaacgcgggccatacgcagcctccttggagtgacgggccgaccccggacgaccccggccacggacagacccgggacgacnnnnnnnnnnnnnnnnnnnnnnnnnnnnnnnnnnnnnnnnnnnnnnnnnnnnnnnnnnnnnnnnatgcgtgcgacatggcctcggcggtgtttgagggcacgtcgctcgtgaacatgttcgtgcgcggctgctgggtgaacggcatccgcaggctcatcgtcagccggcgcggcgacgaagaggagttcttcgagatccgcacggagtggtcggaccgcagcgtgctctacctgcaccgcagcctggcggacctgggccgcctgtggcagcgcctgcgcgacgcctttcccgaggaccggtccgaactggcgcaggggccgctgcggcaaggactggttgccataaaggaagcccacgacatagagaccaggcttaatgaggtggagaagctgctgaagacgatcataagcatgccctgtaaatattctagatcggaagttgtgctcaccttcttcgaaagatctcctctggatcaggtgttaaaaaatgataatgtgcataaaattcaacccagctttcaaagtccagtcaaaatatcagaaatcatgaggtccaatggattttgtttagcaaataccgaaacaatagttattgaccacagtataccaaatggaagagaccagcacctgggcgtggacccaacagagcatttatttgagaatggcagtgagtttccctcagagctggaggacggggacgacccagcagcctacgtcaccaacctgtcatattaccacctggtccccttcgagacagacatttgggactgaacctctctatcaggcctcccccgcctcagctgttcactgccagctctgatgctgtccactgtgctggcccccatggtcacagctgctgacccagctctggaactcccagacgtcccaggccccactgacgccaggaggcctgggtgtcctgcaagtggagcagcaggggctcctagtgggccaggctgaccgcagagtctccagcaagctgaggtcacagccggaggccacagggcctgtgttctgagggtcttcactccctgcttggtgcccacagggctgcgcactgccagggcagggacagttcctgtggggctcgctctcactgctactgcttcctgggaggtgcatccctcttggtgaagtggcctagtgccccccagccaccctgactccccaccattccctcccacggcaaacgcacaaaacgtcttgagggagattttgacaagtcacccattccaggtgccacaggcaggggatgtttagtaatccaggatttctctgagaactgggatatgtggccnnnnnnnnnnnnnnnnnnatcttttatctggaaactgggtttgggtcaaccccaggagtatttgcagaagcccagcacagtggggggtattggctgcagggcaggaacgcattgccgactagataaccgtgtgagcttggactgagcgttggtggttcttcccaaaggaaaggatttctcccggcctgccaggtctctggg

SEQ ID NO: 183955 - DNA, 1042 bp, Homo Sapiens
  misc_feature (798)..(814): n is a, c, g, or t
ctttgtacaaaaaagttggcaaagtccagtcaaaatatcagaaatcatgaggtccaatggattttgtttagcaaataccgaaacaatagttattgaccacagtataccaaatggaagagaccagcacctgggcgtggacccaacagagcatttatttgagaatggcagtgagtttccctcagagctggaggacggggacgacccagcagcctacgtcaccaacctgtcatattaccacctggtccccttcgagacagacatttgggactgaacctctctatcaggcctcccccgcctcagctgttcactgccagctctgatgctgtccactgtgctggcccccatggtcacagctgctgacccagctctggaactcccagacgtcccaggccccactgacgccaggaggcctgggtgtcctgcaagtggagcagcaggggctcctagtgggccaggctgaccgcagagtctccagcaagctgaggtcacagccggaggccacagggcctgtgttctgagggtcttcactccctgcttggtgcccacagggctgcgcactgccagggcagggacagttcctgtggggctcgctctcactgctactgcttcctgggaggtgcatccctcttggtgaagtggcctagtgccccccagccaccctgactccccaccattccctcccacggcaaacgcacaaaacgtcttgagggagattttgacaagtcacccattccaggtgccacaggcaggggatgtttagtaatccaggatttctctgagaactgggatatgtggccnnnnnnnnnnnnnnnnnatcttttatctggaaactgggtttgggtcaaccccaggagtatttgcagaaggcccagcacagtggggggtattggctgcagggcagggaaaggcattgccgactagataaccgtgtgagcttggactgagcgttggtggttcttcccaaaggaaggaatttctcccggcctgccaggtctctgggccttcagcgcgggtcctggtgctgcggtacaccaccctgggg

SEQ ID NO: 183956 - DNA, 1505 bp, Homo Sapiens
ttatattttggatgctgcttgaatccaatctctccccaacaatgaggcactggatcacccactcttgtgacaccacaggcagctgcaatgcttcagcacacttcagcaccgaggctgggcatgaggggtcccgtcaccaccacatcaaatacccataaagcaatatctttgttatgggcacttgaatggtgctgcttcacagaggctgcaccaccagtcatgaggatctcagaccagagctccaggaagttctgctgttggtctgataccaagagtaccttcagattctggaaaggattttcacggggttgccagtccagaattctttgctcctcaaggctgtacccagctggcaacagataattacggtagttctggagctggttggcatggcaactatcatggacccagacatgagacacacaaggaatcccactggcaaggcacaggaagtacttccgggttcgacaatgctgatccgcaattagaagacactggtaagctgtgttacactgggcttcattgaaatcttcaaggatatagccagctcctgctcgaagctgggattctgtatactgcttgttgaaaggaggaatttccaaaaattcctcctcttcttcactgcttcctgtaggaccatctggcagtttggagcggctggccaacttgtcactggttgtggccatggtaaggagaaatgcgtagcccagaaacaaggtcttgttgagaggcaaaggccctctctgctcttccagggcagagggttcaccggtgttgtctccactctcacaggggctcacaaactctcctgcccctactgcaccaggttttactgtggcagacttgcgacctcgcttggcaggggaccgttcctcttcagaagtgataagttttcttttgcctgagagaactcccatggaggcacgaggactttctgtgatctttcgggtaggggttgtgctgctgctactggaggcagtaggggtggctggggagctgacgttactgcgccgtttccgcttcccttccaccaaattgtctaagctgatatctgctgcctttgtaagaggtgttactgcttcataggggccaagcccatactgctctctcagtctgtttccttgctccaaggacaggatgacagccattcgcttataccactttctttggccttctttttcaatgctgtagtacagttccccagactccttcctatgtcctttcaccactcctgcactgaaatactcatcctccgagagggccgtcacttcagtgtccagcgggatggggtcacataacagaatgtctttgcccaacacatcacattcgtacccatcatcaaagagcaatttatacttcccagctccgacatctcgtgtgattttcccagagtaaaagtagccattggatgaccacttggctacaacacggagccctacaaagctatttcctggagaggaggcatctaagccatcagaagggccagccaacttttttgtacaaag

SEQ ID NO: 183957 - DNA, 1499 bp, Homo Sapiens
ttgggttggtccaagtgtcccggcctgaggtgtcggccggatccctccttctcccggcgcctcaagcggaagaccattcctcaagaattttgtatccaaggcccaaaagtttgttacccaagatgatgaatgctgacatggatgcagttgatgctgaaaatcaagtggaactggaggaaaaaacaagacttattaatcaagtgttggaactccaacacacacttgaagatctctctgcaagagtagatgcagttaaggaagaaaatctgaagctaaaatcagaaaaccaagttcttggacaatatatagaaaatctcatgtcagcttctagtgtttttcaaacaactgacacaaaaagcaaaagaaagtaagggattgacacccttctgttttatggaattgctgctgatcattttttctttaaaacttggatagattccaaaagttacagtacctttgtggcttcattgaatatttatgaagataatgtcagatgtagacaaaaataacacaataacaggagacttccataagtttgtgtattatgttagtctatgaaaacgtgcaaatgtattgtagagactttatgattagaattgcatatatttatgaaacttaaagatgaatgttttattgaatttgtaggtttagcactgtcttttattataggattagtaagatatacaagaaaataaccaccgtgttgtgaaaaagtgaccaaaatcatgtactaaatgcacagctttatgtaccctgtccaccatcttgtgcctcttctccatttgcctcttccttcctatttcccttccgctaaggaaaaaaattggtgtcacatttgtaaaagtaattttaatagttaatcatctctgagagtaacctgtattttaattgttgaaacttaaccaaaataagatactgtctcagctagggcttgtcatttgtgtatttagtgttaagataggaatgctagtgtctctttaattaattggaaatagatggaggctaaaaatgaaggtttttctttgaaactgaattaacttgggaatatttgttgttaaaaacttctttttgcccaaaataactcattttgtattatctgaaaatatataatttctggtcatgtgtatgttaaaatagaaaattttgaggaaaaatggaaatagggtggaaaagtactcggtaaacagtagtaaccaaatattttcactccagatttgtgttttctctggcacagagtagatcttttgggaaatatatatgaaagtggattaagtttgactacccttatgttagccacatctggatgagaacagttacaaagagtttggtctctaagttgatttgtacccagtgggtcaacttctgcaaaattccgtaatggtgtattagtattagaatagtgaatacattgcgaaagttatacatgtatacttattatcttgctcagtattttaatctcacttgtttctagaatttttctgtaaagccctgctactggg

SEQ ID NO: 183958 - DNA, 1143 bp, Homo Sapiens
gactgcgccaggcagagttctgcgggtaggcaggggccttgccacaaagccaggcctgccaactcgcgtctgccgcatgcttgcctgtcaggccaggggctggcgtcccactagcctcgctgcacatctgctgtaggtgggccagctggtgctggttccaggtgactggcttgaggtcgctagggtagccagtggggacgcgagagatgcctgtgggcaggttgacaggacctgcagcaggcaacgcggcggtggccgcgtgggtgtgctccatgggattgaccacacatgaaggcattggtgtggggacgctgtgggtcgacacccgggtgcttgcattgatgagcagactgcgactaatggggctggggttggcgatctggccctcacacactgaggtagtgctgatgcctgccctcgtctggcaaaactggttgatctggtgcacgatgctactcaggtccggaggctggctgtgctgcagagtggccgccattgaaagggggatagttgaggtagacacggtcacattcgggggggcatctgagtctggcatcttccggcctccatgcagcaagggattgtgggggtgctggagaccctggtgagccagggcctgagggtggaccaagccctgggtttgggccatgggctgagggtggcccaggccctgaggctgctggaggctctgagggtgggacagtgcctggggtggcgggataccctgagggtgctgcagcgtctggggaggggcatgggccagggtctgtgcatgctgcagggcctgctggcgggccagagcctgggcctgggggtgggctaaagtgctgggtgccacagtagcatagggtgccactggggggttcatgatggcctcagggagcaaccgggctcgggtgcctcaaagtccttgagtatgcttttggctggcactttgacaatggcaagcaggcctgccttggtggcagcctgtgtcgggtaggggctgtagcgctgggctgatgtgtcgaggccgttcacagtacgacgaacgtgtttccgctggggaaccttcacactgttggggaagatttttatagtcagtgggttgtttgcgaccttcttagcatacgcatccaattcggggtggggtaggatagccaa

SEQ ID NO: 183959 - DNA, 1877 bp, Homo Sapiens
actttgtacaaaaaagttggcttttcagaccctagacataaatctcttccctccagtgtatgctctgcctttttaaccactgacatgtaaggaggactactgtctagcatcagcttatggggtcagctggctgtggggatagagtcctgaggaatgtggtcacagcaagaaggcggggagcagcagagccttgcctttgaatgaggcagcttgtgaggcaagcattctggagagaggtgctttgaaagtaaggtgcggcctttcacctcttccttgattactcacacatctttgcgttctcccctgccgtccttcaactgtatcttacttttcttaccagaaaggaatggagtctgtttagagacaacttggacaacctgtgagtgcatctcttctttcctttagtcttcacagctaactctggagagcttcaaaactagaaggatctactccgcatgggtgcatgcagaggctcctggatctgggaagcccgccccctcacaaatgctgagccgttcttgctctgaaactgcgtgagtcaaggcaaatgcaaaaagccaggttttggggatgtgtcttactgtgcttcaacttcccaaggaattgaaagtcaacctaactgtaacaacagggtgagaaatgaccaaactgcccgtgactttttctgaatggacttcataaccggaagacttaaccggtggcctcatcaccagagcatcgccaggatttctaatgcactcagtttccctacatagcagggattcttagctaggtgtccccatgaaccccgtaaagttctacacaaagtcttgcatacaggagcctttacaagatgattatacagggttgcagattgggtgactgaccagacttgttggggtcctgggatgagttgccccgggctgcaaattaagagtacagctaagtgcgggggtggcggtggagggaacgaaaattgaacctgtctgcctgtgctgtgtcgtgtggctttatcagcccgaggaagggcaggtgtattctaatttgcacaaaggtgctgggtagactagtggcagctctcatgtgctgcacataagtggaatcagtatgaatagaagaacttgctgtataaaggaatttcatggcaacaatgctggtaagggcaattagcctcgcttaagttgccttttttacacaccaaaactttttacatgaagggctggtttcacatgaatactatactgaaatctgtgctctcaagatctagcagtgaccagggctgcccggcgggggctctcctggcaagtcaggaaggtttctgttgctaatataacatagaaacacattagtgcactgggcctctctgaggtcagcatatttgtactcttggaatatttgtttttttcttcagtaacaacagaaaccccagctgggagtttaacaaataactgactaccactcactcatgcatttttatttccaattaaagcaaagcactgtgctgtgctcagataataatagtttgtaagtaaaagtttttagttttcagtgttcaggttatagaatataactgaccataaaaattacctgcaggtattttctttttatgaacttgtttttaaattaccaagtaattactggtgtcattttgttttatgacagacacacgtatctaacaaacaaacaaacagtgaccttctccatgggtcaaggacttccttacaatttctcctgagttaacttttgtgaaaataatacctaaggttttctgggcttattgaggaaatttcctaataaacaaacaaaaaaacagagagaagatcattaaccactgtatacttttgtgtatataataggtcagtgtaaaaaatatgatttgaggtgtggcatgcaagtaa

SEQ ID NO: 183960 - DNA, 1701 bp, Homo Sapiens
ttggatgtctttgtattcccaggaggatacgaagcgttttcggcttcctgcccggagctgtgcagcaaacagtcgacccccatggggctcagccttcccctgagtactagcgtccctgacagcgcggaatctgggtgcagttcctgcagtaccccactctacgatcaggttagtaggtgtccctgccacagggaagaagtaagaactggcaaaggcatggaagagtagtgccagggagaatatagaaagtgacctgcagcattatttataacggaggggacacagggatatgattattccacagttaagtggtctgacggagccgagtctccaattgtaggctctacggaaatgaacttgctggtcctgcccaggcaaatgggcttagttccctatttatttatcctccagcaacagaactgagttcactcggtatctgaaattgacttttccagcagaaagtttttgtgggtatgggcactggccttggctttgagcaagcttgatgaatgttggatatttctggatttcagggtggcccggtggaaatcctgccctttctgtacctgggcagtgcgtatcacgcttcccgcaaggacatgctggatgccttgggcataactgccttgatcaacgtctcagccaattgtcccaaccattttgagggtcactaccagtacaagagcatccctgtggaggacaaccacaaggcagacatcagctcctggttcaacgaggccattgacttcatagtaaatggaatggatgcctggggcttttctgcctttctcttctcattttagccactaagcccaacctctgtggcaagagcttgaagttttctgagccttcttccacacattcagtatcagtctggtgtgggcaacattcctgtaaaatatgaatttgattcgatgtcccactttacagatttgcaaagtggggctcacaaagttgaattgactggtctgagatctatctgctaagtggaaatccccagtctgagtttaaatcctgtgccatcctttgcacagtgcccacgttgcctccatgaacagtatccatgtgatggcatgtggtgatgttgaccatttctagacaagacacacatgacctttctcagatacactgtacctgggcttggggtggttctcctgaactctcaagtaaccagccgctcctttggttttccagactccatcaagaatgctggaggaagggtgtttgtccactgccaggcaggcatttcccggtcagccaccatctgccttgcttaccttatgaggactaatcgagtcaagctggacgaggcctttgagtttgtgaagcagaggcgaagcatcatctctcccaacttcagcttcatgggccagctgctgcagtttgagtcccaggtgctggctccgcactgttcggcagaggctgggagccccgccatggctgtgctcgaccgaggcacctccaccaccaccgtgttcaacttccccgtctccatccctgtccactccacgaacagtgcgctgagctaccttcagagccccattacgacctctcccagctgctgaaaggccacgggaggtgaggctcttcacatcccattgggactccatgctccttgagaggagaaatgcaataactctgggaggggctcgagagggctggtccttatttatttaacttcacccgagttcctctgggttt

SEQ ID NO: 183961 - DNA, 862 bp, Homo Sapiens
ccccattagtgacaccgggacacggcaccttcatacaactccccccacccaccaagggctggaagtttacatcggaaaggcccaggccaagtctttgtttccagagccaaacaaagccaatgacaagttccagagataaatgtactccagcgcccacgcgctgcaggtggggcgatcccccgggagccgagagccaggggtaccgggcaaaacctcagggggtgtgcggcccgccccgagcttccccgagggcgtacctttgaggaagaagacttgcgcggcgcgcgcctcgcggcagagcgcgccggccgccagggccagggtgccgtcgcgcttggcgccgtccagggcggcgctgcgctcgtccagcaacaccacggcgtggtaggcgccggccagcaggcggccgcggagctcggcgttgggcacgatgtgctccaggcccatggcgcccttggcccggcgccgcacgatggtgctgaagcgcacgttgacagagccggcgatgtggccggcgttgaaagcgaagaaggagcggcagtccagcagcaggcattgcgccgctcgctcccccagcagcgcccgcaggcctccagcgtccagggtgcccacttccatgaccatggccggcctcagcgcccccagcgtgatcggccctgcggtgctctttgtctgttctcggggccaagggcagggcggcgcttttcgaggaaaagctagacccccgggtctctctgcgccgaaccaaaagccgcttttggactgagagaggagcgtcacgcggggctccgggctcctcggcttcttcgcggttcccccgactgcccctccgacccgcgtcgccacacagcccaaatgccaa

SEQ ID NO: 183962 - DNA, 1267 bp, Homo Sapiens
tgatgagcaatgcttccttaaaaatgccaactttgtacaaaaaagttggcatttgggctgtgtgtgcgacgcgggtcggaggggcagtcgggggaaccgcgaagaagccgaggagcccggagccccgcgtgacgctcctctctcagtccaaaagcggcttttggttcggcgcagagagacccgggggtctagcttttcctcgaaaagcgccgccctgcccttggccccgagaacagacaaagagcaccgcagggccgatcacgctgggggcgctgaggccggccatggtcatggaagtgggcaccctggacgctggaggcctgcgggcgctgctgggggagcgagcggcgcaatgcctgctgctggactgccgctccttcttcgctttcaacgccggccacatcgccggctctgtcaacgtgcgcttcagcaccatcgtgcggcgccgggccaagggcgccatgggcctggagcacatcgtgcccaacgccgagctccgcggccgcctgctggccggcgcctaccacgccgtggtgttgctggacgagcgcagcgccgccctggacggcgccaagcgcgacggcaccctggccctggcggccggcgcgctctgccgcgaggcgcgcgccgcgcaagtcttcttcctcaaaggaggatacgaagcgttttcggcttcctgcccggagctgtgcagcaaacagtcgacccccatggggctcagccttcccctgagtactagcgtccctgacagcgcggaatctgggtgcagttcctgcagtaccccactctacgatcagggtggcccggtggaaatcctgccctttctgtacctgggcagtgcgtatcacgcttcccgcaaggacatgctggatgccttgggcataactgccttgatcaacgtctcagccaattgtcccaaccattttgagggtcactaccagtacaagagcatccctgtggaggacaaccacaaggcagacatcagctcctggttcaacgaggccattgacttcatagactccatcaagaatgctggaggaagggtgtttgtccactgccaggcaggcatttcccggtcagccaccatctgccttgcttaccttatgaggactaatcaagtcaagctggacgaggcctttgagtttgtgaagcagaggcgaagcatcatctctccccaacttcagcttcatgggccagctgctgcagtttgagtctcaagtgctgggctccgcactgttccggcagaggctggggagccccgccatgg

SEQ ID NO: 183963 - DNA, 1263 bp, Homo Sapiens
  misc_feature (1126)..(1134): n is a, c, g, or t
tttgtacaaaaaagttgggtggaaatccccccctttctgtacctgggcagtgcgtatcacgcttcccgcaaggacatgctggatgccttgggcataactgccttgatcaacgtctcagccaattgtcccaaccattttgagggtcactaccagtacaagagcatccctgtggaggacaaccacaaggcagacatcagctcctggttcaacgaggccattgacttcatagactccatcaagaatgctggaggaagggtgtttgtccactgccaggcaggcatttcccggtcagccaccatctgccttgcttaccttatgaggactaatcgagtcaagctggacgaggcctttgagtttgtgaagcagaggcgaagcatcatctctcccaacttcagcttcatgggccagctgctgcagtttgagtcccaggtgctggctccgcactgttcggcagaggctgggagccccgccatggctgtgctcgaccgaggcacctccaccaccaccgtgttcaacttccccgtctccatccctgtccactccacgaacagtgcgctgagctaccttcagagccccattacgacctctcccagctgctgaaaggccacgggaggtgaggctcttcacatcccattgggactccatgctccttgagaggagaaatgcaataactctgggaggggctcgagagggctggtccttatttatttaacttcacccgagttcctctgggtttctaagcagttatggtgatgacttagcgtcaagacatttgctgaactcagcacattcgggaccaatatatagtgggtacatcaagtccatctgacaaaatggggcagaagagaaaggactcagtgtgtgatccggtttctttttgctcgcccctgttttttgtagaatctcttcatgcttgacatacctaccagtattattcccgacgacacatatacatatgagaatataccttatttatttttgtgtaggtgtctgccttcacaaatgtcattgtctactcctagaagaaccaaatacctcaatttttgtttttgagtactgtactatcctgtaaatatatcttaagcaggtttgttttcagcactgatggaaaataccagtgttgggnnnnnnnnnagttgccaacagttgtatgtttgctgattatttatgacctgaaataatatatttcttcttctaagaagacattttgttacataaggatgacttttttatacaatggaataaattatggcatttctattg

SEQ ID NO: 183964 - DNA, 1161 bp, Homo Sapiens
ttggcactacttttcccttcgtctcaattatgtcttggaagaaggctttgcggatccctggaggccttcgggtagcaactgtgaccttgatgctggcgatgctgagcaccccggtggctgagggcagagactctcccgaggatttcgtgtaccagtttaagggcatgtgctacttcaccaacgggacggagcgcgtgcgtcttgtgaccagatacatctataaccgagaggagtacgcacgcttcgacagcgacgtgggggtgtatcgggcggtgacgccgctggggccgcctgccgccgagtactggaacagccagaaggaagtcctggagaggacccgggcggagttggacacggtgtgcagacacaactaccagttggagctccgcacgaccttgcagcggcgagtggagcccacagtgaccatctccccatccaggacagaggccctcaaccaccacaacctgctggtctgctcagtgacagatttctatccagcccagatcaaagtccggtggtttcggaatgaccaggaggagacaactggcgttgtgtccaccccccttattaggaacggtgactggaccttccagatcctggtgatgctggaaatgactccccagcgtggagacgtctacacctgccacgtggagcaccccagcctccagaaccccatcatcgtggagtggcgggctcagtctgaatctgcccagagcaagatgctgagtggcattggaggcttcgtgctggggctgatcttcctcgggctgggccttattatccatcacaggagtcagaaagggctcctgcactgactcctgagactattttaactgggattggttatcacttttctgtaacgcctgcttgtccctgcccagaattcccaactgcctgtgtcagcctgtccccctgagatcagagtcctacagtggctgtcacgcagccaccaggtcatctcctttcatccccaccccaaggcgctggctgtgactctgcttcctgcactgacccagagcctctgcctgtgcatggccagctgcgtctactcaggcccaaggggtttctgtttctatttctctcctcagactgctcaagagaagcacatgaaaaccattacctgactttagagcttttttacataatttaacatgatcctga

SEQ ID NO: 183965 - DNA, 1334 bp, Homo Sapiens
ctttgtacaaaaaagttggcattatctgtgccgtcctgactagaaggttgtctgggcccccaaattccaagtcccagtatagccagggctcccattttgtttttccagagttcgtggaggtggactgcagagcccagagcccttcatctctctgagggtcaaggataccaggggtcccaagtcacagatagacattccagtttgtattcttaggaatcattcttaggcagtgcggcagaagcaggcctctgtgaagtgtctgccgggtagaaataggccttgaagtcctggggctctccaggcagtggggttatgtgtcgactgaagggtgatgtgcagaagagcttggagagtggatcagagagactaggacagttactgcagagctcctaagtcaccactcaaccagtggctgtttcacaaggatttgagggcacttgcctgtcttgtgaggtctgtgccacaaggtgagtctgaactgactgctccagctaagtgatcaggcacgttgagagtatacggtgtcctcagcacatacacctgtgggaaaacggaccgctcttggctcctgactcccagggtacagcgcccagtaactcatccttcattcagaggtttgctggccttcccggtttcccaaggagcaagacctctgtccgccctttggcccggcctctgctctgactcctttttttacataagaaccaatctgtgtttcacattgggctaagtggattccttatccctttgttatatatattttttgcaacttggatttccagtttgtttacagagtagtcttaggtagtagcaaaagagccaaagaagagatttgtattgctgagctcaagccaagcagaggccggcagtggaggctgagcagggactctccaggcttctctgcccataaacacccgggtcccaggccctccttcctttccctttggtgctccctcctccccacgtaccattgcgcgtgcagctggagcagaataccctcatttttaggaatctagtgatgcctcttgcctcagggaaacgtttctttgatggggagtttgagatttcttttccttgtttatgctttatttgtggtaatgaaatagcgaatgactgaacagccatggcaaggcagacctacaggcgaggccgcagcagagggtggggcagagcagcctcggggtctgggggctgcaggggtttccctggcgcagcgaaagtctctgagcacttaccgggcgtgaccgtttcttaggtgtgagaggggctgtggcttttgtgcagcgactatgttggtgttaggggtgggtgtggagattgttaatcttgtataa

SEQ ID NO: 183966 - DNA, 1665 bp, Homo Sapiens
ttgggccacttgggtctgggtggaatcagaacgtgcaggtctcccaggatgtacactcactgcgccctttctgctgcttggtgttcttctggaggagcgtgagttctcagcggagcgcttctcggcacttctgatgtgcctcccatggagggagccgggcccttgctgctcaggaggtgcagactgccccgtgctctgggccttgcagctctgtcgctagacggttgttagaggggcagctctaggctggggcttgcgctgggccgtggtgggaggcacagtgtttacaggctctggtggcagagcagttggcacacctgtgggtgaatctgcctgatcccctggcatttggtcagagtacctcagagcaccccactgctcaggggctccttctggctgcagtaagctccctggatggtcacagtgccgccccatccccaggctgtgtgctcaaagcggacaaaactcaggccagagccacagctgggagacctgcactgtccctgcgaaatactaagaacacctagggtgtgctcactgtgggggccagtttctcctcggaacatgacaatgaagctcttttagagaaaagacctttgtagattcaacaattatgataggatttttacagacacctattttgggctcagttttcatcattaccattaaatgcattggatagaaggggactgttcttcacacatcatattataaagaagacataattccagtgcctttatggtggagcagaattcgacaacacatgtccattcagccctctgaatggatctgagacgaagacctttttaaagatatgtctgtattgaagagaaagccagttttgagttttttacacttgcacatcattatctgtgccgtcctgactagaaggttgtctgggcccccaaattccaagtcccagtatagccagggctcccattttgtttttccagagttcgtggaggtggactgcagagcccagagcccttcatctctctgagggtcaaggataccaggggtcccaagtcacagatagacattccagtttgtattcttaggaatcattcttaggcagtgcggcagaagcaggcctctgtgaagtgtctgccgggtagaaataggccttgaagtcctggggctctccaggcagtggggttatgtgtcgactgaagggtgatgtgcagaagagcttggagagtggatcagagagactaggacagttactgcagagctcctaagtcaccactcaaccagtggctgtttcacaaggatttgagggcacttgcctgtcttgtgaggtctgtgccacaaggtgagtctgaactgactgctccagctaagtgatcaggcacgttgagagtatacggtgtcctcagcacatacacctgtgggaaaacggaccgctcttggctcctgactcccagggtacagcgcccagtaactcatccttcattcagaggtttgctggccttcccggtttcccaaggagcaagacctctgtccgccctttggcccggcctctgctctgactcctttttttacataagaaccaatctgtgtttcacattgggctaagtggattccttatccctttgttatatatattttttgcaacttggatttccagtttgtttacagagtagtcttagtagtagcaaaagagcc

SEQ ID NO: 183967 - DNA, 2297 bp, Homo Sapiens
ttgggttttatatatttccttctttgtttatacatttactttatggaattaagcaaaatgtttgaaaatatgtcattgggatagatgtgatgtaaaaactttaattctaattttgagcaattttcatttacttttatccattttccatttgattttatccattttgttctttaaaaagcaaatcattggaattaaaatctgtaaaatgttttatgtagatagaaatgaagaaatatttcaagtctaatttaaagatttccatttgtttaatattataaatgaaacacaacatggtaagattataggctggtcttaaaaattcacatttgctatttattgttactagtaggtagtttttcttctattttttcttcacaggaaaagacgatttctctctgattcagaatcctgaaaatgtgatctcccttaaaaagaggacagtgctgctgtgagtttgacgaagtggacatcacctgcagtcagtccagagctgcccagtcttgaatataatcatggccaaaccttatgaatttaactggcagaaggaagttccctcctttttgcaagaaggaacagtttttgacagatacgaggaggaatcctttgtgtttgaacccaactgcctcttcaaagtggatgagtttggcttctttctgacatggagaagtgaaggcaaggaaggacaggtgctagaatgctccctcatcaacagtattcggtcgggagccataccaaaggatcccaaaatcttggctgctcttgaagctgttggaaaatcagaaaatgatctggaagggcggatagtttgtgtctgcagtggcacagatctagtgaacattagttttacctacatggtggctgaaaatccagaagtaactaagcaatgggtagaaggcctgagatcaatcatacacaacttcagggccaacaacgtcagtccaatgacatgcctcaagaaacactggatgaaattggcatttatgaccaacacaaatggtaaaattccagttaggagtattactagaacatttgcatcgggaaaaacagaaaaggtgatctttcaagcactcaaggagttaggtcttcccagtggaaagcatcaacgagatcctcgattgaatgaaattttatttccattttatgatgccaaaagggcaatgcagatcattgagatgtatgaacctgatgaagatttgaagaaaaaaggccttatatcaagtgatgggttttgcagatatctgatgtcagatgaaaacgccccagtcttcctagatcgtttagaactttaccaagaaatggaccatcctctggctcactacttcatcagttcttcccataacacttatctcactggcagacagttcggcgggaagtcttcggtagaaatgtacagacaggttctcctggctggttgcagatgtgttgaacttgactgctgggatggaaaaggtgaagaccaagaaccaataataactcatggaaaagcaatgtgtacagatatcctttttaaggatgtaattcaagccatcaaggaaactgcatttgtcacatcagaatatcctgtaattctctcctttgaaaatcactgcagcaaatatcaacagtacaagatgtccaaatattgcgaagatctatttggggatctcctgttgaaacaagcacttgaatcacatccaaacagctggaagctttgagaagcatgatggaagctggagaatctgcctccccagcaaacatcttagaggacgataatgaagaggagatcgaaagtgctgaccaagaggaggaagctcaccccgaattcaaatttggaaatgaactttctgctgatgacttgggtcacaaggaagctgttgcaaatagcgtcaagaagggcctggtcactgtagaagatgagcaggcgtggatggcatcttataaatatgtaggtgctaccactaatatccatccatatttgtccacaatgatcaactacgcccagcctgtaaagtttcaaggtttccatgtggcagaagaacgcaatattcattataacatgtcttcttttaatgaatcagtcggtcttggctacttgaagacacatgcaattgaatttgtcaattataacaaacggcaaatgagtcgcatttaccccaagggaggccgagtcgattccagtaattacatgcctcagattttctggaacgctggctgccagatggtttcactgaactatcaaaccccagatttagcgatgcaattgaatcaggaaatttcgagtataatgggatcgtgcgggtacttctcaaaccagattt

SEQ ID NO: 183968 - DNA, 1828 bp, Homo Sapiens
ttggagacttcgtacggttagcgaaattgaggtttcttggtattgcgcgtttctcttccttgctgactctccgaatggccatggactcgtcgcttcaggcccgcctgtttcccggtctcgctatcaagatccaacgcagtaatggtttaattcacagtgccaatgtaaggactgtgaacttggagaaatcctgtgtttcagtggaatgggcagaaggaggtgccacaaagggcaaagagattgattttgatgatgtggctgcaataaacccagaactcttacagcttcttcccttacatccgaaggacaatctgcccttgcaggaaaatgtaacaatccagaaacaaaaacggagatccgtcaactccaaaattcctgctccaaaagaaagtcttcgaagccgctccactcgcatgtccactgtctcagagcttcgcatcacggctcaggagaatgacatggaggtggagctgcctgcagctgcaaactcccgcaagcagttttcagttcctcctgcccccactaggccttcctgccctgcagtggctgaaataccattgaggatggtcagcgaggagatggaagagcaagtccattccatccgaggcagctcttctgcaaaccctgtgaactcagttcggaggaaatcatgtcttgtgaaggaagtggaaaaaatgaagaacaagcgagaagagaagaaggcccagaactctgaaatgagaatgaagagagctcaggagtatgacagtagttttccaaactgggaatttgcccgaatgattaaagaatttcgggctactttggaatgtcatccacttactatgactgatcctatcgaagagcacagaatatgtgtctgtgttaggaaacgcccactgaataagcaagaattggccaagaaagaaattgatgtgatttccattcctagcaagtggctcctcttggtacatgaacccaagttgaaagtggacttaacaaagtatctggagaaccaagcattctgctttgactttgcatttgatgaaacagcttcgaatgaagttgtctacaggttcacagcaaggccactggtacagacaatctttgaaggtggaaaagcaacttgttttgcatatggccagacaggaagtggcaagacacatactatgggcggagacctctctgggaaagcccagaatgcatccaaagggatctatgccatggcctcccgggacgtcttcctcctgaagaatcaaccctgctaccggaagttgggcctggaagtctatgtgacattcttcgagatctacaatgggaagctgtttgacctgctcaacaagaaggccaagctgcgcgtgctggaggacggcaagcaacaggtgcaagtggtggggctgcaggagcatctggttaactctgctgatgatgtcatcaagatgatcgacatgggcagcgcctgcagaacctctgggcagacatttgccaactccaattcctcccgctcccacgcgtgcttccaaattattcttcgagctaaagggagaatgcatggcaagttctctttggtagatctggcagggaatgagcgaggcgcggacacttccagtgctgaccggcagacccgcatggagggcgcagaaatcaacaagagtctcttagccctgaaggagtgcatcaaggccctgggacagaacaaaggctcacaccccgttccgtgagagcaagctgacacaggtgctgagggactccttcatggggagaactctaggacttgcatgattgccacgatcttaccaggcataagctcctgtgaatatactttaaaacaccctgagatatgcagacaggg

SEQ ID NO: 183969 - DNA, 1491 bp, Homo Sapiens
ttggattctgtttcctgtcataacagagatgtcattgctgggagaggtatccactcaaaggtgaagtctgcaaagctgcttgaggttctgaatgctatggaggaggaagagtccaacaacaacagggaagagattttcattgcacctcccgacaatgctgcgggggaattcactgatgaggactcaggggatgaagacagccagcgaggtgctcacctacctggcagtgtgctgcatgcttcagtcctgtgtgaggactctggcaccggggaggataatgacgacctggagctgcagccagccaagaagaggcagaaagcagttgtgaaacctcagcgcatttggaccaaaagagatattcgtccagactttggcagttggactgcatcagatcctcatattgaggatctgaaaagccaagagctgagtcccgtgggcctttttgagttgttttttgatgaaggaacaattaatttcattgttaatgaaaccaatcgttatgcttggcagaaaaatgtcaatttgagtcttacggctcaggaattgaagtgtgttttgggcattttgattttaagtgggtacatctcttatccaaggagaaggatgttctgggaaacctctcccgattcacatcatcatcttgtggctgatgcaattagaagggacagatttgaactaatcttctcatacttacattttgcagataacaacgaacttgatgcaagtgataggtttgccaaggtcagacctctcatcatccggatgaactgcaatttccagaagcatgcacccttggaagagttctacagctttggcgagtctatgtgtgagtactttgggcaccgggggtccaagcagctgcacagggggaagcctgtgcgacttggctacaagatttggtgtgggacaaccagcagaggctacttggtgtggtttgagccctcacagggcacactgtttaccaagccagacaggagcttggatctaggaggcagtatggtaataaaatttgtggatgcgcttcaggagcgtggttttctgccatatcacatattttttgacaaggttttcacaagtgttaaactgatgtccattttgaggaaaaagggggtgaaagccacaggaactgttcgtgagtacaggactgagcgatgtcccctaaaagaccccaaagaactgaaaaaaaatgaagaggggttcatttgattacaaagtcgatgagagtgaggagatcatcgtgtgccgctggcacgatagcagcgtggtcaacatttgctccaatgctgtgggcatagagccagtgaggctgaccagtcgtcactctggagcagctaaaacgcggactcaggtccaccagccatcactggtgaagctgtatcacgagaagtgggtggcgttggtaggatggatcagaatattgccaagtacaacgtgaagatccgaggcatgaagtggtactcaagctttattggctatgtcattgatgctgcc

SEQ ID NO: 183970 - DNA, 2246 bp, Homo Sapiens
  misc_feature (385)..(399): n is a, c, g, or t
  misc_feature (799)..(808): n is a, c, g, or t
  misc_feature (1844)..(1858): n is a, c, g, or t
ttggagtcaacctatttggatacttggcaaaagattcttgctgtcagcatataaaatgtgcttgtcatttgtatcaattgacctttccccaaatcatgcagtattgagttatgacttgttaaatctattcccatgccagaatcttatcaatacataagaaatttaggaagattaggtgccaaaatacccagcacaatacttgtatatttttagtaccatacagaagtaaaatcccaggaactatgaacactagaccttatgtggtttattccttcaatcatttcaaacattgaaagtagggcctacatggttatttgcctgctcactttatgtttacatctcccacattcataccaatatacgtcaggtttgcttaaccattgannnnnnnnnnnnnnnaccaagtcttacagtgattattttacgtgtttccatgtatctcactttgtgctgtattaaaaaaacctccattttgaaaatctacgttgtacagaagcacatgtctttaatgtcttcagacaaaaaagccttacattaatttaatgtttgcactctgaggtgcaacttaacagggagggcctgagaaaagaatgggagggggctattaattatttttagcaaaatgttgcctttgtcttgtgcaaacatgtagaatatgctctttaatttagtaaaatatttttttaaaaggtagagatgctttgttattgtaatcataaacttcctgaaattcttgtaatttttttcccatacttatcagaagtgtgtttaccaacttatttttgtttgaaagtgtgannnnnnnnnnccttcccaacctctcttgcaaaaaaagaaatgggtttctgctaatgaattgagcagacatctaatattttatatgccttttgagctgtgtaacttaatatttggatacttgacaatttgttttattatgtaattgataaaatggtgatgtgtattaatgttagttcaaccatatatttatactgtctggggatgtgtggttatagttctgtgggagaaataattttgtcagtgttcaccagcttgtaaaaacttagtgcgagagctgaaacatctaaataaataatgacatgcatttatcatcattgagattggtttgcttaaaattaacttattttgtagaagacaaaatgaattgcacttcacttaatgtgtgtcctcatctttttacaaataaatgaaggattataaatgatgtcagcattttagtaaacttttagacaaaatttgttagggtcattcatgaaaactttaatactaaaagcactttccattatatactttttaaaggtctagataattttgaaccaatttattattgtgtactgaggagaaataatgtatagtagaggacagccttggtttgtaaagctcagttccactagttcatggttttgtgcaacttctgagcctcagttttctcctttgcaaattaataattacatacctttatagattttgaaattaatttaaatattagtatttggtacatgaaggcttaatgttaagtttcctttaatgatccacaataatccctttgatcacgttaatctaaatctagatgtctttgtctaattttttttgaatagcagttataaatgtaaaggactcaaagtttaagtaaaaagtgatactccaccttgtgtttcaaagaatttagttccacctcttcataccagtttaacacttaatatatttcattggattttagacagggcaaaaggaagaacaggggcctctggaggcccttggttatttaaatcttggattatttgtgatagtaatcacaaatttttggctaatttttaacctgaggnnnnnnnnnnnnnnnaaaggaaatgcagcctagtcttgagaacataattttatataatcaattactaaatgttaaactattaccacacagcccataaaacagcatttgcgtttattgagagagaggatgtgccatcatgattaatgaaaactatcttttgagtttgaaaagaaattaatttgcagtgtttggattgtatatatggtgctaaaaataaattaatttactttataaaccttatctgtacattatacgatgtgatgaaatttgctttttatccaaatattttgtatcttgtaatatggctaattataggaatgcctataatacatcttagattccttatatctaataagagttcaaagagttatgagttgaagtcttgaatgcagaaactatctga

SEQ ID NO: 183971 - DNA, 2149 bp, Homo Sapiens
  misc_feature (255)..(270): n is a, c, g, or t
  misc_feature (670)..(679): n is a, c, g, or t
  misc_feature (1715)..(1729): n is a, c, g, or t
ttgggccagaatcccatcaatacataagaaatttaggaagattaggtgccaaaatacccagcacaatacttgtatatttttagtaccatacagaagtaaaatcccaggaactatgaacactagaccttatgtggtttattccttcaatcatttcaaacattgaaagtagggcctacatggttatttgcctgctcactttatgtttacatctcccacattcataccaatatacgtcaggtttgcttaaccattgannnnnnnnnnnnnnnnaccaagtcttacagtgattattttacgtgtttccatgtatctcactttgtgctgtattaaaaaaacctccattttgaaaatctacgttgtacagaagcacatgtctttaatgtcttcaaacaaaaaagccttacattaatttaatgtttgcactctgaggtgcaacttaacagggagggcctgagaaaagaatgggagggggctattaattatttttagcaaaatgttgcctttgtcttgtgcaaacatgtagaatatgctctttaatttagtaaaatatttttttaaaaggtagagatgctttgttattgtaatcataaacttcctgaaattcttgtaatttttttcccatacttatcagaagtgtgtttaccaacttatttttgtttgaaagtgtgannnnnnnnnnccttcccaacctctcttgcaaaaaaagaaatgggtttctgctaatgaattgagcagacatctaatattttatatgccttttgagctgtgtaacttaatatttggatacttgacaatttgttttattatgtaattgataaaatggtgatgtgtattaatgttagttcaaccatatatttatactgtctggggatgtgtggttatagttctgtgggagaaataattttgtcagtgttcaccagcttgtaaaaacttagtgcgagagctgaaacatctaaataaataatgacatgcatttatcatcattgagattggtttgcttaaaattaacttattttgtagaagacaaaatgaattgcacttcacttaatgtgtgtcctcatctttttacaaataaatgaaggattataaatgatgtcagcattttagtaaacttttagacaaaatttgttagggtcattcatgaaaactttaatactaaaagcactttccattatatactttttaaaggtctagataattttgaaccaatttattattgtgtactgaggagaaataatgtatagtagaggacagccttggtttgtaaagctcagttccactagttcatggttttgtgcaacttctgagcctcagttttctcctttgcaaattaataattacatacctttatagattttgaaattaatttaaatattagtatttggtacatgaaggcttaatgttaagtttcctttaatgatccacaataatccctttgatcacgttaatctaaatctagatgtctttgtctaattttttttgaatagcagttataaatgtaaaggactcaaagtttaagtaaaaagtgatactccaccttgtgtttcaaagaatttagttccacctcttcataccagtttaacacttaatatatttcattggattttagacagggcaaaaggaagaacaggggcctctggaggcccttggttatttaaatcttggattatttgtgatagtaatcacaaatttttggctaatttttaacctgaggnnnnnnnnnnnnnnnaaaggaaatgcagcctagtcttgaacataattttatataatcagttactaaatgttaaactattaccacacagcccataaaacagcatttgcgtttattgagagagaggatgtgccatcatgattaatgaaaactatcttttgagtttgaaaagaaattaatttgcagtgtttggattgtatatatggtgctaaaaataaattaatttactttataaaccttatctgtacattatacgatgtgatgaaatttgctttttatccaaatattttgtatcttgtaaatatgggctaattataggaatgcctataatacatcttagattccttatatctaataagagttcaaagagttatgagttgaagtcttgaatgcaggaaactatctgatagtgttctaaaatttggttacttgggtttg

SEQ ID NO: 183972 - DNA, 1970 bp, Homo Sapiens
  misc_feature (1666)..(1680): n is a, c, g, or t
ttggcgcctgcatcgccgccaccgccgctccgccacgaccaccgccgcctcctgccctgcagccaccgccaccgcctgtgtcgccgccgcctcgggaccggctgtatgattagggcacaatcttcaatgagtaaacatattcctcaattctgtggtgttcttggtcacacatttatggagtttctgaagggcagtggagattactgccaggcacagcacgacctctatgcagacaagtgaactgtagaaactgattactgctccaccaagaagcccccataagagtggttatcctggacacagaagtgttgaattgaaatccacagagcattttacaagagttctgacctggatggggtaaacctcagtgcacttcttttctgttggcctcagtattactggattgaagaattgctgcttcttgttaggaggttcatttcacttatcattacttacaacttcatactcaaagcactgagaatttcaagtggagtatattgaagtagacttcagtttctttgcatcatttctgtattcaatttttttaattatttcataaccctattgagtgttttttaactaaattaacatggctcgaatgaaccgcccagctcctgtggaagtcacatacaagaacatgagatttcttattacacacaatccaaccaatgcgaccttaaacaaatttatagaggaacttaagaagtatggagttaccacaatagtaagagtatgtgaagcaacttatgacactactcttgtggagaaagaaggtatccatgttcttgattggccttttgatgatggtgcaccaccatccaaccagattgttgatgactggttaagtcttgtgaaaattaagtttcgtgaagaacctggttgttgtattgctgttcattgcgttgcaggccttgggagagctccagtacttgttgccctagcattaattgaaggtggaatgaaatacgaagatgcagtacaattcataagacaaaagcggcgtggagcttttaacagcaagcaacttctgtatttggagaagtatcgtcctaaaatgcggctgcgtttcaaagattccaacggtcatagaaacaactgttgcattcaataaaattggggtgcctaatgctactggaagtggaacttgagatagggcctaatttgttatacatattagccaacatgttggcttagtaagtctaatgaagcttccataggagtattgaaaggcagttttaccaggcctcaagctagacagatttggcaacctctgtatttgggttacagtcaacctatttggatacttggcaaaagattcttgctgtcagcatataaaatgtgcttgtcatttgtatcaattgacctttccccaaatcatgcagtattgagttatgacttgttaaatctattcccatgccagaatcttatcaatacataagaaatttaggaagattaggtgccaaaatacccagcacaatacttgtatatttttagtaccatacagaagtaaaatcccaggaactatgaacactagaccttatgtggtttattccttcaatcatttcaaacattgaaagtagggcctacatggttatttgcctgctcactttatgtttacatctcccacattcataccaatatacgtcaggtttgcttaaccattgannnnnnnnnnnnnnnaccaagtcttacagtgattattttacgtgtttccatgtatctcactttgtgctgtattaaaaaaacctccattttgaaaatctacgttgtacagaagcacatgtctttaatgtcttcagacaaaaaagccttacattaatttaatgtttgcactctgaggtgcaacttaacagggagggcctgagaaaagaatgggagggggctattaattatttttagcaaaatgttgcctttgtcttgtgcaaacatgtagaaatatgctctttaaatttagtaaatatttttttaaa

SEQ ID NO: 183973 - DNA, 2775 bp, Homo Sapiens
  misc_feature (348)..(362): n is a, c, g, or t
  misc_feature (1043)..(1057): n is a, c, g, or t
  misc_feature (1457)..(1466): n is a, c, g, or t
  misc_feature (2476)..(2517): n is a, c, g, or t
ttggcacatagaatattttgagtgctgtagaacatgcctttgtggcttttgtagtcatcttccctgctaccagaggcaacttctgacttcactataaattagttttgtcttttcgtggacttacgtgtaaatggatttgtgagtcgactgttgtaaccaatactcaaacgaagatataaagaaaattaactttttatgattttttccatttacactgatgtgcctgttcatattcctttctgcatcaggtcacagcctaattaatcaaaagataaattgccacaagagaggtgatggttgtctataagacactaaatattactgtagggggcttttgccttgtttcannnnnnnnnnnnnnncctcccaaaaagcggcgtggagcttttaacagcaagcaacttctgtatttggagaagtatcgtcctaaaatgcggctgcgtttcaaagattccaacggtcatagaaacaactgttgcattcaataaaattggggtgcctaatgctactggaagtggaacttgagatagggcctaatttgttatacatattagccaacatgttggcttagtaagtctaatgaagcttccataggagtattgaaaggcagttttaccaggcctcaagctagacagatttggcaacctctgtatttgggttacagtcaacctatttggatacttggcaaaagattcttgctgtcagcatataaaatgtgcttgtcatttgtatcaattgacctttccccaaatcatgcagtattgagttatgacttgttaaatctattcccatgccagaatcttatcaatacataagaaatttaggaagattaggtgccaaaatacccagcacaatacttgtatatttttagtaccatacagaagtaaaatcccaggaactatgaacactagaccttatgtggtttattccttcaatcatttcaaacattgaaagtagggcctacatggttatttgcctgctcactttatgtttacatctcccacattcataccaatatacgtcaggtttgcttaaccattgannnnnnnnnnnnnnnaccaagtcttacagtgattattttacgtgtttccatgtatctcactttgtgctgtattaaaaaaacctccattttgaaaatctacgttgtacagaagcacatgtctttaatgtcttcagacaaaaaagccttacattaatttaatgtttgcactctgaggtgcaacttaacagggagggcctgagaaaagaatgggagggggctattaattatttttagcaaaatgttgcctttgtcttgtgcaaacatgtagaatatgctctttaatttagtaaaatatttttttaaaaggtagagatgctttgttattgtaatcataaacttcctgaaattcttgtaatttttttcccatacttatcagaagtgtgtttaccaacttatttttgtttgaaagtgtgannnnnnnnnnccttcccaacctctcttgcaaaaaaagaaatgggtttctgctaatgaattgagcagacatctaatattttatatgccttttgagctgtgtaacttaatatttggatacttgacaatttgttttattatgtaattgataaaatggtgatgtgtattaatgttagttcaaccatatatttatactgtctggggatgtgtggttatagttctgtgggagaaataattttgtcagtgttcaccagcttgtaaaaacttagtgcgagagctgaaacatctaaataaataatgacatgcatttatcatcattgagattggtttgcttaaaattaacttattttgtagaagacaaaatgaattgcacttcacttaatgtgtgtcctcatctttttacaaataaatgaaggattataaatgatgtcagcattttagtaaacttttagacaaaatttgttagggtcattcatgaaaactttaatactaaaagcactttccattatatactttttaaaggtctagataattttgaaccaatttattattgtgtactgaggagaaataatgtatagtagaggacagccttggtttgtaaagctcagttccactagttcatggttttgtgcaacttctgagcctcagttttctcctttgcaaattaataattacatacctttatagattttgaaattaatttaaatattagtatttggtacatgaaggcttaatgttaagtttcctttaatgatccacaataatccctttgatcacgttaatctaaatctagatgtctttgtctaattttttttgaatagcagttataaatgtaaaggactcaaagtttaagtaaaaagtgatactccaccttgtgtttcaaagaatttagttccacctcttcataccagtttaacacttaatatatttcattggattttagacagggcaaaaggaagaacaggggcctctggaggcccttggttatttaaatcttggattatttgtgatagtaatcacaannnnnnnnnnnnnnnnnnnnnnnnnnnnnnnnnnnnnnnnnnaaaggaaatgcagcctagtcttgaacataattttatataatcagttactaaatgttaaactattaccacacagcccataaaacagcatttgcgtttattgagagagaggatgtgccatcatgattaatgaaaactatcttttgagtttgaaaagaaattaatttgcagtgtttggattgtatatatggtgctaaaaataaattaatttactttataaaccttatctgtacattatacgatgtgatgaaatttgctttt

SEQ ID NO: 183974 - DNA, 2863 bp, Homo Sapiens
  misc_feature (2010)..(2065): n is a, c, g, or t
  misc_feature (2656)..(2665): n is a, c, g, or t
ttggctcacttcctacttccagcatcggccttcctggccttgtcttttttttgtttccctggaggataatgggaagttgcatgctgcctcctgggttttatcccagatagctctggctttcttgctgcccacaggggcctggggcaggaaggagacttgctgagatgccatggagtgcccatctggtcactggcagtctgggcaggttgcccctttctgggtttgtggtgacggaggggaggccgagaggcacagaccaagtccccgggtggctgcaggcagctccagcccggtcctgaggatcctcctcaccatggtcacgtgccttagtaactgtgcccaggaagtggcctgctgcttgctgtgctgctgcttttcctacttctgcccttccctgccacccctcgcatgtcacagctgacaagcaattccttgtcttccctggccccctgggggaagggctgagaaacagtccatgtgcaccccaaccttaatggcctgaggtgggcagaggggtgtggagcagcctggagtacagggccctgggggaggagcccactgatgaggggcgctctcccatagccatgtgttgaatgctaactaggctggggtggacgaactctgccaactgctgtcatcttagaagatagatgcagcagtaaggaatgtttgttttgcttttttctgaaattttctgaagcactgtggctgggaaacttcgaagcggaccctgtgctgcatgtctgctcctcccctgagcctgtctgcttgggggtggtaaaaataaaaatcccagtttattttcagtaccttacctaacagggttggctccaggcgtgggtggcctagaagatgaggggagtggtcttctcccagccttttaccctcttgcctcctgcctccgcgcttacacacgcactttaccacccggtcattccctggcctcttgctgccacttgtaatcttccttccttcctctcatggtaaaggcattgcctgctgtgcctgttggccactcccacacttcccctcccccaagagccctcatctgctgtgctgagtccagaaaagcatatttaggtagggagctggttggagaaggtgctataactacaaggcagatgagactagcatgggcccacctggagggctgtcactaatggccccagtcaccttacctcactcacagcagtgcccttgtcttcctccaaaacagaaagcagtgacaaaagggggaggggtggtaatctgaagtctcactgctgagccttcagcttttatttttcactgtttcaaaacccgcattctattctagaatggtttttaaaatggaagatcttacctttttctatcttgttactctggggttttgtccccctaagagattgcactttttgtttggggtttattcagctgcatagatgaccagcttgatccctggtgaaatgaaaagccttccttctcctgaagcctctttccgccctgccctccactaacaacactgaggagcacaagcccaggcttgcccacctggtaggaaaggaagaaattagaacaatgggagccttggctcccctctcgtctcctcccctccttcttgtcactggctttgatgaggcccacttcccagaggctcctgggcctgtgagtgcaggagctcattctcccctcactgctgaagtctgtgacagcttcttcctccagttatgtctttcttccaaagcaatttcttaaccatcagccatgtgctgctatttctagggcttctgggctttgtcccttactgagagattagggactccacagctgccttgaggtagggcctggctgagagacaagggtagcagcaggtggcaggctgttaaaagacaggctgcctgaggagcctggagcaggtggaaacaggtggaagaaaccggccacagccctgctttaccgggctcacctctagggcattccagcaagaggctgatgcaggagaatggccagcaccaaggacatttaaaagannnnnnnnnnnnnnnnnnnnnnnnnnnnnnnnnnnnnnnnnnnnnnnnnnnnnnnnggcacacttgagctgactcagtgcaggtttaatatcctggtgacttgcagtcacattctaatgactttcaagggccagaatatggtgaaaatcacttaaaatatccgtcccttccatgccttaatttaacaggtaggctctatcttttgccatttctgtattttatgtgctgtgttcccgtttcactgggtatgaactgtgaaatggactgaatcctggccactttatgagtttgtttggttttataaggcatttcaatgtacattctataaatacaagcactccatttgcaaacagatcttaagctaatattttctttcccattcatcttgccctccccctcctcccgccagctttaaagttcagtggagaagccagatggcaattcagacaaaggtatactcttcctgcttcatgggtggtggcacgggaatagatagcccttagccctttccctcccagtcccagctgaaccctcagaccacttgcttcccacataacaatgtcgcctccatttccgaggaacatccttgcgtagagaatgaaatatgctgcaatcatttctgcatccttactcctcacccccaaagnnnnnnnnnnggcctagcagggaagcagcatgcaggcttcacagcttaatgccaaggacagcgagtgaggctgggagcttctcttgggcctgctgggtctgtcagctctcggaatagggacagtctcttactggtgccccaaggtgggacttggagaatattttgcttggcatatgtttgggtctgaatggtgtagttgctgggtccc

SEQ ID NO: 183975 - DNA, 1129 bp, Homo Sapiens
  misc_feature (107)..(134): n is a, c, g, or t
  misc_feature (262)..(272): n is a, c, g, or t
  misc_feature (668)..(677): n is a, c, g, or t
aattatttaaaaaggcatttatatacaaaaaacaattaaaattaaattaacttttgtacaaatattaaaatactatcttcccccccactgcaaggtacaggataccnnnnnnnnnnnnnnnnnnnnnnnnnnnngcaaacccaaactgattgagggacatccggcacagagtcatttataaatgtgttgttttaaaccattaattgagtaccattctgcaaaggattccataggggggcaataacctgaaaaagccagggcnnnnnnnnnnnacggccacaaagcccacgtacattctctcctccttgcttggcaaatgagggctttgccccggcatccccttctactagttctgctgcttggcagaggggctcaaccttgaggttttcattcacaaattctactagggtttcaactggaaattaagagccatttcccagcaaagctgggcctgccaccttttcctctctagggaaccagcaactacaccattcagaccaaacatatgccaagcaaaatattctccaagtcccaccttggggcaccagtaaggactgtccctattccgagagctgacagacccagcaggcccaagagaagctcccagcctcactcgctgtccttggcattaagctgtgaagcctgcatgctgcttccctgctaggccnnnnnnnnnnctttgggggtgaggagtaaggatgcagaaatgattgcagcatatttcattctctacgcaaggatgttcctcggaaatggaggcgacattgttatgtgggaagcaagtggtctgagggctcagctgggactgggagggaaagggctaagggctatctattcccgtgccaccacccatgaagcaggaagagtatacctttgtctgaattgccatctggcttctccactgaactttaaagctggcgggaggagggggagggcaagatgaatgggaaagaaaatattagcttaagatctgtttgcaaatggagtgcttgtatttatagaatgtacattgaaatgccttataaaaccaaacaaactcataaagtggccaggattcagtccatttcacagttcatacccagtgaaacgggaactcagcacataaaatacccaacttttttgtacaaag

SEQ ID NO: 183976 - DNA, 1114 bp, Homo Sapiens
  misc_feature (416)..(425): n is a, c, g, or t
  misc_feature (957)..(984): n is a, c, g, or t
ttgggtttcactgggtatgaactgtgaaatcgactgaatcctggccactttatgagtttgtttggttttataaggcatttcaatgtacattctataaatacaagcactccatttgcaaacagatcttaagctaatattttctttcccattcatcttgccctccccctcctcccgccagctttaaagttcagtggagaagccagatggcaattcagacaaaggtatactcttcctgcttcatgggtggtggcacgggaatagatagcccttagccctttccctcccagtcccagctgagccctcagaccacttgcttcccacataacaatgtcgcctccatttccgaggaacatccttgcgtagagaatgaaatatgctgcaatcatttctgcatccttactcctcacccccaaagnnnnnnnnnnggcctagcagggaagcagcatgcaggcttcacagcttaatgccaaggacagcgagtgaggctgggagcttctcttgggcctgctgggtctgtcagctctcggaatagggacagtccttactggtgccccaaggtgggacttggagaatattttgcttggcatatgtttggtctgaatggtgtagttgctggttccctagagaggaaaaggtggcaggcccagctttgctgggaaatggctcttaatttccagttgaaaccctagtagaattgtgaatgaaaacctcaaggttgagcccctctgccaagcagcagagctagtagaaggggatgcaggggcaaagcactcagttgccaagcaaggaggagagatgtacgtgggctgtgtggcagtccccacaccctgccctggcttcttcaggttatcgcaccactatggaatcctttgcagaatggtactcatataatggtttaaaacaacacattcataattgactctgtgcaggatgtcactcaatcagtttgggtttgcnnnnnnnnnnnnnnnnnnnnnnnnnnnnggtatcctgtacattgcagtgggcatgaagatagtattttaatatttgtacaaagtttaatttaattttaattgttctatgtatataactgcatctatttaaataattaaaaaaaagtttttatgaaggc

SEQ ID NO: 183977 - DNA, 953 bp, Homo Sapiens
aaaggggcacgtgggcattctcctatgggcattcagcagaccgtccacagaccagtagtggtttgcatccatgaatgttagctgaaaggccaacaacccatacagataggagtggttgttccatgatgtcttgtccaggagaaacacataccagtatggcagcaggaataacacacagcttatccggtagcacaggcccagcatcatgcccagtgcccctgggatttgtagggagaggattaagaggtcaagagatcaccacaggcccagtttccctggaccaggatatggttggaattaagaaaaatcaagcattgtataatcacataaaactaaatgaaaattaaatgttattttaatattttaaaaagaattatgggatcacagcttaagtgacacacaggtcaacagcatgaaattgatcacagcagaagtgaaataaggtgccaaagactttgaccattcaccagcatgcttctatttctgtgtttctggcaggccagtcaatatttcccacagttcccctcacccagaaacatgatggtgtagacaagatacatccagtcaagtggcagtgggcgtagggcatccagcaaggggaagcggcacacatccagcccatcaaggtatttccggtccagagagctgagcccccgctcctggggaatgtctagcaccatcaagaacccaaaaagaaaacgaaagacagctaagcttgcagggtccgttggtcgattcagcagggtcaccagcctccgccaactggacaaatctgtccactcaaaacccaagagtttccctattcggctgtcctgcctgggccctgagatcagttcagccttgtctttctgtactttatctgagctgggcgaggtccgcgcggacccggcagacaccgccattgctctgcggaggaggcaggtgggtcacagctgccgcgtctgaacggagcc

SEQ ID NO: 183978 - DNA, 1336 bp, Homo Sapiens
ttggcacttatcaatagaaaaactcctgattgacagtgtccatgcaagagctcatcagaagctccaagaactgaaggccattcttagaggcttcaatgccaatgaaaactcttccatagagactgcactcccagctcttgttgttcccatcttggagccctgtggtaattcagagtgtctgcacatttttgtagatttacattctggaatgtttcaattgatgctttatggacttgaccaggccactctggatgacatggagaagtctgtgaatgatgatatgaaacgaatcataccctggattcagcaacttaagttttggcttggacaacagcgttgcaagcagtctataaaacatctgcctacgataagcagtgaaacattgcagctttccaattactcaactcatcctattggaaacctttctaagaataaactgttcattaaacttacccgccttccacaatactacattgttgtggagatgttggaggttcccaataaacccacacaactgtcgtacaagtactactttatgtctgtgaatgctgcagatcgtgaagacagccctgcaatggcattgctgctgcagcagttcaaggaaaacattcaggacttggtttttcgtacaaaaaccgggaaacagaccagaaccaatgccaagcgcaagttgtctgatgatccatgtccagtagaatccaagaaaacaaaacgagcaggagaaatgtgtgccttcaataaagttttagcccacttcgtcgctatgtgtgatacaaatatgccatttgtaggacttcggttggagttgtccaatctggagattccacatcaaggagtgcaagtggaaggtgatggcttcagccatgcaattcgcttattaaaaattcctccctgtaagggtataactgaggaaacccaaaaggctctggaccgctctcttcttgattgcactttccgattacaaggtagaaataaccgcacttgggtagcagagttagtgtttgcaaattgtccacttaatggcacttctactagggagcaaggaccatcccggcacgtttacctgacatatgaaaatctgttgtctgagcctgttggtggtagaaaggtggttgaaatgtttcttaatgactggaatagcattgcacgattatatgagtgtgtgttggaatttgcacgttctctaccagacataccctgctcatctaaatattttctcagaagttcgtgtttataattaccgaaaacttatcttgtgttatggaaccaccaagggaagctcaattagtatccaatggaattcgatccatcaaaaattccacattttctttgggaa

SEQ ID NO: 183979 - DNA, 1913 bp, Homo Sapiens
  misc_feature (1465)..(1546): n is a, c, g, or t
ttggcaacgctggaccatcccgctctggtgccgctgcagccggcagagatggttgagctcatgttcccgctgttgctcctccttctgcccttccttctgtatatggctgcgccccaaatcaggaaaatgctgtccagtggggtgtgtacatcaactgttcagcttcctgggaaagtagttgtggtcacaggagctaatacaggtatcgggaaggagacagccaaagagctggctcagagaggagctcgagtatatttagcttgccgggatgtggaaaagggggaattggtggccaaagagatccagaccacgacagggaaccagcaggtgttggtgcggaaactggacctgtctgatactaagtctattcgagcttttgctaagggcttcttagctgaggaaaagcacctccacgttttgatcaacaatgcaggagtgatgatgtgtccgtactcgaagacagcagatggctttgagatgcacataggagtcaaccacttgggtcacttcctcctaacccatctgctgctagagaaactaaaggaatcagccccatcaaggatagtaaatgtgtcttccctcgcacatcacctgggaaggatccacttccataacctgcagggcgagaaattctacaatgcaggcctggcctactgtcacagcaagctagccaacatcctcttcacccaggaactggcccggagactaaaaggctctggcgttacgacgtattctgtacaccctggcacagtccaatctgaactggttcggcactcatctttcatgagatggatgtggtggcttttctcctttttcatcaagactcctcagcagggagcccagaccagcctgcactgtgccttaacagaaggtcttgagattctaagtgggaatcatttcagtgactgtcatgtggcatgggtctctgcccaagctcgtaatgagactatagcaaggcggctgtgggacgtcagttgtgacctgctgggcctcccaatagactaacaggcagtgccagttggacccaagagaagactgcagcagactacacagtacttcttgtcaaaatgattctccttcaaggttttcaaaacctttagcacaaagagagcaaaaccttccagccttgcctgcttggtgtccagttaaaactcagtgtactgccagattcgtctaaatgtctgtcatgtccagatttactttgcttctgttactgccagagttactagagatatcataataggataagaagaccctcatatgacctgcacagctcattttccttctgaaagaaactactacctaggagaatctaagctatagcagggatgatttatgcaaatttgaactagcttctttgttcacaattcagttcctcccaaccaaccagtcttcacttcaagagggccacactgcaacctcagcttaacatgaataacaaagactggctcaggagcagggcttnnnnnnnnnnnnnnnnnnnnnnnnnnnnnnnnnnnnnnnnnnnnnnnnnnnnnnnnnnnnnnnnnnnnnnnnnnnnnnnnnntgtgtatatctttgtgtgtcttcctgtttatgtgtgccaagggagtattttcacaaagttcaaaacagccacaataatcagagatggagcaaaccagtgccatccagtctttatgcaaatgaaatgctgcaaagggaagcagattctgtatatgttggtaactacccaccaagagcacatgggtagcagggaagaagtaaaaaaagagaaggagaatactggaagataatgcacaaaatgaagggactagttaaggattaactagctctttaaggattaactagttaaggattaatagcaaaagatattaaatatgctaacatagctatggaggaattgagggcaagcacccaggactgatgaggtc

SEQ ID NO: 183980 - DNA, 1889 bp, Homo Sapiens
  misc_feature (107)..(115): n is a, c, g, or t
  misc_feature (791)..(800): n is a, c, g, or t
  misc_feature (1424)..(1476): n is a, c, g, or t
ttggatttgaatatcagcaaattgaaattttccataattatcattaatttgtaaccacatccagtgtcatgcttactccttagagttcagatgaattcttaaaattnnnnnnnnnctccatagtactaattttgtttctttatatagtttgcgtttgatattagtgcttgcaattgtattaaagtcaaaagctgatttttatggcatacacaagaatgccactttttcttttatttcataccaataatttaaagattgatatgctaaaaacaatttgcacagcactaaagcatgagctactttcatctaaacctgtaaaaatatgaaagatttttatattttttcactgggaagaaattcttcctggatgaaattacaaatatgtgtagaatatatttaataaaagacttataaaatacctaactacaggacttaaaatatagattggcgcgtagtatatagaacaatattccatataaataagtttagcctttataaaaatgaagttgcaggctgacattacattctgtacttactaagtgtcaacagcccttacaaacattaaatgtaaatggtttcaaatggtcagcgttgtttaaatgtaatcatgttattttattcattgttaatgctttgatgaaaaggctttatatgcagtagatctacgaaaatattgttcatactgatcagaattaaatttgtatagagcagagttttaaaatgaatgtaaatagcactaaacgttttctttctgcaacctgtacttacagattcttcctgtaaactaaatnnnnnnnnnntgatagtgcattttggtggtaattttaaaggtcttgattaggtcaataattgtttaagcaccgtctcattcatgttttctactttcatttcttaagcttttaaaattcatttaattaatattctgttgttgttttggggagtattcccaatgtatctttgatatttaacctggttaatttgtggacagtcacaacaatggatagaattatgtagtctccgttatcactaaaatgttatcttcaagagatgttaaatatttatatgctttgttgactagctgaaatgtgaattctgttagtgttgactaaagaatctggtagttgcttaattgggcaattaaacaatttatggctctattttgtaaaacaaactactggtaattatttttaatacctattttcattctgattactctttttttaagttaaagactatcagttaattaagattgagtttttatgatggttaaaaataattctctattggtttttcaatatatttttctgtgtgttctcagattatatatttccctcaatttagagtttgctaagtgaaataaactggttcactagtagagaaagaattacgtcgcttaatacctaatatcatagttgtacaatatnnnnnnnnnnnnnnnnnnnnnnnnnnnnnnnnnnnnnnnnnnnnnnnnnnnnntttagatgccttaatagtatatacgtgaaatactcagctgtccctttaaaaataattccttggactgcctggtggttaaaatacgattcctcatatccaaggctacttttgaagatccctctgccaaaaatatagctcacttatctaaaggtgagagctgcatagatccagtaatgtacataaagcctgaatgatgagcctatgtccctgcctaacgctggtgtctcactcatctcttttacctaaattgtcctgaactttgttaagtgttctggacaaggccaagcttttctttattaaaacctcagcatgtctccctgatctgaactatttgctttctcttcagataagttgtattttaccatggaaaatacagtatctacattaccattcacgttaaatgaagtttcctc

SEQ ID NO: 183981 - DNA, 1628 bp, Homo Sapiens
  misc_feature (1064)..(1116): n is a, c, g, or t
ttggaatctctctgcagctgcaagagatgctgcgccttccccgtctggatccgagtctaagtccggcctgtcgcccactggacctgggcggctgcgggccctgcggagcgagaccacctgtgaggactgctgagattggcggaggcggtcatgtgggcggtcacgtgctgcggcgagctccgtccaaaagaaaatggggtttggtgtaaatctgggggtgtaatgttatcatatatcactctacctcgtaaaaccgacactgaaagctgccggacaacaaatcacaggtcaaaattatgagttcttcgtattatgtgaacgcgctttttagcaaatatacggcggggacttctctgttccaaaatgccgagccgacttcttgctcctttgcgcccaactcacagagaagcggctacggggcgggcgccggcgccttcgcctcgaccgttccgggcttatacaatgtcaacagccccctttatcagagcccctttgcgtccggctacggcctgggcgccgacgcctacggcaacctgccctgcgcctcctacgaccaaaacatccccgggctctgcagtgacctcgccaaaggcgcctgcgacaagacggacgagggcgcgctgcatggcgcggctgaggccaatttccgcatctacccctggatgcggtcttcaggacctgacaggaagcggggccgccagacctacacgcgctaccagacgctggagctggagaaggagttccacttcaaccgctacctgacgcggcgccgccgcattgaaatcgcccacgcgctctgcctcaccgagcgccagattaagatctggttccagaaccgccgcatgaagtggaagaaagagcataaggacgaaggtccgactgccgccgcagctcccgagggcgccgtgccctctgccgccgccactgctgccgcggacaaggccgacgaggaggacgatgatgaagaagaggaagacgaggaggaatgaggggccgatccggggccctctctgcaccggacagtcggaaaagcgtctttaagagactcactggttttacttacnnnnnnnnnnnnnnnnnnnnnnnnnnnnnnnnnnnnnnnnnnnnnnnnnnnnngcaacccagtccccaacctgcactctacccacccccatcacctactccagctcccaacttttgtggactgagcggccgcagagactgggtcgccttggattccctctgcctccgaggaccccaaaagacacccccaaccccaggccagccggccctgctctggcgcgtccaaaatactacctagcacaggcctctgctcgaggcacccccaaactacctatgtatccagccccagagggcctccattcccaggaagtccctatgtatcccaacactggcagacacccagcaccaccctcccagacccgcaagaaagtgaatctcactactacctactcccctaaaactacctattttgtgctggctggcttgcctgctacctagtgccgactgctcccaggcaagtcccctgctgcttacagcccgcagcttttggggtccctgaggctgccctgagaatgtgctgaggtccaggatcaggtattggcatctatttaatcgaaaaataatat

SEQ ID NO: 183982 - DNA, 1530 bp, Homo Sapiens
gagcaatgcttttctataaaaagccaactttgtacaaaaaagttggcagagtctgatcctgtccacagccattgaccttttcagacaagccggcctcggcaatcatctctctggaagtgagcggttgaccctcctggctcccctgaattctgtattcaaagatggaacccctccaattgatgcccatacaaggaatttgcttcggaaccacataattaaagaccagctggcctctaagtatctgtaccatggacagaccctggaaactctgggcggcaaaaaactgagagtttttgtttatcgtaatagcctctgcattgagaacagctgcatcgcggcccacgacaagagggggaggtacgggaccctgttcacgatggaccgggtgctgacccccccaatggggactgtcatggatgtcctgaagggagacaatcgctttagcatgctggtagctgccatccagtctgcaggactgacggagaccctcaaccgggaaggagtctacacagtctttgctcccacaaatgaagccttccgagccctgccaccaagagaacggagcagactcttgggagatgccaaggaacttgccaacatcctgaaataccacattggtgatgaaatcctggttagcggaggcatcggggccctggtgcggctaaagtctctccaaggtgacaagctggaagtcagcttgaaaaacaatgtggtgagtgtcaacaaggagcctgttgccgagcctgacatcatggccacaaatggcgtggtccatgtcatcaccaatgttctgcagcctccagccaacagacctcaggaaagaggggatgaacttgcagactctgcgcttgagatcttcaaacaagcatcagcgttttccagggcttcccagaggtctgtgcgactagcccctgtctatcaaaagttattagagaggatgaagcattagcttgaagcactacaggaggaatgcaccacggcagctctccgccaatttctctcagatttccacagagactgtttgaatgttttcaaaaccaagtatcacactttaatgtacatgggccgcaccataatgagatgtgagccttgtgcatgtgggggaggagggagagagatgtactttttaaatcatgttccccctaaacatggctgttaacccactgcatgcagaaacttggatgtcactgcctgacattcacttccagagaggacctatcccaaatgtggaattgactgcctatgccaagtccctggaaaaggagcttcagtattgtggggctcataaaacatgaatcaagcaatccagcctcatgggaagtcctggcacagtttttgtaaagcccttgcacagctggagaaatggcatcattataagctatgagttgaaatgttctgtcaaatgtgtctcacatctacacgtggcttggaggcttttatggggccctgtccaggtagaaaagaaatggtatgtagagcttagatttccctattgtgacagagccatggtgtgtttgtaataataaaacc

SEQ ID NO: 183983 - DNA, 973 bp, Homo Sapiens
agcaatgcttttctttaatagccaactttgtacaaaaaagttggctgtgaactgtcgcccggctcctgaaagccgaccaccatgcaacggggtggtgcacctcatcgataaggtcatctccaccatcaccaacaacatccagcagatcattgagatcgaggacacctttgagacccttcgggctgctgtggctgcatcagggctcaacacgatgcttgaaggtaacggccagtacacgcttttggccccgaccaatgaggccttcgagaagatccctagtgagactttgaaccgtatcctgggcgacccagaagccctgagagacctgctgaacaaccacatcttgaagtcagctatgtgtgctgaagccatcgttgcggggctgtctgtagagaccctggagggcacgacactggaggtgggctgcagcggggacatgctcactatcaacgggaaggcgatcatctccaataaagacatcctagccaccaacggggtgatccactacattgatgagctactcatcccagactcagccaagacactatttgaattggctgcagagtctgatgtgtccacagccattgaccttttcagacaagccggcctcggcaatcatctctctggaagtgagcggttgaccctcctggctcccctgaattctgtattcaaagatggaacccctccaattgatgcccatacaaggaatttgcttcggaaccacataattaaagaccagctggcctctaagtatctgtaccatggacagaccctggaaactctgggcggcaaaaaactgagagtttttgtttatcgtaatagcctctgcattgagaacagctgcatcgcggcccacgacaagagggggaggtacgggaccctgttcacgatggaccgggtgctgacccccccaatggggactgtcatggatgtcctgaagggagacaatcgctttagcatgctggtagctgcc

SEQ ID NO: 183984 - DNA, 1339 bp, Homo Sapiens
  misc_feature (1096)..(1153): n is a, c, g, or t
aacccagttatacatgaacgccctcccccaagtctgacacagcttcttaagtccacacaccagaaatccagacccactcccagaatcgtgatacagagctacaacccttagcccacagaaacactaacttctgtgtgcactgttactgcacaaggccgtgacacacctgaaagtgattacagaaactgacccttcagaaaaccccgtgcacatctacagacctgactcacccctgaacatcgcagtgctctgaagattctgatatacaactgaggccctcaaacccctgcagcctgacctataccataaaagcttaagcatggggtctctggccacacccgaggcccttgtgccccttatcctggcacacaaccaagccttccttgtgcatgacacacacaagagacagcaatgggggagtctctctggaagaggcagggattttcctccttcctggagagctgcctctgcttccctgaatccctcgctgatgggtccctggattacaggactaggagcctggagacacgagctaaatccagaagggaaagggcaggcagtggttgggttggcatgcatgatagtgagggttcctctgtgtcccctccactccaagctgttccttatgttcaggcctaagctgttctcaggccatgtgtaaagcccagtttcactgcttcctcctcctcagagacctgaactcctcacaggcagggacggaccatgtcttcttagtctgccctctccagggtgctcggctacatgccaggcccatgggagggctgaatgaggagtggatcaactaacaaacggatgggaagacaagtgtctaggtacctgggacagaagaatggatgagtggatggcctgaagaacagataggtagtagatgggagaatggaatagcaggtagatagatgggtaggtggatctgtggaaggataggtaggcagggagtggatagatggatggggagtatggagctgacatcaggtagatgaatgacgagattaacaatgggtgacaggtgggaggatggaaggatgagtggaagggtgggtgggtgaatcggtagatcagagagtgggtgaatacnnnnnnnnnnnnnnnnnnnnnnnnnnnnnnnnnnnnnnnnnnnnnnnnnnnnnnnnnntcatacacagatgtgtggatgaaccagtaggtgcgtggatgaatagataggtagaagggcagataggtggaagggcggatgggtggaggataaatgggtgggagagtggaggtaaccacagtacttacctgaggcctcttcctctactgcctgaatagggtatgacttccactcagacttcaccaa

SEQ ID NO: 183985 - DNA, 924 bp, Homo Sapiens
taatcattatgaccatcagggtaatattgctggttcatgcctttctggaggaccttgtccaccatgactgtattggtccccgtaatagtcttcctggctgagtactgctgtggtgggccctgttgaggaggtctatagggaggaatctgtctctgacccatcatatgattgccttggttaacttgacccatcattcccataggtggctgctgtccttggtaatgctgtccgcctccctgtggcatattgtattgctgagaaggaggctgctgatgcatcattggaccttggtttggctgcatactcatatttggtctgggaccatagtttcccattggttgtccctgactcattgtcatctgattctgtactggcatgctctgtgatgatggcacagaatggttgtaacctcccatggatccatggctacttgaaggcatattcatggaactgtttgtcatattgagttgattgggtccaggtccctgcataggcatatggttaggcccaggcatctggccgttcatctggttctgcatgtgcggtgcaggaggacccccacctaccattccatctgaaggcatgttgtgagagcgtggaggtgggggagggccgctctgattcatccctccaggacccataggcatattctgtgtgggtggtgctggtaaaagagactgcatattttgattagaatctgctattgtagcaaggtataccaagtttgtgtgcaacatctgctgatactgagaacactctgaggtctttcctttattctgagagtccattatacactgaataagatggttattgtcatccaacatcttctgaatcgcagcgggagtgatctcccccttgcctcgctgcctcggggccgcgaaagccacagacatgttgccgccgtcaccactatcggcaagccaa

SEQ ID NO: 183986 - DNA, 1101 bp, Homo Sapiens
ttggatcacatccccccgtcttgttgtggagtgtggaggagaaagggtggaatcggtggtgatcaaaaaccttaagaagacacccaactttccaagttctgttctcttcatgaaagtgttcttgcccaaggaggaattgtacatgcccccactggtgatcaaggtcatcgaccacaggcagtttgggcggaagcctgtcgtcggccagtgcaccatcgagcgcctggaccgctttcgctgtgacccttatgcagggaaagaggacatcgtcccacagctcaaagcctcccttctgtctgccccaccatgccgggacatcgttatcgaaatggaagacaccaaaccattactggcttctaagctgacagaaaaggaggaagaaatcgtggactggtggagtaaattttatgcttcctcaggggaacatgaaaaatgcggacagtatattcagaaaggctattccaagctcaagatatataattgtgaactagaaaatgtagcagaatttgagggcctgacagacttctcagatacgttcaagttgtaccgaggcaagtcggatgaaaatgaagatccttctgtggttggagagtttaagggctcctttcggatctaccctctgccggatgaccccagcgtgccagcccctcccagacagtttcgggaattacctgacagcgtcccacaggaatgcacggttaggatttacattgttcgaggcttagagctccagccccaggacaacaatggcctgtgtgacccttacataaaaataacactgggcaaaaaagtcattgaagaccgagatcactacattcccaacactctcaacccagtctttggcaggatgtacgaactgagctgctacttacctcaagaaaaagacctgaaaatttctgtctatgattatgacacctttacccgggatgaaaaagtagagaaacaattattgatctggaaaaccgattcctttcccgctttgggtcccactgcggcataccagaggagtactgtgtttctggagtcaatacctggcgagatcaactgagaccaacacagctgcttcaaaatgtcgccagattcaaaggcttcccacaaccc

SEQ ID NO: 183987 - DNA, 1763 bp, Homo Sapiens
ttgcaacaaattgatgagcaatgcttttacctataaaagagcaactttgtacaaaaaagttggcacgggacatgtcgcacgagcagctgacagaaaaggaggaagaaatcgtggactggtggagtaaattttatgcttcctcaggggaacatgaaaaatgcggacagtatattcagaaaggctattccaagctcaagatatataattgtgaactagaaaatgtagcagaatttgagggcctgacagacttctcagatacgttcaagttgtaccgaggcaagtcggatgaaaatgaagatccttctgtggttggagagtttaagggctcctttcggatctaccctctgccggatgaccccagcgtgccagcccctcccagacagtttcgggaattacctgacagcgtcccacaggaatgcacggttaggatttacattgttcgaggcttagagctccagccccaggacaacaatggcctgtgtgacccttacataaaaataacactgggcaaaaaagtcattgaagaccgagatcactacattcccaacactctcaacccagtctttggcaggatgtacgaactgagctgctacttacctcaagaaaaagacctgaaaatttctgtctatgattatgacacctttacccgggatgaaaaagtaggagaaacaattattgatctggaaaaccgattcctttcccgctttgggtcccactgcggcataccagaggagtactgtgtttctggagtcaatacctggcgagatcaactgagaccaacacagctgcttcaaaatgtcgccagattcaaaggcttcccacaacccatcctttccgaagatgggagtagaatcagatatggaggacgagactacagcttggatgaatttgaagccaacaaaatcctgcaccagcacctcggggcccctgaagagcggcttgctcttcacatcctcaggactcaggggctggtccctgagcacgtggaaacaaggactttgcacagcaccttccagcccaacatttcccagggaaaacttcagatgtgggtggatgttttccccaagagtttggggccaccaggccctcctttcaacatcacaccccggaaagccaagaaatactacctgcgtgtgatcatctggaacaccaaggacgttatcttggacgagaaaagcatcacaggagaggaaatgagtgacatctacgtcaaaggctggattcctggcaatgaagaaaacaaacagaaaacagatgtccattacagatctttggatggtgaagggaattttaactggcgatttgttttcccgtttgactaccttccagccgaacaactctgtatcgttgcgaaaaaagagcatttctggagtattgaccaaacggaatttcgaatcccacccaggctgatcattcagatatgggacaatgacaagttttctctggatgactacttgggtttcctagaacttgacttgcgtcacacgatcattcctgcaaaatcaccagagaaatgcaggttggacatgattccgggacctcaaagccatgaacccccttaaagccaagacagcctccctctttgagcagaagtccatgaaaggatggtggccatgctacgcagagaaagatggcggcccgcgtaatggctgggaaagtggagatgacattgggaaattcctcacgagaagaggccgacgagaggccagccgggaaagggcgggacgaaccccaacatgaaccccaagctggacttaccaaat

SEQ ID NO: 183988 - DNA, 794 bp, Homo Sapiens
  misc_feature (44)..(70): n is a, c, g, or t
caaattggcatgtctttaaagtatttttcttcctgattaaaaannnnnnnnnnnnnnnnnnnnnnnnnnnatatatatatatttttttaaatcacattaattttaccaagtgaaaccaagccatactgtttttgagccaattaagaaaattgccatttttaaagtgtagcatttcagggtaaagacccatgaaatggcttgatgtattctagactactgaaagaaaaccacttcaaagattttgttgaaagttttagtgttgtctgaaatgcaagagggaaggtgattggtagtgagttaaaagaaaaagagaggaaaagagagtagttttgtcttcaagtaaaatgtctggttgtgccagacatttcacaagtgtgaaaggagataggagaagctcaacttgagggcgtgtagtaagttgtagaaggctcgaggggacgtggacttatttgccttggtttgcaatacctgcaaataatgagtttgaaaagaaacaatgaaatgtgttaaaaatttgaccatattagataaattttggtggatttagtcataagatggaaaaagactggtgaatcttttattacaaaatgtttctgttaaaatgggatcatcatctttgaaaggggggaggaggagtaaaagcccgattataatggtgatcaattcaagtcagtgttgactattctgtgaaatatatttggccagtggaaatgataatcagaaaagactgtaaatagatccatccaaatgatttctctgtacaaatgaatgatactattaaaaaaagaaacgcc

SEQ ID NO: 183989 - DNA, 2809 bp, Homo Sapiens
  misc_feature (1998)..(2033): n is a, c, g, or t
  misc_feature (2077)..(2087): n is a, c, g, or t
  misc_feature (2486)..(2543): n is a, c, g, or t
  misc_feature (2597)..(2623): n is a, c, g, or t
ttggcgctttctgcctggcagaggctggcgggcatcgtgcccgtccctgccggtctcccgggcacccggccaccgccccaccccctcctccgtgccatggagcccgagctggcggctcagaagcagcctcgaccgcggaggcgaagccgccgggcctctgggctcagcacggagggagcgacggggccttcggccgacacctccgggtcggagctggacgggagatgttcccttcggagaggcagctccttcacattcttaacacctggccccaactgggacttcactttgaaaagaaaacgcggagagaaagatgatgatgttgtaagccttagcagccttgatctgaaggagccaagcaataaaagagttcgacctctggctcgtgtcacgtccttggcaaatttaatctctcctgtaagaaatggagctgtcagacgttttggtcaaacaatacagtcatttacccttcgtggtgaccacagatccccagcctctgcccagaagttttctagcaggtcaacagtcccaacacccgccaagagaaggagcagtgcactgtggtcagagatgctggacatcaccatgaaggagtctctcaccaccagggagatcagacggcaggaggcaatatatgaaatgtcccgaggtgaacaggatttaattgaggatctcaaacttgcaagaaaggcctaccatgaccccatgttaaagttgtccatcatgtcagaagaggaactcacacatatatttggtgatctggactcttacatacctctgcatgaagatttgttgacaagaataggagaagcaaccaagcctgatggaacagtggagcagattggtcacattctcgtgagctggttaccgcgcttgaatgcctacagaggttactgtagtaaccagctggcagccaaagctcttcttgatcaaaagaaacaggatccaagagtccaagacttcctccagcgatgtctcgagtctcccttcagtcgaaaactagatctttggagtttcctagatatccctcgaagtcgcctagtcaaataccctttactgttaaaagaaattcttaaacacactccaaaagagcaccctgatgttcagcttctggaggatgctatattgataatacagggagtcctctctgatatcaacttgaagaaaggtgaatccgagtgccagtattacatcgacaagctggagtacctggatgaaaagcagagggaccccagaatcgaagcgagcaaagtgctgctgtgccatggggagctgcggagcaagagtggacataaactttacattttcctgtttcaagacatcttggttctgactcggcccgtcacacggaacgaacggcactcttaccaggtttaccggcagccaatcccagtccaagagctagtcctagaagacctgcaggatggagatgtgagaatgggaggctcctttcgaggagctttcagtaactcagagaaagctaaaaatatctttagaattcgcttccatgacccctctccagcccagtctcacactctgcaagccaatgacgtgttccacaagcagcagtggttcaactgtattcgagcggccattgcccccttccagtcggcaggcagtccacctgagctgcagggcctgccggagctgcacgaagagtgtgaggggaaccacccctctgcgaggaaactcacagcccagaggagggcatccacagtttccagtgttactcaggtagaagttgatgaaaacgcttacagatgtggctctggcatgcagatggcagaggacagcaagagcttaaagacacaccagacacagcccggcatccgaagagcgagggacaaagccctttctggtggcaaacggaaagagactttggtgtagagaaggctctgtgtgttaactgatgggagagactgtttgtttataaatgtgtacagttttgttttctcgtaaggggagcatcatagggttactttataccagttgtaacannnnnnnnnnnnnnnnnnnnnnnnnnnnnnnnnnnnaatggcagctaaagatatacagattactgttaaattgcagtccnnnnnnnnnnnaaagatattttcttgagttatttagaacatggtaagcctggtattttttaatcaaacaaaatatttatgaaatgggttttctcttaattctggattcatcatggctttctaataccaattgtaatatttacaatattcaccaaaacttagaattttgcaaatgctggaattctgccagtgtttctttgctaagccttgcatgcaaaatttgaaattttaacattggcacccaaaacctacatggaatgtatgtctggagtatttcaaactttacattgaaacataatttccttggaaaacaaaccataagcctgaggaggtttttatcaactggaatgctttatattagtttgtttttcactgtacattcctcattttacattcatttaacctgccgannnnnnnnnnnnnnnnnnnnnnnnnnnnnnnnnnnnnnnnnnnnnnnnnnnnnnnnnngatgccttttcaaattggcatgtctttaaagtatttttcttcctgattaaaaannnnnnnnnnnnnnnnnnnnnnnnnnnatatatatatatttttttaaatcacattaattttaccaagtgaaaccaagccatactgtttttgagccaattaagaaaattgccatttttaaagtgtagcatttcacggtaaagacccatgaaatggcttgatgtattctagactactgaaagaaaaccacttcaaagattttgttgaaagtttta

SEQ ID NO: 183990 - DNA, 2514 bp, Homo Sapiens
tttgtacaaaaaagttggatcgccctgcacagcattgcatggttcactgtcttttactttggcaatggctggattcctaccctcatcacggcctttgtccttgctacctctcaggcccaagctggatggctgcaacatgattatggccacctgtctgtctacagaaaacccaagtggaaccaccttgtccacaaattcgtcattggccacttaaagggtgcctctgccaactggtggaatcatcgccacttccagcaccacgccaagcctaacatcttccacaaggatcccgatgtgaacatgctgcacgtgtttgttctgggcgaatggcagcccatcgagtacggcaagaagaagctgaaatacctgccctacaatcaccagcacgaatacttcttcctgattgggccgccgctgctcatccccatgtatttccagtaccagatcatcatgaccatgatcgtccataagaactgggtggacctggcctgggccgtcagctactacatccggttcttcatcacctacatccctttctacggcatcctgggagccctccttttcctcaacttcatcaggttcctggagagccactggtttgtgtgggtcacacagatgaatcacatcgtcatggagattgaccaggaggcctaccgtgactggttcagtagccagctgacagccacctgcaacgtggagcagtccttcttcaacgactggttcagtggacaccttaacttccagattgagcaccacctcttccccaccatgccccggcacaacttacacaagatcgccccgctggtgaagtctctatgtgccaagcatggcattgaataccaggagaagccgctactgagggccctgctggacatcatcaggtccctgaagaagtctgggaagctgtggctggacgcctaccttcacaaatgaagccacagcccccgggacaccgtggggaaggggtgcaggtggggtgatggccagaggaatgatgggcttttgttctgaggggtgtccgagaggctggtgtatgcactgctcacggaccccatgttggatctttctccctttctcctctcctttttctcttcacatctcccccatagcaccctgccctcatgggacctgccctccctcagccgtcagccatcagccatggccctcccagtgcctcctagccccttcttccaaggagcagagaggtggccaccgggggtggctctgtcctacctccactctctgcccctaaagatgggaggagaccagcggtccatgggtctggcctgtgagtctccccttgcagcctggtcactaggcatcacccccgctttggttcttcagatgctcttggggttcataggggcaggtcctagtcgggcagggcccctgaccctcccggcctggcttcactctccctgacggctgccattggtccaccctttcatagagaggcctgctttgttacaaagctcgggtctccctcctgcagctcggttaagtacccgaggcctctcttaagatgtccagggccccaggcctgcgggcacagccagcccaaaccttgggccctggaagagtcctccaccccatcactagagtgctctgaccctgggctttcacgggccccattccaccgcctccccaacttgagcctgtgaccttgggaccaaagggggagtccctcgtctcttgtgactcagcagaggcagtggccatgttcagggaggggccggctggcctggaggctcagcccaccctccagcttttcctcagggtgtcctgaggtccaagattctggagcaatctgacccttctccaaaggctctgttatcagctgggcagtgccagccaatccctggccatttggccccaggggacgtgggccctgcaggctgcaggagggcactggagctgggaggtctcgtcccagccctccccatctcggggctgctgtgtggacggcgctgcctcaggcactctcctgtctgaacctgcccttactgtgtttaacctgttgctccaggatgcattctgataggagggggcggcagggctgggccttgtgacaatctgcctttcaccacatggccttgcctcggtggccctgactgtcagggagggccagggaggcagagcgggagggagtctcaggaggaggctgccctgaggggctggggagggggtacctcatgaggaccagggtggagctgagaagaggaggaggtgggggctggaggtgctggtagctgaggggacgggcaagtgagaggggagggagggaagtcctgggaggatcctgagctgctgttgcagtctaacccactaatcagttcttatattcaggggaagggcaggcaccaacaactcaaaatgggggctttcggggagggcgcctagtccccccagctctaagcagccaggagggacctgcatctaagcatctgggttgccatggcaatggcatgccccccagctactgtatgcccccgaccctcgcagaggcaaaatgaa

SEQ ID NO: 183991 - DNA, 1606 bp, Homo Sapiens
ttgtacaaaaaagttggctgagaactatttacctatcactctagttttgaagcaaagatggacttcagtggggaggggccaaaaccgttgttgtgttaaaatttattttattaaattttgtgccagtattttttttcttaaaaatcgtcttaagctctaaggtggtctcagtattgcaatatcatgtaagtttgtttttatttgccggctgaggattctgtcacaatgaaagaaaactgtttatatagaccccattggaaaagcaaaacgctctcactgagatcagggatcccaaattcatgggacttatataagaaggacaattaatgctgatttgggtacaggggaattatgtgtgtgaatgtcatctacaattaaaaaaaattagcacatccctttacttacttgttatcagtggattctcggggtttggacttaatgttgagctaagaagcattaagtctttgaactgaatgtattttgcatccctggttttggacgacagtaaacgtaggagcactgttgaagtcctggaagggagatcgaaggaggaagattgacttggttctttcttagtcctatatctgtagcatagatgacttggaataaaagctgtatgcatgggcattacccctcaggtcctaagaaataagtcctgaatgcatgtcgttccaaactaacactctgtaatttttcttttatgtcttattttccaagagtcctccattttttgcaccccctcaccgccaactctgttattcagtagagagaagtgtacggctttctgattggtgagtgaaaaagtaacttgagacacgacctaagttgaagagtttagacttgctgagttttagaagtgatggaaattaagagagcatttcaataaaatgtgacttggctgtctttggaagagaagtgcaaggctttcctttgaagaatttaaattagtccggtaggatgtcaggtgagactgtgtatgcaaaatgaatggcacaggtgatgccagggcctcttgcttgggtctgatgtcttggcacagggtaagtgaaggttaattccagaagagaggaatgacttgaaggcaaaggaaactaaggaaggaggttcagtgaggaaaataaggttgtccatgagatttgaatagatttttagttcccccaaggtttaaatacaaacatagtcaagcaaggtagtcatctttctgctggttgtgagggggaatctgaaaatggagttttagaggaaaagtcaacatctaactagtgaggaaaagtgcctaatacaattagaatctccctcactctatagttgcccagttgaaaggataaggaggaggggtggcttttatggacttccatgagagaagaaagaaatatttcaggtaagcttctcagggctggccctttttgggatttggatgagaaattggaagtactaactactttctagcatatctttaagaaaattgattgttatttactcccagatcctcttgcagacccagaattatcagaacatagctctgtgattcatgagtgtccccatactgatgaattggagcatccatatggaaagcaaaggcagattatcccagctgtattatttt

SEQ ID NO: 183992 - DNA, 1692 bp, Homo Sapiens
  misc_feature (111)..(124): n is a, c, g, or t
ttggcttactgaagtgctagtactaaactgtgctagtactaaaagaaaacaggttggaacatacatatagcctagcatttataacagaattgttgaacgtctgtaaatgannnnnnnnnnnnnngcaaaggaaaaaattgatactggaaaagattgttgtgcatagttattagtcatttgtaaccttgcttaagtatttcttagtccaacatagatattttctttctcctgaccatgtattttaaaatatagtctatttcttgactttgaacttaaagctttaatcataatttctcatgtatacatcgttcttctgatggtaagctggatttgaaggtagtggtttcagtgtttcttaagttggtagctgagggtatcaggcatcagttcatgcaataatacaagaaaaaaaatcctttgcttgccaagaggtagagtgatgtgcatttatctgttttctgttctgtaagtctagaccttcaaaccatttgtaaactaacccctgggaaatttgaaattacctgataacttaagactctgtgatctctggaatcaccatatgtttcttttttgtgtagatattaataacattactctttgactatagtgtgcactctgaaatgtactcagtgaaaatttgttttgagtttcattaatgctatttcaccagttagacataattacttctaccgatgtgaatgatacggatgccggcagagcttccagatctttcagactcaactgctaggtcaattagtttgtcataataaaacttggcagattctacaagtctattatgacaaaccaggaactaattctataatggaaaactatccattctgaataataggtatgtaattatttgctgctgctgctgtgctctgtaaattctgaatatgacatttaaactctgtgcctactaaaggtatcttctggagtttttgggaggagagaaactggaaaattaaattgtatttttgccagaagactcttacttgcatgtgtctcagggtcttcagtttttctataagtttccatatccaaagttcagaattcatgtgaaatacttctttggggcaaaagtccttcattcctggtatttattggattggaaatctgtagcaagatgctgtttaaaattaccatattgtttttttatcttatacttagctctctggctattgaacttccttttcttgtttgaagttagcttcaaatttgctcctatgctaaattacctgtaaatattctggataggaactacttgaaatagtaatttgttaaaagatatgacaaaatgaaaatgcttaaactacagaaatttaaaaatgccataacaatcttgcaagactaactttaaaatatactttaaatgattattatgattttggtggtaacgatcccccacacacaaccactatgaagaaataatgccgcatttttcccccattgtaccaaaaagataaaaaaatggtaaacactgatcaaggtattttgtattgtcaaggcatgcatattctaaagaattaaatgctaacttaacagcactggctttctggctggtcaactatatgaaaccttgttcattcctccgagtactgtaatgttcacacttgtacaatcttccctgtcatgactttaagttctacttttcattaaccatggcctgatattagttcttagagcttcttg

SEQ ID NO: 183993 - DNA, 1138 bp, Homo Sapiens
gagatgggcttttcatccagcagcacctgtccccctgtgggctggtacagattctgcagcagggcagccactgtgctcttcccagacccattgggtcccaccagcgccgtcacctcaccaggacgtagggtaaacgtcagccccttgagcacaggcctgtcagggcgattgggatatgcaaaggagacgtcttggaatttcacaaccccctgcagagtggtgggggcaagcgtgccaggtgaaggcagatttggctgtcggtccatgtaggagaaaaccttctctgcagctcccacgttgctgagcatatccccatatatgtataccagggtctgcacatagctccccacgctctcctggtagatcataaaggaaagcaggctgccctgggtgagctccccatcctgcatctgctgcagcccacagctcagcatcagcatctgcacacccaagtgcagcaccctccttacgagcaggtacaaggcgcgttccaggtctctccgccaatacagctgccgacattgttcaagggcctctttatagcgacagacttcatgctcctcggccccaaaactgcgaacggtctgcagccctccaacggcttcccgcaccacctgccccgccctggccactgcatcctggatctcccgaagcacttcctgatggcgggtgttgtacaccttctccgctgctattgtgaagggcatgtgcagcagagaaaggagggtgagtcgaggcgatatgctgagcatgaagccatacagccccaccactttcaccaggcttcgcaagagcacattggcatttaaaggaagccagttactcatcagggtggtatccgagctcagccgtgagttcagctcccctgtcttagtctcctggaagaaaccgaggtcctggccagcagggaggagaaaagctgctcccggatccgcaagttgattcgagacatggtgtaggtgaagcagcctcctcggcagcctgcagacagtgagctgccaaaggagaagaggcacatgaagaagatggcactggcaaaggcatgggggtcaaaatcacctcccaggatgtcaatcacacgaccagaatagtgagggattaatgtggtcacccaaaacccaacttttttgtacaaagt

SEQ ID NO: 183994 - DNA, 2456 bp, Homo Sapiens
ttgggtaggggagggctcggcggtacccggagcttcaggccccaccggggcgcggagagtcccaggcccggccgggaccgggacggcgtccgagtgccaatggctagctctaggtgtcccgctccccgcgggtgccgctgcctccccggagcttctctcgcatggctggggacagtactgctacttctcgccgactgggtgctgctccggaccgcgctgccccgcatattctccctgctggtgcccaccgcgctgccactgctccgggtctgggcggtgggcctgagccgctgggccgtgctctggctgggggcctgcggggtcctcagggcaacggttggctccaagagcgaaaacgcaggtgcccagggctggctggctgctttgaagccattagctgcggcactgggcttggccctgccgggacttgccttgttccgagagctgatctcatggggagcccccgggtccgcggatagcaccaggctactgcactggggaagtcaccctaccgccttcgttgtcagttatgcagcggcactgcccgcagcagccctgtggcacaaactcgggagcctctgggtgcccggcggtcagggcggctctggaaaccctgtgcgtcggcttctaggctgcctgggctcggagacgcgccgcctctcgctgttcctggtcctggtggtcctctcctctcttggggagatggccattccattctttacgggccgcctcactgactggattctacaagatggctcagccgataccttcactcgaaacttaactctcatgtccattctcaccatagccagtgcagtgctggagttcgtgggtgacgggatctataacaacaccatgggccacgtgcacagccacttgcagggagaggtgtttggggctgtcctgcgccaggagacggagtttttccaacagaaccagacaggtaacatcatgtctcgggtaacagaggacacgtccaccctgagtgattctctgagtgagaatctgagcttatttctgtggtacctggtgcgaggcctatgtctcttggggatcatgctctggggatcagtgtccctcaccatggtcaccctgatcaccctgcctctgcttttccttctgcccaagaaggtgggaaaatggtaccagttgctggaagtgcaggtgcgggaatctctggcaaagtccagccaggtggccattgaggctctgtcggccatgcctacagttcgaagctttgccaacgaggagggcgaagcccagaagtttagggaaaagctgcaagaaataaagacactcaaccagaaggaggctgtggcctatgcagtcaactcctggaccactagtatttcaggtatgctgctgaaagtgggaatcctctacattggtgggcagctggtgaccagtggggctgtaagcagtgggaaccttgtcacatttgttctctaccagatgcagttcacccaggctgtggaggtactgctctccatctaccccagagtacagaaggctgtgggctcctcagagaaaatatttgagtacctggaccgcacccctcgctgcccacccagtggtctgttgactcccttacacttggagggccttgtccagttccaagatgtctcctttgcctacccaaaccgcccagatgtcttagtgctacaggggctgacattcaccctacgccctggcgaggtgacggcgctggtgggacccaatgggtctgggaagagcacagtggctgccctgctgcagaatctgtaccagcccaccgggggacagctgctgttggatgggaagccccttccccaatatgagcaccgctacctgcacaggcaggtggctgcagtgggacaagagccacaggtatttggaagaagtcttcaagaaaatattgcctatggcctgacccagaagccaactatggaggaaatcacagctgctgcagtaaagtctggggcccatagtttcatctctggactccctcagggctatgacacagaggtagacgaggctgggagccagctgtcagggggtcagcgacaggcagtggcgttggcccgagcattgatccggaaaccgtgtgtacttatcctggatgatgccaccagtgccctggatgcaaacagccagttacaggtggagcagctcctgtacgaaagccctgagcggtactcccgctcagtgcttctcatcacccagcacctcagcctggtggagcaggctgaccacatcctctttctggaaggaggcgctatccgggaggggggaacccaccagcagctcatggagaaaaaggggtgctactgggccatggtgcaggctcctgcagatgctccaaaatgaaagccttctcagacctgcgcactccatctccctcccttttcctctctctgtggtggagaaccacagctgcaaaataggcagctgcttccaggatgagttacttgaaattt

SEQ ID NO: 183995 - DNA, 888 bp, Homo Sapiens
gacagagccttcaatggccacctggcttggactttgccagagatttcccgcacttgcactttcccagcaactgtggatacatggacaagagatgtcacacgggttggcaaaccatcagggacactaatacctgagttacctatttggaaattaaaggtgagaagagacagaggaaaaggagaaaagagaaagagacacagctatgccccttggatgctaaagaaatacgaggaagaggaaaatgactcagaacgggttggggatcaaattcttaaagacagattgtggggagaagctagaaaagaagacccagagagtatggaggttaatgttgagcaacctgggaacatggaccacagggacagggtgttccatgaagatggagaatcagtaagggtgccaggaaagctggactgaaagcaatgtgagaggaactgagtctgccaagtctggaagatgagggtctgtgtagagcgggccaactccatgaacatacctggtaccattttcccaccttcttgggcagaaggaaaagcagaggcagggtgatcagggtgaccatggtgagggacactgatccccagagcatgatccccaagagacataggcctcgcaccaggtaccacagaaataagctcagattctcactcagagaatcactcagggtggacgtgtcctctgttacccgagacatgatgttacctgtctggttctgttggaaaaactccgtctcctggcgcaggacagccccaaacacctctccctgcaagtggctgtgcacgtggcccatggtgttgttatagatcccgtcacccacgaactccagcactgcactggctatggtgagaatggacatgagagttaagtttcgagtgaaggtatcgccaa

SEQ ID NO: 183996 - DNA, 2471 bp, Homo Sapiens
ctttgtacaaaaaagttggagcaatgcggctgggcgctgaggatcagccgcttcctgcctggattccacagcttcgcgccgtgtactgtcgccccatccctgcgcgcccagcctgccaagcagcgtgccccggttgcaggcgtcatgcagcgggcgcgacccacgctctgggccgctgcgctgactctgctggtgctgctccgcgggccgccggtggcgcgggctggcgcgagctcggggggcttgggtcccgtggtgcgctgcgagccgtgcgacgcgcgtgcactggcccagtgcgcgcctccgcccgccgtgtgcgcggagctggtgcgcgagccgggctgcggctgctgcctgacgtgcgcactgagcgagggccagccgtgcggcatctacaccgagcgctgtggctccggccttcgctgccagccgtcgcccgacgaggcgcgaccgctgcaggcgctgctggacggccgcgggctctgcgtcaacgctagtgccgtcagccgcctgcgcgcctacctgctgccagcgccgccagctccaggaaatgctagtgagtcggaggaagaccgcagcgccggcagtgtggagagcccgtccgtctccagcacgcaccgggtgtctgatcccaagttccaccccctccattcaaagataatcatcatcaagaaagggcatgctaaagacagccagcgctacaaagttgactacgagtctcagagcacagatacccagaacttctcctccgagtccaagcgggagacagaatatggtccctgccgtagagaaatggaagacacactgaatcacctgaagttcctcaatgtgctgagtcccaggggtgtacacattcccaactgtgacaagaagggattttataagaaaaagcagtgtcgcccttccaaaggcaggaagcggggcttctgctggtgtgtggataagtatgggcagcctctcccaggctacaccaccaaggggaaggaggacgtgcactgctacagcatgcagagcaagtagacgcctgccgcaaggttaatgtggagctcaaatatgccttattttgcacaaaagactgccaaggacatgaccagcagctggctacagcctcgatttatatttctgtttgtggtgaactgattttttttaaaccaaagtttagaaagaggtttttgaaatgcctatggtttctttgaatggtaaacttgagcatcttttcactttccagtagtcagcaaagagcagtttgaattttcttgtcgcttcctatcaaaatattcagagactcgagcacagcacccagacttcatgcgcccgtggaatgctcaccacatgttggtcgaagcggccgaccactgactttgtgacttaggcggctgtgttgcctatgtagagaacacgcttcacccccactccccgtacagtgcgcacaggctttatcgagaataggaaaacctttaaaccccggtcatccggacatcccaacgcatgctcctggagctcacagccttctgtggtgtcatttctgaaacaagggcgtggatccctcaaccaagaagaatgtttatgtcttcaagtgacctgtactgcttggggactattggagaaaataaggtggagtcctacttgtttaaaaaatatgtatctaagaatgttctagggcactctgggaacctataaaggcaggtatttcgggccctcctcttcaggaatcttcctgaagacatggcccagtcgaaggcccaggatggcttttgctgcggccccgtggggtaggagggacagagagacagggagagtcagcctccacattcagaggcatcacaagtaatggcacaattcttcggatgactgcagaaaatagtgttttgtagttcaacaactcaagacgaagcttatttctgaggataagctctttaaaggcaaagctttattttcatctctcatcttttgtcctccttagcacaatgtaaaaaagaatagtaatatcagaacaggaaggaggaatggcttgctggggagcccatccaggacactgggagcacatagagattcacccatgtttgttgaacttagagtcattctcatgcttttctttataattcacacatatatgcagagaagatatgttcttgttaacattgtatacaacatagccccaaatatagtaagatctatactagataatcctagatgaaatgttagagatgctatatgatacaactgtggccatgactgaagaaaggagctcacgcccagagactgggctgctctcccggaggccaaacccaagaaggtctggcaaagtcaggctcagggagactctgccctgctgcagacctcggtgtggacacacgctgcatagagctctccttgaaaacagaggggtctcaagacattctgcctacctattaacttttctttttttttaactttttggggggaaaagtatttttgaaaagtttgtcttg

SEQ ID NO: 183997 - DNA, 1283 bp, Homo Sapiens
ttggatcagggtcaccggtgagggtcagggtcagggtgaggaccctttacagcagatgaaggcctctccccagccagaaaagatggagcacacgctgggtggtggccccgcttcctcactggaaggagatggtgctcttcttttttctttctgaattgtggccaccttcataccagtctgtcatggaacacttaagctgcttgagtgtctgctggtactcccagccctgccatgcctgagccccttgcacacaaggagccaggagtaatcagggcagacccattagggcacggggacttctggattgtgaaattggctctctgggggccaaggccttctaacgttggtggaagtggctttggcttattgggtcggattctaggccattcgttccaacctttagagacatcccagctttccctagcccagagtctgcagcccctccaccatcccacatcctccccctccctttcctcatgaaccccagtcgcgcctctgccttctcaaacccctccaccatcccacaccctcctcctgcccttcctcatgaaccccagtcacgcctctgccttctcatccctgcgcaccacacaggctcgctcgtgcccggtgagtgctgaggctgctctgcacgtggagtgtggccctgtgggcaagggctgggctcttggaggtaggggagctacagggcgactgggaggaggatgtcgtgttacacacgcatcagagttaactttgcagtgagagcggccttgctgcggccaaagaacatggaaaagcatgagtggggtgatgtgccttaaagcatcagacacttgggcctcgggcatcaggagccagccacagggatgtctggggaaatggcgttccatgagacgcaagcacacaagaatgcacttggcacatctggggaacagcaggcagctgatatcactgggcccaccccgcaccagggaggatggaagcaggtgaggagctagaccacactgaggcggtggtcgggactcagagtttgctcagtgagccgttcactatgtgcaggggcagttccccgtctgaatttaggtgacgacactcaggtccagccttgccagtctcagcctccggtctccgttccccctctgcagaggccactttgtctgctgcacgtgatcatgaggggttgtgaagtgcttgccccatcagtagccatgtgtgcatgtgtaaataccatcctctgtgtgccctggaggctgtctttcagatagcatgtacaggtggcagcatagggcctgtccctactg

SEQ ID NO: 183998 - DNA, 1689 bp, Homo Sapiens
  misc_feature (940)..(971): n is a, c, g, or t
ttggccttggcccacgccaagattgagaagatcaagggcagcaagaaggccatcaaggtgttctccagtgccaagtaccctgctccagagcacctgcaggaatatggctccatcttcacgggcgcccaggaccctggcctgcagagatgctcccgccacaggatccagagcaagcaccgccccctggacgagcgggccctgcaggagaagctgaaggaatttcctgtgtgcgtgagcaccaagccggagcctgaggacgatgcagaagagggacttgggggtcttcccagcaacatcagctctgtcagctccttgctgcttttcaacaccaccgagaacctgtatggccagaaggcagggccgaggggtgtgggcgggaggcccggcctggcttagtggggacccagggcatcagacacaggtacagcacataggccaggagccagggggtgactggggtggctcggcttgggaggcctgggaccccacagtgcacgctgtgcccctgatgatgtgggagaggaacatgggctcaggacagcgggtgtcatcttgcctgacccccatgtcgcctctgtaggtagaagaagtatgtcttcctggaccccctggctggtgctgtaacaaagacccatgtgatgctgggggcagagacagaggagaagctgtttgatgcccccttgtccatcagcaagagagagcagctggaacagcaggtcccagagaactacttctatgtgccagacctgggccaggtgcctgagattgatgttccatcctacctgcctgacctgcccagcattgccaacgacctcatgtacattgccgacctgggccccggcattgccccctctgcccctggcaccattccagaactgcccaccttccacactgaggtagccgagcctctcaaggcagacctacaagatggggtactaannnnnnnnnnnnnnnnnnnnnnnnnnnnnnnngctcctgaggtgctggccagtgcacccccactcccaccctcaaccgcggcccctgtaggccaaggcgccaggcaggacgacagcagcagcagcacgtctccttcagtccagggagctcccagggaagtggtcgacccctccagtggctgggccactctgctagagtccatccgccaagctgggggcatcggcaaggccaagctgcgcagcatgaaggagcgaaagctggagaagaagaagcagaaggagcaggagcaagtgagagccacgagccaaggtgggcacttgatgtcggatctcttcaacaagctggtcatgaggcgcaagggcatctctgggaaaggacctggggctggtgaggggcccggaggagcctttgcccgcgtgtcagactccatccctcctctgccgccaccgcagcagccacaggtagaggaggacgaggacgactgggaatcctagggggctccatgacaccttcccccccagacccagacttgggccgttgctctgacatggacacagccaggacaagctgctcagacctgcttccttgggagggggtgacggaaccagcactgtgtggagaccagcttcaaggagcggaaggctggcttgaggccacacagctggggcggggacttttgtctgcctgtgctccatggggggacggctccacccagcctgcgccactgtgttcttctcttaagcttccaga

SEQ ID NO: 183999 - DNA, 865 bp, Homo Sapiens
ctttgtacaaaaaagttggcaaaacccctctgctggctcatgtgtgcaactgagactgtcagagcatggctagctcaggggtccagctctgcagggtgagggctagagaggaagcagggagtatctgcacacaggatgcccgcgctcaggtggttgccgaagtcagtgcccgggccccacacagtctccaaaggtccggcctccccagcgcggggctcctcgtttgaggggaggtgacttccctcccagcaggctcttggacacagtaagcttccccagccctgcctgagcagcctttcctccttgccctgttccccacctcccggctccagtccagggagctcccagggaagtggtcgacccctccggtggctgggccactctgctagagtccatccgccaagctgggggcatcggcaaggccaagctgcgcagcatgaaggagcgaaagctggagaagcagcagcagaaggagcaggagcaagtgagagccacgagccaaggtgggcacttgatgtcggatctcttcaacaagctggtcatgaggcgcaagggcatctctgggaaaggacctggggctggtgaggggcccggaggagcctttgtccgcgtgtcagactccatccctcctttgccgccaccgcagcagccacaggcagaggaggacgaggacgactgggaatcgtagggggctccatgacaccttctcccccagactcagacttgggccgttgctctgacatggacacagccaggacaagctgctcagacctgcttctctgggagggggtgacggaactcagcagtgtgtggagaccagcttcaaggagcggaagctggcttgaggccacacagctggggcggg

SEQ ID NO: 184000 - DNA, 1994 bp, Homo Sapiens
  misc_feature (1863)..(1872): n is a, c, g, or t
ttggggcgattgcttctgtctgttatttagatatggaagctgaggggatgcacagaggcagccagaacctaggtcagggtctcgctcggtgctgaccgcccccggggtcgagtaggcgatgggggagcccggcttcttcgtcacaggagaccgcgccggtggccggagctggtgcctgcggcgggtggggatgagcgccgggtggctgctgctggaagatgggtgcgaggtgactgtaggacgaggatttggtgtcacataccaactggtatcaaaaatctgccccctgatgatttctcgaaaccactgtgttttgaagcagaatcctgagggccaatggacaattatggacaacaagagtctaaatggtgtttggctgaacagagcgcgtctggaacctttaagggtctattccattcatcagggagactacatccaacttggagtgcctctggaaaataaggagaatgcggagtatgaatatgaagttactgaagaagactgggagacaatatatccttgtctttccccaaagaatgaccaaatgatagaaaaaaataaggaattgagaactaaaaggaaattcagtttggatgaattagcaggtcctggagctgaaggcccctcaaatttgaaatccaaaataaataaagtgtcttgtgaatctggtcagccagtgaaatcacaggggaaaggtgaagtggccagtacaccctctgacaatttggatcctaagttgactgcccttgagccaagtaagaccacaggggctcccatttaccctggcttccccaaagtcacagaggttcatcatgagcagaaagcctcaaactcttcagcatctcagagaagcttacagatgtttaaggtgaccatgtccaggattctgaggctcaaaatacagatgcaggaaaaacatgaagccgttatgaatgtgaaaaagcagacccaaaaggggaactcaaagaaagttgtgcaaatggagcaggaacttcaggacttacagtcccagctgtgtgcagagcaggctcagcagcaggcaagagtggagcaactagagaagactttccaggaagaggaacagcatcttcagggtttggagatagcccaaggagaaaaggacctgaagcaacagctggcccaggctctgcaggagcattgggctctaatggaagagctaaatcgcagcaagaaggactttgaagcaatcattcaagccaagaacaaagaattagagcagaccaaggaagagaaggagaagatgcaagcacagaaggaagaagttcttagccacatgaatgatgtgctagagaatgagctccaatgtattatttgttcagaatacttcattgaggctgtcaccttgaactgtgcccacagtttctgctcctactgtatcaatgaatggatgaagcggaagatagaatgccccatttgtcggaaggacattaagtccaaaacgtactctttggttctggacaattgcattaataagatggtaaataatctgagctcagaagtgaaagaacgacgaattgttctcattagggaacgaaaagcaaagagattgttctgaagaccgtgctctaagggcatttgaaagactgccaggtagtgcgagcctgagatggtctggaggattctctctagccgtgactccgctgctctgaaggtcaactgagaagtcttgtgggacagagacttgagttaggaagccctcagtcacttgccttccacggtggccagccctgctgccatcattggctgaagcaccaccaggattcacggcacccaactgcttcagggtacttcgtagactctgcctcactacatgtcgaaagagttatttgagttctcttctgnnnnnnnnnnaatttgttgttgttgttactgttttgatacctcggaaacacctcccgttgacagttgttttggataggttgggtgtacccatggctgcctctggagggaagtgtctattttggaaaggatgg

SEQ ID NO: 184001 - DNA, 2222 bp, Homo Sapiens
  misc_feature (1897)..(1938): n is a, c, g, or t
  misc_feature (2014)..(2048): n is a, c, g, or t
actttgtacaaaaaagttgggaagccgcttaccttcgcagtacaaaatggatctgtacatcaaaaggatggattaaacgatgatgattttgaaccttacttgagtccacaggcaaggcccaataatgcatatactgccatgtcagattcctacttacccagttactacagtccctccattggcttctcctattctttgggtgaagctgcttggtctacggggggtgacacagccatgccctacttaacttcttatggacagctgagcaacggagagccccacttcctaccagatgcaatgtttgggcaaccaggagccctaggtagcactccatttcttggtcagcatggttttaatttctttcccagtgggattgacttctcagcatggggaaataacagttctcagggacagtctactcagagctctggatatagtagcaattatgcttatgcacctagctccttaggtgagccatgattgatggacagtcagcttttgccaatgagaccctcaataaggctcctggcatgaatactatagaccaagggatggcagcactgaagttgggtagcacagaagttgcaagcaatgttccaaaagttgtaggttctgctgttggtagcgggtccattactagtaacatcgtggcttccaatagtttgcctccagccaccattgctcctccaaaaccagcatcttgggctgatattgctagcaagcctgcaaaacagcaacctaaactgaagaccaagaatggcattgcagggtcaagtcttccgccacccccgataaagcataacatggatattggaacttgggataacaagggtcccgttgcaaaagccccctcacaggctttggttcagaatataggtcagccaacccaggggtctcctcagcctgtaggtcagcaggctaacaatagcccaccagtggctcaggcatcagtagggcaacagacacagccattgcctccacctccaccacagcctgcccagctttcagtccagcaacaggcagctcagccaacccgctgggtagcacctcggaaccgtggcagtgggttcggtcataatggggtggatggtaatggagtaggacagtctcaggctggttctggatctactccttcagaaccccacccagtgttggagaagcttcggtccattaataactataaccccaaagattttgactggaatctgaaacatggccgggttttcatcattaagagctactctgaggacgatattcaccgttccattaagtataatatttggtgcagcacagagcatggtaacaagagactggatgctgcttatcgttccatgaacgggaaagggcccgtttacttacttttcagtgtcaacggcagtggacacttctgtggcgtggcagaaatgaaatctgctgtggactacaacacatgtgcaggtgtgtggtcccaggacaaatggaagggtcgttttgatgtcaggtggatttttgtgaaggacgttcccaatagccaactgcgacacattcgcctagagaacaacgagaataaaccagtgaccaactctagggacactcaggaagtgcctctggaaaaggctaagcaggtgttgaaaattatagccagctacaagcacaccacttccatttttgatgacttctcacactatgagaaacgccaagaggaagaagaaagtgttaaaaaggaacgtcaaggtcgtgggaaataaaaggcagttctacacagactgcagcaacggttgcatctgcatatcctaagaggaaaaaatgaccttcaagagaattaggacttttttcttaatttcactgacttcagagacgattgcagacttgcagtttaagtattggaatttcacaaaagacataggacttaactggnnnnnnnnnnnnnnnnnnnnnnnnnnnnnnnnnnnnnnnnnntccctctaggtagtttaggtgaaaaatgtcccttttattttggctttggttgtgatttcagagcataatgctatgnnnnnnnnnnnnnnnnnnnnnnnnnnnnnnnnnnnaagtccgtaagtgcatacagttttctctaatttttaaaccctttcctcctcccattttgacatttgcacttggagaacacttgagttgtgaaggttttgggcatccaccccagaaagtgggaatttgattttatccttccgaacctggaagaaccatttttatgaagaattttt

SEQ ID NO: 184002 - DNA, 1375 bp, Homo Sapiens
acaaaaaagttggctagtctttccaggtgttagtcgaaacctcgtggtgcgaccctggtcgtcccaaaccccctaggccttaatcctggggcggtgggggcggggaggccgtgagcacggcttccgctcctccaatccgccagagggcgcagcggccggcctctcccttcccggggttcttcgcgccgggccccttccgcgtgggtgagtgaatgtgagagtcagcgctcgcgccgcgcgcgccgcccgcctccgctgttcggcgctctgctttaggcggtggggggcgggcgcgcgcgtaaaagcatagagacgggcattgagctcttgggctagagcgtcgccgagtcggagccggagcctgagccgcgcgctgtgtctccgctgcgtccgccgaggcccccgagtgtcagggacaaaagcctccgcctgctcccgcagccggggctcatctgccgccgccgccgcgctgaggagagttcgccgccgtcgccgcccgtgaggatctgagagccatgtcggccagcagcctcttggagcagagaccaaaaggtcaaggaaacaaagtacaaaatggatctgtacatcaaaaggatggattaaacgatgatgattttgaaccttacttgagtccacaggcaaggcccaataatgcatatactgccatgtcagattcctacttacccagttactacagtccctccattggcttctcctattctttgggtgaagctgcttggtctacggggggtgacacagccatgccctacttaacttcttatggacagctgagcaacggagagccccacttcctaccagatgcaatgtttgggcaaccaggagccctaggtagcactccatttcttggtcagcatggttttaatttctttcccagtgggattgacttctcagcatggggaaataacagttctcagggacagtctactcagagctctggatatagtagcaattatgcttatgcacctagctccttaggtggagccatgattgatggacagtcagcttttgccaatgagaccctcaataaggctcctggcatgaatactatagaccaagggatggcagcactgaagttgggtagcacagaagttgcaagcaatgttccaaaagttgtaggttctgctgttggtagcgggtccattactagtaacatcgtggcttccaatagtttgcctccagccaccattgctcctccaaaaccagcatcttgggctgatattgctagcaagcctgcaaaacagcaacctaaactgaagaccaagaatggcattgcagggtcaagtcttccgccacccccgataaagcataacatggatattggaacttgggataacaagggtcccgttgcaaaagc

SEQ ID NO: 184003 - DNA, 1458 bp, Homo Sapiens
tacaaaaaagttggccctgcgcggggacactcagagcccggtgggcgggaggaaggcggcatgccccagacggtgatcctcccgggccctgcgccctggggcttcaggctctcagggggcatagacttcaaccagcctttggtcatcaccaggattacaccaggaagcaaggcggcagctgccaacctgtgtcctggagatgtcatcctggctattgacggctttgggacagagtccatgactcatgctgatgcgcaggacaggattaaagcagcagctcaccagctgtgtctcaaaattgacaggggagaaactcacttatggtctccacaagtatctgaagatgggaaagcccatcctttcaaaatcaacttagaatcagaaccacaggaattcaaacccattggtaccgcgcacaacagaagggcccagccttttgttgcagctgcaaacattgatgacaaaagacaggtagtgagcgcttcctataactcgccaattgggctctattcaactagcaatatacaagatgcgcttcacggacagctgcggggtctcattcctagctcacctcaaaacgagcccacagcctcggtgccccccgagtcggacgtgtaccggatgctccacgacaatcggaatgagcccacacagcctcgccagtcgggctccttcagagtgctccagggaatggtggacgatggctctgatgaccgtccggctggaacgcggagtgtgagagctccggtgacgaaagtccatggcggttcaggcggggcacagaggatgccgctctgtgacaaatgtgggagtggcatagttggtgctgtggtgaaggcgcgggataagtaccggcaccctgagtgcttcgtgtgtgccgactgcaacctcaacctcaagcaaaagggctacttcttcatagaaggggagctgtactgcgaaacccacgcaagagcccgcacaaagcccccagagggctatgacacggtcactctgtatcccaaagcttaagtctctgcaggcgtggcacgcacgcacgcacccacccacgcgcacttacacgagaagacattcatggctttgggcagaaggattgtgcagattgtcaactccaaatctaaagtcaaggctttagacctttatcctattgtttattgaggaaaaggaatgggaggcaaatgcctgctatgtgaaaaaaacatacacttagctatgttttgcaactctttttggggctagcaataatgatatttaaagcaataattttttgtatgtcatactccacaatttacatgtatattacagccatcaaacacataaacatcaagatatttgaaggactctaattgtctttctttgacaagttgattttgcaattgtggtaaatagcaaataacaatcttgtattctaacataatctgcagttgtctgtatgtgttttaactattacagtgcatg

SEQ ID NO: 184004 - DNA, 972 bp, Homo Sapiens
ttggctcgggatctgtccgagcaggaagccagcctcagcccggccgctgtcgccgccctgtcctggtgcccgtccgcgtcgtcgccctcttcactggccctcatcacttctcaccgcgccctccagcttcacccgtacaggtagccccgccgccgcgcacctgccttcgctcccgcaccggtgacagtggatagtggaaacaggagatcgtggatcctccttcaaaaatggaggatggaaagcccgtttgggcgccacaccctacagatggatttcagatgggcaatattgtggatattggccccgacagcttaacaattgaacccttgaatcagaaaggcaagacatttttggctctcataaaccaagtgtttcctgcagaagaggacagtaaaaaagatgtggaagataactgttcactaatgtatttaaatgaagccacactgctccataatatcaaagttcgatatagtaaagacagaatttatacatatgtcgccaacattctgattgcagtgaatccatactttgacatacctaaaatatattcttcagaagcaataaagtcatatcaaggaaaatctcttgggacaagaccacctcatgtctttgcaattgctgataaagcttttcgagacatgaaggtgctcaagatgagtcagtctatcattgtatctggagaatcaggagccggcaaaacagaaaatacaaaatttgttctaagatacctgactgaatcctatggaacaggtcaagatattgatgacagaattgttgaagctaacccactcctagaagcctttggaaatgcgaagactgttcgcaacaataatagcagtcgatttgggaaatttgtagaaatacattttaatgaaaagagctcagttgttggaggatttgtttcacattatctcctagagaaatctaggatctgtgttcaaggcaaagaggaagaaattatcatatctttta

SEQ ID NO: 184005 - DNA, 1785 bp, Homo Sapiens
ttggcgcctgctgtgctcttgcctgctgtgctctcgtaattactttcggaaaggttttctggctacaataaaatctgattaaatttgttaccaagcaaattgaattgttcaggctgcaacctttctagaagttttaaacgttatttaaaagaagatttcaacctcactccatttcagctttctctgaggagctgctcttgtgctgtttggcccctgcctactcggaatggaacaaagcatcgaacaaacaactgagatcctgttgtgcctatcacctgttgaagttgccagtcttaaggaaggaatcaatttctttcgcaataagagcactggcaaagactacgtcttgtacaagaataagagccgactgagggcatgcaagaatatgtgcaagcaccaaggaggcctgttcataaaagatatcgaggatttagccggaagttgttgaaatggatgaaaacaacggacttttgcttttagaactgaatcctcctaacccttgggacttacagcccagatctcctgaagagttggcttttggagaagtacagataacatatctcactcatgcctgcatggacctcaagttaggagacaagagaatggtgtttgacccttggttaatcggtcctgcttttgcccgtggatggtggttgctccatgagcctccatctgattggctggagaggctgtgccaggcagacctcatttacatcagtcatctgcactcagaccacctgagttaccccacactgaaaaagcttgctgggagaagaccagatattcccatttatgttggaaacacagaaaggcctgtattttggaatctgaatcagagcggtgtccagttgactaatatcaatgtcgtgccatttggaatatggcagcaggtggacaaaaatcttcgattcatgatcttgatggacggtgttcatcctgagatggacacttgcattattgtggagtacaaaggtcataaaatactcaatatagtagactgcaccagacccaatgggggaaggctgcctatgaaggttgctctaatgatgagtgattttgctggaggagcatcaggctttccaatgactttcagtggtggaaaatttacgggtacatcaaggaaacaaacaccaaaaatgacccaaatgaactcaacaatcttatcaagaaaaactctgatgtgataacatggacccctcgaccgggagccacccttgatctgggaagaatgctgaaggatcgaacagacagcaagggcatcatagagcctccagaggggacaaaaatttacaaggattcctgggattttgaaccttatttggaaatcttgaatgctgctctaggagatgaaatatttcttcactcatcctggataaaagaatacttcacttgggctggatttaaagattacaaccttgtggtcaggatgattgagacagatgaggacttcaatccttttcctggaggatatgactatttggttgactttttagatttatcctttccaaaagaaagactcacaacgagaaacatccctatgaggaaatccatagccggggtggatgtcatcagacacgtggtgaagaatgggtctactctgggatgagttgtatataggattccaacacggctccagcgggatcctgacatataccatcacctgttttggaatcattttcaaataaaactccccctcacaccccccactggaagtcattcctgatgtcgctgtgagcagaatgggcctggcgattttgcagactgcaaaaccacattgaaaatttc

SEQ ID NO: 184006 - DNA, 1171 bp, Homo Sapiens
ttgggttctatgacaggccagaaactatagtctgttgtgagcttccaggctctgctttgcctctgaatgttcaggtggagacttgaacactcggcttttagaatgacgataacagcaaagatttcttgagtgcttactatgtgccaggctttaagtattttatatacatcctcacaacaatcctatgaggcatgttctattattgtcttcattttatagatgagaaagccaaggcacagaacggtgaccaagatcacacagctagagtctggatttgaacccatgaatctgcagtttgtgctctcagtcagatgctccccctgctcttaatccatttcctgttttccttctttcgagtcctgctgcacttagcatctttccttttctcctcagcctgtgatatctgctcccagagactcttctccttggctctccgtgcctctgccatcatgggcagctgctcctcccagggacaggagggatccatactctgcttcctgggttgcccctgctagtggttccatgtctatttcagatccatagccgggtggatgtcatcagacacgtggtgaagaatggtctactctgggatgagttgtatataggattccaaacacggctccagcgggatcctgacatataccatcacctgttttggaatcattttcaaataaaactccccctcacaccacccaactggaagtcattcctgatgtgctgtgagcagaatgggcctgcgattttgcaagaatgcaaaaccacatgaaaatttcaagaaatcactgatctgatgcaaaataaaatttatcattacatcttgaacccaggaagcttacagcaaagagactatgctttatgacgtcagcaatagataattccacgttgcctttgtgatttgtatatatagcttacatttgtggatcactacataggttgattccaaaatattttacttgttccatccacagttctctacttaaagaaccaatgaacccaataggaataaattctctgtggaaaacaatgcctagctgtagtatatacaaatccaatcgcagaggaaacaggaagagaaaaacatcccagactacagtgaaaactggaaatggtctgttttcgtgatattcctatgattaacatgtattttttttcttaggaaaatgagattgtt

SEQ ID NO: 184007 - DNA, 1353 bp, Homo Sapiens
cccatgcgctccaaggccccatccggctccagatggtggcgcccatgcgctccagggccggtggccatgcgatccatcacggggcccatgcgctccaggccagctcccatactgcgggcaccatgcgctccatgctcaggcccatgcgctcgatggcagggcccatgcgctccacgccagagcccatgcgctcaatggtctggcccacacggtcgatgggagcggccatgcgctcaaggccgaagcccatgccggcacccatgcgctccacgccagagccaatgcgctccatggtctggcccatgcgctcaatgctggaggccatgtggtcgaggcccagcgggcccatgcgctcaatgccggagcccatgcgctccacggagcccatgcggtccatgaccaggcccatgcgctcgatctcggagcccacgcgatccatgccgtggcccaggcccgcgcccatgcgctccatgccggcacccccgaggcggtcaatgccaggacccatcctctcgatcccagggacgcttcctccacctccacctcctccctgctttgcaatgatctctcctctcttcagtgcattacttaggatttcatttatcctgcccatgttcatcccagatccaaatcgacccatgttttccataccaccaccaaagggcccctccattcctcccattttatttattccaaatcctatgccttccattcccattcctgcgggacctatgtttcccattccgatgcctttattcaggtgattggcatcaatgggttgccctcctggtcctaaccccatgccaataccaccaaggccatggggaagttgttgtggacgctcaggagggaagaaatctccttttggtaaggccctctcatccatcttgacgtgcattggtctatcaaatagcagctggccattgaacatagatatagcttgcacagcttcaatggactgttcaaaagtaacagtgcctattccacgactttttccatctttatcttcaagaatgtctgctcggaccaccacaccagccatactaaatacttccttcagtttcttccagccaactttataatccagatttgctacaaatactgtgcttccaagtcttccagccttttgcattgctctcctggcatgttcaccatcaggatcttctttgactttcagtggtcttccgctcagactatgcttgtttaggacttccgcagcttttttcatgctctcttccatcttgaattcaacaacagcacatccccttgactttccttcagcgtccattaagagctccacgtatgttacctcaccaactttttctttaaccccaacttttttgtacaaagttg

SEQ ID NO: 184008 - DNA, 934 bp, Homo Sapiens
  misc_feature (389)..(477): n is a, c, g, or t
ttggtgactgtcataaagatgaaaatgatttgtattggtatgaaatgcttatctttattctacttcgtaagggtaagttttatttatactctttggactcccatgaacttttgcacactgctttgtgtttttggtttaccctaaactaccatcctttttatctttgctttttttcttcctattcagaaaagagcaaaatgtgaaaagacacaagactctcaggtatagaatgaactgagcaatttggagaatgtattggactttgtcctctcttattcccccctcctagccctgcaagttgctaggtacttgtgaggcagtgtactggagaggggagagcatggatcctggggtcaaagggcctttgcccccacccttacttggccctnnnnnnnnnnnnnnnnnnnnnnnnnnnnnnnnnnnnnnnnnnnnnnnnnnnnnnnnnnnnnnnnnnnnnnnnnnnnnnnnnnnnnnnnngtcatgcagaattgttgggaggattgataatttagatgtttatacatgtaatgtacttagatcagtgtctgctcttttcacttgatatccagtactatgtaagatagaaggtgcatgtcttctgtattctgtatttcccatttcttttgcgtgcagtctttgattcgtacaatagaaggaacacgtagaatgtatatttgtacattcatgtcaacatagtatttgaaattgctaccaaactcatttaatttggcataagactaacagatgaagtctctcatttgcttgaagatattttacaaaatacccaactgttctatatttctttagaaaaagattatagttattaatattgatacctctgataatattttattcttaaaatcttcagtgattccttttactatagattcatgacagctaattagtactacctgatttagaggtttcctttccc

SEQ ID NO: 184009 - DNA, 1446 bp, Homo Sapiens
  misc_feature (53)..(83): n is a, c, g, or t
  misc_feature (1027)..(1045): n is a, c, g, or t
  misc_feature (1266)..(1279): n is a, c, g, or t
ttggatgttatacccttattttgtgttaaggatatattttattatgtgaatgnnnnnnnnnnnnnnnnnnnnnnnnnnnnnnngcttgtattgggaattagctttactggtaacttccttatttagtttttagtggtcaactctaataaaatgaaactagggctgagctagttagccctcactagccaaactgaaactctatgcaacattaaaagaagagatccatcatgtagcttgtgacacttttattttattagtcaccggggaacttttcagtgatgaaaatacacagggtaataaaccttcacatggcttcaaaaggaaaacaagcaaatcttctctaatctactcttactataatttcctaagtgtacaccaaactctggatttaaaaatctgaagtactatagaacattaagttgaagaatggaaattaagagtacgtattcatggtttatatttcttattctatggagttcgtgaacacatctaggtggaatgcatctgagactaagggctggtttttaatcctcataagaaaccagccttgaagaattaacaattctcttcattggtattctaaacctcctaagatatttaggcttctgtacataaaagtgtttttgctaaatttacagtatatatagatcctttcatattattttactaagaatgtttgaactttgcatatttgatatagttcctggtaggaatagcacagctcaaacattagtttttctacttacctcctctaacacgtggtttgtctggagagtttctaaaaattcagctataaccccagttcatgtatttactggtgattgttcttgctgaggtagtaacagcccaatcttgggctgttaaatcctaggaaatctcgaatcatagtgattaaaatagttggggtaaagttgtagcttatatgcaatactacttggaggaattcttttactaatttgtatttaatgtggaaattgtatagtttcattgatttaatcataaataatggaaatggtctccaagaagnnnnnnnnnnnnnnnnnnngcttatacactctgattcctataatacagtgctataagctatgcacagaaaataaaatgtttgaaatccaagaataatggttcttactgctaagagggagtaatagttattactaatgattttgattgggttgcatttttgttgcaatgtttattccacttgcagttagaatatgaatatgttttatcactagtgtggctaaataaccaaacatttgtgtnnnnnnnnnnnnnngccaagatttcattgtttgttgaatatttcttaagcatctggctcctaaagagactcgcttcttactcaagcctgtaaactatgcatgatggaaattcttgtattttatttagggaatggctgttggtttactcaccacatctgtggaatcatggcctataaatgtt

SEQ ID NO: 184010 - DNA, 1595 bp, Homo Sapiens
  misc_feature (140)..(158): n is a, c, g, or t
  misc_feature (379)..(392): n is a, c, g, or t
  misc_feature (1208)..(1296): n is a, c, g, or t
ttggttaaaatagttggggtaaagttgtagcttatatgcaatactacttggaggaattcttctactaatttgtatttaatgtggaaattgtatagtttcattgatttaatcataaataatggaaatggtctccaagaagnnnnnnnnnnnnnnnnnnngcttatacactctgattcctataatacagtgctataagctatgcacagaaaataaaatgtttgaaatccaagaataatggttcttactgctaagagggagtaatagttattactaatgattttgattgggttgcatttttgttgcaatgtttattccacttgcagttagaatatgaatatgttttatcactagtgtggctaaataaccaaacatttgtgtnnnnnnnnnnnnnngccaagatttcattgtttgttgaatatttcttaagcatctggcccctaaagagaccgcttcttaccaagcctgtaaactatgcatgatggaaattcttgtattttatttaggaatggctgttggtttactcaccacatctgtggaatcatggctataaatgtttgcttacaaactctttgtgacttgtaatttaacttaatctcatctaatgtaaatattagattatgatgttcagtaacatcttccataggtataaactgctgtcattattgatttcagagtaactctgagtaatcaaataggtaaaagcatgttttgagtaaaatagctagatttatactttacttgtatacagacttaacaacaaccggtattgactggattgacagctaaagtatcagaatgaaagcaaggtttttttgatgttacctgactgtcataaagatgaaaatgatttgtattggtatgaaatgcttatctttattctacttcgtaagggtaagttttatttatactctttggactcccatgaacttttgcacactgctttgtgtttttggtttaccctaaactaccatcctttttatctttgctttttttcttcctattcagaaaagagcaaaatgtgaaaagacacaagactctcaggtatagaatgaactgagcaatttggagaatgtattggactttgtcctctcttattcccccctcctagccctgcaagttgctaggtacttgtgaggcagtgtactggagaggggagagcatggatcctggggtcaaagggcctttgcccccacccttacttggccctnnnnnnnnnnnnnnnnnnnnnnnnnnnnnnnnnnnnnnnnnnnnnnnnnnnnnnnnnnnnnnnnnnnnnnnnnnnnnnnnnnnnnnnnngtcatgcagaattgttgggaggattgataatttagatgtttatacatgtaatgtacttagatcagtgtctgctcttttcacttgatatccagtactatgtaagatagaaggtgcatgtcttctgtattctgtatttcccatttcttttgcgtgcagtcttttgattcgtacaatagaaagaacacgtagaaatgtatatttgtacattcatgtcaacatagtatttgaaattgctacccaactcatttaatttgggaaggactaacagatgaaagtctctcatttgcttgaagatattt

SEQ ID NO: 184011 - DNA, 2138 bp, Homo Sapiens
  misc_feature (859)..(873): n is a, c, g, or t
  misc_feature (1173)..(1187): n is a, c, g, or t
  misc_feature (1727)..(1757): n is a, c, g, or t
ttggcggatctctgaagagctgggtcgccagcctctcccgcgcacgttgcctggcctccagcacctacttggtcccgcgcgctccctcgtgtcgcccctcggagcagcagccgccgcggtcgccgctacccggaaagaagtcagagacgccgcgaggtcgccgccaccgccatgcccaagaataaaggtaaaggaggtaaaaacagacgcaggggtaagaatgagaatgaatctgaaaaaagagaactggtattcaaagaggatggtcaggagtatgctcaggtaatcaaaatgttgggaaatggacggctagaagcaatgtgtttcgatggtgtaaagaggttatgtcacatcagaggaaaattgagaaaaaaggtttggataaatacctcggacattattttggttggtctccgagactaccaggataacaaagctgatgtaattttaaaatacaatgcagacgaagctagaagtctgaaggcatacggcgagcttccagagcatgctaaaatcaatgaaactgatacatttggtcctggagatgatgatgaaattcagtttgatgacattggagatgatgatgaagatattgatgacatctaaattgaactcaacattttacattccatcttttctgaagattgtcctacaatttggattttgatcatgacaaagaagattaaaatttcattagcatgaatgcaatttgttaaagcagactgatttgtttctaagatatttttggtttttttaaaactgataataatgctgaattatcttaagtgagatgttaagcccactttgttcttttaatgtaatggagcttatgggtagaagaccatgtctactaattacnnnnnnnnnnnnnnnccatgcattgctgcttttcctaccacttccagtaagaaaatgggtgttttgaagaaatcatttgccttgtcctcacggaatctgattaagccctggcctcttgattgtatagagtcattgtgtatattccagttacctagatattcccttgagattttgatacaatttgagggaggcagaagtctgcagttgaagaaaaaaaataagtctgtttgtcatatttaagtagcctgtggctatttttatactgattttgatatcatgttcttttcatagtcgtattttgccaccgtaaacatnnnnnnnnnnnnnnngatttccaaaatgccgttttcaaaacctgggttttaatagcagtattgaatttgtaagcttagtagttgcagaaattgaacactaggtggctcagttatcttaacaggggaagtactgatacaattgttgacttttcttttactatgtgtaagaaataccccaaacatgaaaagattgttttgatcatatgcatgcatgtagaatatttttgcagagcagaaagattatgttagaagtgtgatttttattttcagaagtcatatacatgtaagctacaattttgagtgctttataaacacttaagatatatatataaattttaatttcatagcaacttgtaaaaaataaaatacttgttgaaaagcctttttcaacatatccctaagctaagggaagaggaaggaataacaactcagtgaaaagatggtctccagtttctgaatgaaaaagctacagctgagaaataaaataaaatgtcatgctgcagaatatgttatacccttattttgtgttaaggatatattttattatgtgaatgnnnnnnnnnnnnnnnnnnnnnnnnnnnnnnngcttgtattgggaattagctttactggtaacttccttatttagtttttagtggtcaactctaataaaatgaaactagggctgagctagttagccctcactagccaaactgaaactctatgcaacattaaaagaagagatccatcatgtagcttgtgacacttttattttattagtcaccggggaacttttcagtgatgaaaatacacagggtaataaaccttcacatggcttcaaaaggaaaacaagcaaatcttctctaatctactcttactataatttcctaagtgtacaccaaactctggatttaaaaatctgaagtactatagaacattaagttgaagattggaaatttaagagtacgtattcatggtttatatttc

SEQ ID NO: 184012 - DNA, 883 bp, Homo Sapiens
  misc_feature (507)..(518): n is a, c, g, or t
ttggatttaaaatatgtaggacacattattagaattgttgggatctcatagatggaatgggaatgggggtgatatagataaacttactagatataaattaaaattttataaatatttcatatttttctgagtaaatatgattggattatgcaacagcatatgtaatatgggaatgttttgtagataataaaacttacatgatctgtacttccacgtgactgggtgctgaggggagttaaagcctccctggtgccagccccagtgcttgtcaaatttgctgacaggtcacatcatattgtaattctattctttgcagctcaagcatgcagtatgaatactgtgtattttttaaaaaaataatttagtatcaaggcttcagaaaatgccatttacggcatcccttctgtatgtaacaaaaagacattcataatgttaggaagatgataaaaattcgctcttttaaagtgcagcttattattctcaattgctaaatacgattactctgcnnnnnnnnnnnncatttcttttgatgtcatatgtgagtatcttataatttagttcatttgttcagggtaaaatttgaaacaaaaaattttacctgtgcaaaatagttttttaaaaattatacatgtagctcaacttgaggtactgctatataatattcactcacattatcacggaatttatgtatagtttctctaatatagaagataaaattggtgtcctcataactttaacaaagaaaaccctcagtcctatttattaatgggtagaattaaatatataattttatagctcagtttacccagtattcatctgcaaagccagattgctctcattgcttttatatttttaaattgtagcttttagagacctatgatcc

SEQ ID NO: 184013 - DNA, 1286 bp, Homo Sapiens
ttgggctgtgtgtgtgaagcgtacctagggcgggaggcgacatggagacaggggcggccgagctgtatgaccaggcccttttgggcatcctgcagcacgtgggcaacgtccaggatttcctgcgcgttctctttggcttcctctaccgcaagacagacttctatcgcttgctgcgccacccatcggaccgcatgggcttcccgcccggggccgcgcaggccttggtgctgcaggtattcaaaacctttgaccacatggcccgtcaggatgatgagaagagaaggcaggaacttgaagagaaaatcagaagaaaggaagaggaagaggccaagactgtgtcagctgctgcagctgagaaggagccagtcccagttccagtccaggaaatagagattgactccaccacagaattggatgggcatcaggaagtagagaaagtgcagcctccaggccctgtgaaggaaatggcccatggttcacaggaggcagaagctccaggagcagttgctggtgctgctgaagtccctagggaaccaccaattcttcccaggattcaggagcagttccagaaaaatcccgacagttacaatggtgctgtccgagagaactacacctggtcacaggactatactgacctggaggtcagggtgccagtacccaagcacgtggtgaagggaaagcaggtctcagtggcccttagcagcagctccattcgtgtggccatgctggaggaaaatggggagcgcgtcctcatggaagggaagctcacccacaagatcaacactgagagttctctctggagtctcgagcccgggaagtgcgttttggtgaacctgagcaaggtgggcgagtattggtggaacgccatcctggagggagaagagcccatcgacattgacaagatcaacaaggagcgctccatggccaccgtggatgaggaggaacaggcggtgttggacaggcttacctttgactaccaccagaagctgcagggcaagccacagagccatgagctgaaagtccatgagatgctgaagaaggggtgggatgctgaaggttctctcttccgaggccagcgattcgaccctgccatgttcaacatctccccgggggctgtgcagttttaatgaccagaaggaaaggaaaccctcgccggtggggaggcagagccttatcctcggctgcccttcttggctccctgcattccagggacttgctcgtcttgtttacccctagccatcctttctttcaagggtgaaccaggccttccaccctgaccttgcatc

SEQ ID NO: 184014 - DNA, 1096 bp, Homo Sapiens
  misc_feature (254)..(267): n is a, c, g, or t
  misc_feature (291)..(392): n is a, c, g, or t
  misc_feature (416)..(526): n is a, c, g, or t
  misc_feature (678)..(784): n is a, c, g, or t
ctttgtacaaaaaagttggctctttacatgcctggagatgtccaaaagatacccaaattttaatattccagaagaacaactttagcatcagaaggttcacccagcaccttgcagattttcttaaggaattttgtctcacttttaaaaagaaggggagaagtcagctactctagttctgttgttttgtgtatataattttttaaaaaaaatttgtgtgcttctgctcattactacactggtgtgtccctctgccnnnnnnnnnnnnnnaagacagggtctcattctatcggnnnnnnnnnnnnnnnnnnnnnnnnnnnnnnnnnnnnnnnnnnnnnnnnnnnnnnnnnnnnnnnnnnnnnnnnnnnnnnnnnnnnnnnnnnnnnnnnnnnnnngcatgcaccactacgcatgactannnnnnnnnnnnnnnnnnnnnnnnnnnnnnnnnnnnnnnnnnnnnnnnnnnnnnnnnnnnnnnnnnnnnnnnnnnnnnnnnnnnnnnnnnnnnnnnnnnnnnnnnnnnnnnatgagccactgcacctgcccagctccccaactccctgccattttttaagagacagtttcgctccatcgcccaggcctgggatgcagtgatgtgatcatagctcactgtaacctcaaactctggggctcaagcagttctcccaccagcctccnnnnnnnnnnnnnnnnnnnnnnnnnnnnnnnnnnnnnnnnnnnnnnnnnnnnnnnnnnnnnnnnnnnnnnnnnnnnnnnnnnnnnnnnnnnnnnnnnnnnnnnnnnntgggcatgagctgctgtgcccagcctccatgttttaatatcaactctcactcctgaattcagttgctttgcccaagataggagttctctgatgcagaaattattgggctcttttagggtaagaagtttgtgtctttgtctggccacatcttgactaggtattgtctactctgaagacctttaatggcttccctctttcatctcctgagtatgtaacttgcaatgggcagctatccagtgacttgttctgagtaaagtgtgttcattaatgtttatttagctctgaagcaagagtgatatactccaggactta

SEQ ID NO: 184015 - DNA, 903 bp, Homo Sapiens
  misc_feature (704)..(715): n is a, c, g, or t
ttggcccagttctgattctgctgctcttgctgtttcttcggaggagagcggtggtcaaagagcccttactgcccccagaggatgacacccgggacaacgtttattactatgatgaagaaggaggcggagaagaggaccaggactttgacttgagccagctgcacaggggcctggacgctcggcctgaagtgactcgtaacgacgttgcaccaaccctcatgagtgtcccccggtatcttccccgccctgccaatcccgatgaaattggaaattttattgatgaaaatctgaaagcggctgatactgaccccacagccccgccttatgattctctgctcgtgtttgactatgaaggaagcggttccgaagctgctagtctgagctccctgaactcctcagagtcagacaaagaccaggactatgactacttgaacgaatggggcaatcgcttcaagaagctggctgacatgtacggaggcggcgaggacgactaggggactcgagagaggcgggccccagacccatgtgctgggaaatgcagaaatcacgttgctggtggtttttcagctcccttcccttgagatgagtttctggggaaaaaaaagagactggttagtgatgcagttagtatagctttatactctctccactttatagctctaataagtttgtgttagaaaagtttcgacttatttcttaaagcnnnnnnnnnnnncccatcactctttacatggtggtgatgtccaaaagatacccaaattttaatattccagaagaacaactttagcatcagaaggttcacccagcaccttgcagattttcttaaggaattttgtctcacttttaaaaagaaggggagaagtcagctactctagttctgttgttttgtgtatataatttttt

SEQ ID NO: 184016 - DNA, 2248 bp, Homo Sapiens
  misc_feature (2103)..(2114): n is a, c, g, or t
ttggatcagaatgacaacaagcccgaattcacccaggaggtctttaaggggtctgtcatggaaggtgctcttccaggaacctctgtgatggaggtcacagccacagacgcggacgatgatgtgaacacctacaatgccgccatcgcttacaccatcctcagccaagatcctgagctccctgacaaaaatatgttcaccattaacaggaacacaggagtcatcagtgtggtcaccactgggctggaccgagagagtttccctacgtataccctggtggttcaagctgctgaccttcaaggtgaggggttaagcacaacagcaacagctgtgatcacagtcactgacaccaacgataatcctccgatcttcaatcccaccacgtacaagggtcaggtgcctgagaacgaggctaacgtcgtaatcaccacactgaaagtgactgatgctgatgcccccaataccccagcgtgggaggctgtatacaccatattgaatgatgatggtggacaatttgtcgtcaccacaaatccagtgaacaacgatggcattttgaaaacagcaaagggcttggattttgaggccaagcagcagtacattctacacgtagcagtgacgaatgtggtaccttttgaggtctctctcaccacctccacagccaccgtcaccgtggatgtgctggatgtgaatgaagcccccatctttgtgcctcctgaaaagagagtggaagtgtccgaggactttggcgtgggccaggaaatcacatcctacactgcccaggagccagacacatttatggaacagaaaataacatatcggatttggagagacactgccaactgggctggagattaatccggacactggtgccatttccactcgggctgagctggacagggaggattttgagcacgtgaagaacagcacgtacacagccctaatcatagctacagacaatggttctccagttgctactggaacagggacacttctgctgatcctgtctgatgtgaatgacaacgcccccataccagaacctcgaactatattcttctgtgagaggaatccaaagcctcaggtcataaacatcattgatgcagaccttcctcccaatacatctcccttcacagcagaactaacacacggggcgagtgccaactggaccattcagtacaacgacccaacccaagaatctatcattttgaagccaaagatggccttagaggtgggtgactacaaaatcaatctcaagctcatggataaccagaataaagaccaagtgaccaccttagaggtcagcgtgtgtgactgtgaaggggccgccggcgtctgtaggaaggcacagcctgtcgaagcaggattgcaaattcctgccattctggggattcttggaggaattcttgctttgctaattctgattctgctgctcttgctgtttcttcggaggagagcggtggtcaaagagcccttactgcccccagaggatgacacccgggacaacgtttattactatgatgaagaaggaggcggagaagaggaccaggactttgacttgagccagctgcacaggggcctggacgctcggcctgaagtgactcgtaacgacgttgcaccaaccctcatgagtgtcccccggtatcttccccgccctgccaatcccgatgaaattggaaattttattgatgaaaatctgaaagcggctgatactgaccccacagccccgccttatgattctctgctcgtgtttgactatgaaggaagcggttccgaagctgctagtctgagctccctgaactcctcagagtcagacaaagaccaggactatgactacttgaacgaatggggcaatcgcttcaagaagctggctgacatgtacggaggcggcgaggacgactaggggactcgagagaggcgggccccagacccatgtgctgggaaatgcagaaatcacgttgctggtggtttttcagctcccttcccttgagatgagtttctggggaaaaaaagagactggttagtgatgcagttagtatagctttatactctctccactttatagctctaataagtttgtgttagaaaagtttcgacttatttcttaaagcnnnnnnnnnnnncccatcactctttacatggtggtgatgtccaaaagatacccaaattttaatattccagaagaacaactttagcatcagaaggttcacccagcaccttgcagattttcttaaggaattttgtctcacttttaaaa

SEQ ID NO: 184017 - DNA, 338 bp, Homo Sapiens
  misc_feature (49)..(61): n is a, c, g, or t
  misc_feature (302)..(315): n is a, c, g, or t
ttggctaataagtttgtgttagaaaagtttcgacttatttcttaaagcnnnnnnnnnnnnncccatcactctttacatggtggtgatgtccaaaagatacccaaattttaatattccagaagaacaactttagcatcagaaggttcacccagcaccttgcaaattttcttaaggaattttgtctcacttttaaaaagaaggggagaagtcagctactctagttctgttgttttgtgtatataattttttaaaaaaaatttgtgtgcttctgctcattactacactggtgtgtccctctgccnnnnnnnnnnnnnnaaaacagggtctcattctatcgg

SEQ ID NO: 184018 - DNA, 1430 bp, Homo Sapiens
  misc_feature (403)..(414): n is a, c, g, or t
  misc_feature (655)..(668): n is a, c, g, or t
  misc_feature (692)..(793): n is a, c, g, or t
  misc_feature (817)..(927): n is a, c, g, or t
  misc_feature (1079)..(1185): n is a, c, g, or t
actttgtacaaaaaagttggcttatgattctctgctcgtgtttgactatgaaggaagcggttccgaagctgctagtctgagctccctgaactcctcagagtcagacaaagaccaggactatgactacttgaacgaatggggcaatcgcttcaagaagctggctgacatgtacggaggcggcgaggacgactaggggactcgagagaggcgggccccagacccatgtgctgggaaatgcagaaatcacgttgctggtggtttttcagctcccttcccttgagatgagtttctggggaaaaaaaagagactggttagtgatgcagttagtatagctttatactctctccactttatagctctaataagtttgtgttagaaaagtttcgacttatttcttaaagcnnnnnnnnnnnncccatcactctttacatggtggtgatgtccaaaagatacccaaattttaatattccagaagaacaactttagcatcagaaggttcacccagcaccttgcagattttcttaaggaattttgtctcacttttaaaaagaaggggagaagtcagctactctagttctgttgttttgtgtatataattttttaaaaaaaatttgtgtgcttctgctcattactacactggtgtgtccctctgccnnnnnnnnnnnnnnaagacagggtctcattctatcggnnnnnnnnnnnnnnnnnnnnnnnnnnnnnnnnnnnnnnnnnnnnnnnnnnnnnnnnnnnnnnnnnnnnnnnnnnnnnnnnnnnnnnnnnnnnnnnnnnnnnngcatgcaccactacgcatgactannnnnnnnnnnnnnnnnnnnnnnnnnnnnnnnnnnnnnnnnnnnnnnnnnnnnnnnnnnnnnnnnnnnnnnnnnnnnnnnnnnnnnnnnnnnnnnnnnnnnnnnnnnnnnnatgagccactgcacctgcccagctccccaactccctgccattttttaagagacagtttcgctccatcgcccaggcctgggatgcagtgatgtgatcatagctcactgtaacctcaaactctggggctcaagcagttctcccaccagcctccnnnnnnnnnnnnnnnnnnnnnnnnnnnnnnnnnnnnnnnnnnnnnnnnnnnnnnnnnnnnnnnnnnnnnnnnnnnnnnnnnnnnnnnnnnnnnnnnnnnnnnnnnnntgggcatgagctgctgtgcccagcctccatgttttaatatcaactctcactcctgaattcagttgctttgcccaagataggagttctctgatgcagaaattattgggctcttttagggtaagaagtttgtgtctttgtctggccacatcttgactaggtattgtctactctgaagacctttaatggcttccctctttcatctcctgagtatgtaacttgcaatgggcagctatccagtgacttgt

SEQ ID NO: 184019 - DNA, 1075 bp, Homo Sapiens
  misc_feature (454)..(564): n is a, c, g, or t
  misc_feature (716)..(822): n is a, c, g, or t
ttgggcaaagcacctgtgagcttgcggaagtcagttcagactccagcccgctccagcccggcccgacccgaccgcacccggcgcctgccctcgctcggcgtccccggccagccatgggcccttggagccgcagcctctcggcgctgctgctgctgctgcaggtctcctcttggctctgccaggagccggagccctgccaccctggctttgacgccgagagctacacgttcacggtgccccggcgccacctggagagaggccgcgtcctgggcagagtgaattttgaagattgcaccggtcgacaaaggacagcctatttttccctcgacacccgattcaaagtgggcacagatggtgtgattacagtcaaaaggcctctacggtttcataacccacagatccatttcttggtctacgcctgggaccacaggcatgcaccactacgcatgactannnnnnnnnnnnnnnnnnnnnnnnnnnnnnnnnnnnnnnnnnnnnnnnnnnnnnnnnnnnnnnnnnnnnnnnnnnnnnnnnnnnnnnnnnnnnnnnnnnnnnnnnnnnnnnatgagccactgcacctgcccagctccccaactccctgccattttttaagagacagtttcgctccatcgcccaggcctgggatgcagtgatgtgatcatagctcactgtaacctcaaactctggggctcaagcagttctcccaccagcctccnnnnnnnnnnnnnnnnnnnnnnnnnnnnnnnnnnnnnnnnnnnnnnnnnnnnnnnnnnnnnnnnnnnnnnnnnnnnnnnnnnnnnnnnnnnnnnnnnnnnnnnnnnntgggcatgagctgctgtgcccagcctccatgttttaatatcaactctcactcctgaattcagttgctttgcccaagataggagttctctgatgcagaaattattgggctcttttaggggtaagaagtttgtgtctttgtctggccacatctttgactaggtattgtctactctgaagacctttaatggcttccctcttttcatctcctgagtatgtaacttgcaatgggcagctatccagtgacttgttctga
